United States Patent Application Publication US 2011/0183924 A1 - sequence listing, part 16

SEQ ID NO: 38873 - DNA, 796 bp, Homo sapiens
  misc_feature (2)..(3): n is a, c, g, or t
tnngctagtagagccggtggttgaatcggccgagggcagcctgagggttgactggattggtgaggcccgtgtggctacttctgtggaagcagtgctgtagttactggaagataaaagggaaagcaagcccttggtgggggaaagtatggctgcgatgatggcatttcttaggacacctttggattaataatgaaaacaactactctctgagcagctgttcgaatcatctgatatttatactgaatgagttactcatgcaaatcaagaggttccaatcttcgtgttcactttaagaacactcgtgaaactgctcaggccatcaagggtatgcatatacgaaaagccacgaagtatctgaaagatgtcactttacagaaacagtgtgtaccattccgacgttacaatggtggagttggcaggtgtgcgcaggccaagcaatggggctggacacaaggtcggtggcccaaaaagagtgctgaatttttgctgcacatgcttaaaaacgcagagagtaatgctgaacttaagggtttagatgtagattctctggtcattgagcatatccaagtgaacaaagcacctaagatgcgccgccggacctacagagctcatggtcggattaacccatacatgagctctccctgccacattgagatgatccttacggaaaaggaacagattgttcctaaaccagaagaggaggttgcccagaagaaaaagatatcccagaagaaactgaagaaacaaaaacttatggcacgggagtaaattcagcattaaaataaatgtaattaaa

SEQ ID NO: 38874 - DNA, 491 bp, Homo sapiens
  misc_feature (2)..(3): n is a, c, g, or t
  misc_feature (430)..(430): n is a, c, g, or t
  misc_feature (437)..(437): n is a, c, g, or t
tnngctagtagagccggtggttgaatcggccgagggcagcctgagggttgactggattggtgaggcccgtgtggctacttctgtggaagcagtgctgtagttactggaagataaaaggtgatctgtgaaaatggttcgctattcacttgacccggagaaccccacgaaatcatgcaaatcaagaggttccaatcttcgtgttcactttaagaacactcgtgaaactgctcaggccatcaagggtatgcatatacgaaaagccacgaagtatctgaaagatgtcactttacagaaacagtgtgtaccattccgacgttacaatggtggagttggcaggtgtgcgcaggccaagcaatggggctggacacaaggtcggtggcccaaaaagagtgctgaatttttgctgcacatgcttaaaccgagaggtatnctgactnaggttgagtgagtcctcggcatagcatcccagtaccaagccctagtcgccccga

SEQ ID NO: 38875 - DNA, 789 bp, Homo sapiens
  misc_feature (2)..(3): n is a, c, g, or t
tnngctagtagagccggtggttgaatcggccgagggcagcctgagggttgactggattggtgaggcccgtgtggctacttctgtggaagcagtgctgtagttactggaagataaaagggaaagcaagcccttggtgggggaaagtatggctgcgatgatggcatttcttaggacacctttggattaataatgaaaacaactactctctgagcagctgttcgaatcatctgatatttatactgaatgagttactgtaagtacgtattgacagaattacactgtactttcctctaggcatgcaaatcaagaggttccaatcttcgtgttcactttaagaacactcgtgaaactgctcaggccatcaagggtatgcatatacgaaaagccacgaagtatctgaaagatgtcactttacagaaacagtgtgtaccattccgacgttacaatggtggagttggcaggtgtgcgcaggccaagcaatggggctggacacaaggtcggtggcccaaaaagagtgctgaggtttagatgtagattctctggtcattgagcatatccaagtgaacaaagcacctaagatgcgccgccggacctacagagctcatggtcggattaacccatacatgagctctccctgccacattgagatgatccttacggaaaaggaacagattgttcctaaaccagaagaggaggttgcccagaagaaaaagatatcccagaagaaactgaagaaacaaaaacttatggcacgggagtaaattcagcattaaaataaatgtaattaaa

SEQ ID NO: 38876 - DNA, 295 bp, Homo sapiens
gtaagtggacaggaggtagatacccatttcctacttggggcttggcataagataccaaaaattaaccaaaacgttttatttcctagcatgcaaatcaagaggttccaatcttcgtgttcactttaaggtatgcgattcatagttgtgatccaacagttcctcatgttccactcaaaaaaggtagctgcagtgatgactttcttaggacacctttggatttaccgtgaaaattaataaattctgagcagccaccttatatttaggcattgatgatcagggtgtaaggatgtagcgt

SEQ ID NO: 38877 - DNA, 451 bp, Homo sapiens
tccagttctgctctggatctacaaaaaattcctggagccatatatataccctctggtttcccccttcgttagtcgtatatggcctaagaaagcaatacaagaatccaatgatacaaacaaaggcaaagtaaactttaaggtaagaacattcacatgccttgaataagagcagtgaaagggggtggtacttgggtgaaacactagattttggaaggacaagttttagaaccagaagcttcaatagtttgtgtaacatttggcttaaattaaagttttaaagtaggcctctgattaatgcatttgtcctttggccaaaatgataaccatattttctgactggtaagtgcaatggtaaatagctaatggatgaggagagattatgctgatacaaaccagtttcactgattgatgactttgataagagatttaattagaaggatcatagagattt

SEQ ID NO: 38878 - DNA, 628 bp, Homo sapiens
ggccggggcctctttccctaagcagcctgtggtgatctgtgaaaatggttcgctattcacttgacccggagaaccccacgaaatcatgcaaatcaagaggttccaatcttcgtgttcactttaagaacactcgtgaaactgctcaggccatcaagggtatgcatatacgaaaagccacgaagtatctgaaagatgtcactttacagaaacagtgtgtaccattccgacgttacaatggtggagttggcaggtgtgcgcaggccaagcaatggggctggacacaaggtcggtggcccaaaaagagtgctgaatttttgctgcacatgcttaaaaacgcagagagtaatgctgaacttaagggtttagatgtagattctctggtcattgagcatatccaagtgaacaaagcacctaagatgcgccgccggacctacagagctcatggtcggattaacccatacatgagctctccctgccacattgagatgatccttacggaaaaggaacagattgttcctaaaccagaagaggaggttgcccagaagaaaaagatatcccagaagaaactggagaaacacatcacttatccatgataatctgtctaccctgttggccgccttgccccaac

SEQ ID NO: 38879 - DNA, 469 bp, Homo sapiens
ccgctccaacatcagaatggtaacgaaacagtgtgtaccattccgacgttacaatggtggagttggcaggtgtgcgcaggccaagcaatggggctggacacaaggtcggtggcccaaaaagagtgctgaatttttgctgcacatgcttaaaaacgcagagagtaatgctgaacttaagggtttagatgtagattctctggtcattgagcatatccaagtgaacaaagcacctaagatgcgccgccggacctacagagctcatggtcggattaacccatacatgagctctccctgccacattgagatgatccttacggaaaaggaacagattgttcctaaaccagaagaggaggttgcccagaagaaaaagatatcccagaagaaactgaagaaacaaaaacttatggcacgggagtaaattcagcattaaaataaatgtaattaaataaaaggaaaaaaaaaatggatg

SEQ ID NO: 38880 - DNA, 932 bp, Homo sapiens
gtggctgatctagaggatcccagaggctgaagcggctctttccctaagcagcctgagggttgactggattggtgaggcccgtgtggctacttctgtggaagcagtgctgtagttactggaagataaaagggaaagcaagcccttggtgggggaaagtatggctgcgatgatggcatttcttaggacacctttggattaataatgaaaacaactactctctgagcagctgttcgaatcatctgatatttatactgaatgagttactgtaagtacgtattgacagaattacactgtactttcctctagggtgatctgtgaaaatggttcgctattcacttgacccggagaaccccacgaaatcatgcaaatcaagaggttccaatcttcgtgttcactttaagaacactcgtgaaactgctcaggccatcaagggtatgcatatacgaaaagccacgaagtatctgaaagatgtcactttacagaaacagtgtgtaccattccgacgttacaatggtggagttggcaggtgtgcgcaggccaagcaatggggctggacacaaggtcggtggcccaaaaagagtgctgaatttttgctgcacatgcttaaaaacgcagagagtaatgctgaacttaagggtttagatgtagattctctggtcattgagcatatccaagtgaacaaagcacctaagatgcgccgccggacctacagagctcatggtcggattaacccatacatgagctctccctgccacattgagatgatccttacggaaaaggaacagattgttcctaaaccagaagaggaggttgcccagaagaaaaagatatcccagaagaaactgaagaaacaaaaacttatggcacgggagtaaattcagcattaaaataaatgtaattaaacaaaaaaaagtctccccaggctggatccg

SEQ ID NO: 38881 - DNA, 912 bp, Homo sapiens
taaaggctaggtacgaggctgtgtttctcctgcgttgctccgagggcccaatcctcctgccatcgccgccatcctggcttcgggggcgccggcctccaggcccccgggaggagaactcctagggctactaaatcctcgctggaggcggtggcttcttatgcgggaggacgtggcggagggcctgactttgggagccggggtgatctgtgaaaatggttcgctattcacttgacccggagaaccccacgaaatcatgcaaatcaagaggttccaatcttcgtgttcactttaagaacactcgtgaaactgctcaggccatcaagggtatgcatatacgaaaagccacgaagtatctgaaagatgtcactttacagaaacagtgtgtaccattccgacgttacaatggtggagttggcaggtgtgcgcaggccaagcaatggggctggacacaaggtcggtggcccaaaaagagtgctgaatttttgctgcacatgcttaaaaacgcagagagtaatgctgaacttaagggtttagatgtagattctctggtcattgagcatatccaagtgaacaaagcacctaagatgcgccgccggacctacagagctcatggtcggattaacccatacatgagctctccctgccacattgagatgatccttacggaaaaggaacagattgttcctaaaccagaagaggaggttgcccagaagaaaaagatatcccagaagaaactgaagaaacaaaaacttatggcacgggagtaaattcagcattaaaataaatgtaattaaaccccgacccaccacacacaaaaaaaagccgcggccttttgtgggggggcaaaagggttggggggccggataggggttgcccccttcgccagggaaggggcgcccagggggaaagaac

SEQ ID NO: 38882 - DNA, 824 bp, Homo sapiens
taggctagtacgaggcggggtgtgaatcggccgaggctaagcagcctgaggtgatctgtgaaaatggttcgctattcacttgacccggagaaccccacgaaatcatgcaaatcaagaggttccaatcttcgtgttcactttaagaacactcgtgaaactgctcaggccatcaagggtatgcatatacgaaaagccacgaagtatctgaaagatgtcactttacagaaacagtgtgtaccattccgacgttacaatggtggagttggcaggtgtgcgcaggccaagcaatggggctggacacaaggtcggtggcccaaaaagagtgctgaatttttgctgcacatgcttaaaaacgcagagagtaatgctgaacttaagggtttagatgtagattctctggtcattgagcatatccaagtgaacaaagcacctaagatgcgccgccggacctacagagctcatggtcggattaacccatacatgagctctccctgccacattgagatgatccttacggaaaaggaacagattgttcctaaaccagaagaggaggttgcccagaagaaaaagatatcccagaagaaactgaagaaacaaaaacttatggcacgggagtaaattcagcattaaaataaatgtaattaaaaaaccaaacaaaacaaaacaaaaaaaaccccggagggcctctaattgcgggggcgcgggaaaacgggtttttgaatggccccctgggctcaaaacgtggttcccggacccagttttcttgcccagggggaaattggcgggcccctaatagggggccgataattccagaacccggtacg

SEQ ID NO: 38883 - DNA, 925 bp, Homo sapiens
  misc_feature (657)..(657): n is a, c, g, or t
gtggctgatctagaggatcccagaggctgaagcggctctttccctaagcagcctgaggtgatctgtgaaaatggttcgctattcacttgacccggagaaccccacgaaatcatgcaaatcaagaggttccaatcttcgtgttcactttaagaacactcgtgaaactgctcaggccatcaagggtatgcatatacgaaaagccacgaagtatctgaaagatgtcactttacagaaacagtgtgtaccattccgacgttacaatggtggagttggcaggtgtgcgcaggccaagcaatggggctggacacaaggtcggtggcccaaaaagagtgctgaatttttgctgcacatgcttaaaaacgcagagagtaatgctgaacttaagggtttagatgtagattctctggtcattgagcatatccaagtgaacaaagcacctaagatgcgccgccggacctacagagctcatggtcggattaacccatacatgagctctccctgccacattgagatgatccttacggaaaaggaacagattgttcctaaaccagaagaggaggttgcccagaagaaaaagatatcccagaagaaactgaagaaacaaaaacttatggcacgggagtaaattcagcattaaaataaatgtaattaaaaaanaaaagaaaaaaaaaaaaaaaaaaaaaaaaagaagcaccaggaaaacaacagaagcgcaaaaaacaaaccataaagcaaaaagcaaaaagacaaaaaaaaacaacagaacacaacacaacaaaaacgaacaaaccaaacaacagagagcacacacaacacggggaagacaaccgcacaaacaagacaacaccaaaaggggaaacacacagcgccgccccgcgcgaataacaaccaagcaaaaaaccgacgaaagaacgcagaaacatac

SEQ ID NO: 38884 - DNA, 1838 bp, Homo sapiens
  misc_feature (2)..(3): n is a, c, g, or t
tnngctagtagagccggtggttgaatcggccgagggcagcctgagggttgactggattggtgaggcccgtgtggctacttctgtggaagcagtgctgtagttactggaagataaaagggaaagcaagcccttggtgggggaaagtatggctgcgatgatggcatttcttaggacacctttggattaataatgaaaacaactactctctgagcagctgttcgaatcatctgatatttatactgaatgagttactgtaagtacgtattgacagaattacactgtactttcctctagggtgatctgtgaaaatggttcgctattcacttgacccggagaaccccacgaaatcatgcaaatcaagaggttccaatcttcgtgttcactttaagaacactcgtgaaactgctcaggccatcaagggtatgcatatacgaaaagccacgaagtatctgaaagatgtcactttacagaaacagtgtgtaccattccgacgttacaatggtggagttggcaggtgtgcgcaggccaagcaatggggctggacacaaggtcggtggcccaaaaagagtgctgaatttttgctgcacatgcttaaaaacgcagagagtaatgctgaacttaagggtttagatgtagattctctggtcattgagcatatccaagtgaacaaagcacctaagatgcgccgccggacctacagagctcatggtcggattaacccatacatgagctctccctgccacattgagatgatccttacggaaaaggaacagattgttcctaaaccagaagaggaggttgcccagaagaaaaagttgaggagctcaagcttgggaaaatggtgtgcattccttgtatcgtcattccagttctgctctggatctacaaaaaattcctggagccatatatataccctctggtttcccccttcgttagtcgtatatggcctaagaaagcaatacaagaatccaatgatacaaacaaaggcaaagtaaactttaagggtgcagacatgaatggattaccaacaaaaggaccaacagaaatctgtgataaaaagaaagactaaagaaattttcctaaaggaccccatcatttaaaaaatggacctgataatatgaagcatcttccttgtaattgtctctgacctttttatctgagaccggaattcaggataggagtctagatatttacctgatactaatcaggaaatatatgatatccgtatttaaaatgtagttagttatatttaatgacctcattcctaagttcctttttcgttaatgtagctttcatttctgttattgctgtttgaataatatgattaaatagaaggtttgtgccagtagacattatgttactaaatcagcactttaaaatctttggttctctaattcatatgaatttgctgtttgctctaatttctttgggctcttctaatttgagtggagtacaattttgttgtgaaacagtccagtgaaactgtgcagggaaatgaaggtagaattttgggaggtaataatgatgtgaaacataaagatttaataattactgtccaacacagtggagcagcttgtccacaaatatagtaattactatttattgctctaaggaagattaaaaaaagatagggaaaagggggaaacttctttgaaaaatgaaacatctgttacattaatgtctaattataaaattttaatccttactgcatttcttctgttcctacaaatgtattaaacattcagtttaaaaaaaaataaaaacctgaggggggcccgtacccaattgcctaatggagccgtatacaattactggccgcggttacaacttgtgactgg

SEQ ID NO: 38885 - DNA, 1825 bp, Homo sapiens
  misc_feature (2)..(3): n is a, c, g, or t
  misc_feature (1761)..(1761): n is a, c, g, or t
  misc_feature (1791)..(1791): n is a, c, g, or t
tnngctagtagagccggtggttgaatcggccgagggcagcctgagggttgactggattggtgaggcccgtgtggctacttctgtggaagcagtgctgtagttactggaagataaaagggaaagcaagcccttggtgggggaaagtatggctgcgatgatggcatttcttaggacacctttggattaataatgaaaacaactactctctgagcagctgttcgaatcatctgatatttatactgaatgagttactgtaagtacgtattgacagaattacactgtactttcctctagggtgatctgtgaaaatggttcgctattcacttgacccggagaaccccacgaaatcatgcaaatcaagaggttccaatcttcgtgttcactttaagaacactcgtgaaactgctcaggccatcaagggtatgcatatacgaaaagccacgaagtatctgaaagatgtcactttacagaaacagtgtgtaccattccgacgttacaatggtggagttggcaggtgtgcgcaggccaagcaatggggctggacacaaggtcggtggcccaaaaagagtgctgaatttttgctgcacatgcttaaaaacgcagagagtaatgctgaacttaagggtttagatgtagattctctggtcattgagcatatccaagtgaacaaagcacctaagatgcgccgccggacctacagagctcatggtcggattaacccatacatgagctctccctgccacattgagatgatccttacggaaaaggaacagattgttcctaaaccagaagaggaggttgcccagaagaaaaagttgaggagctcaagcttgggaaaatggtgtgcattccttgtatcgtcattccagttctgctctggatctacaaaaaattcctggagccatatatataccctctggtttcccccttcgttagtcgtatatggcctaagaaagcaatacaagaatccaatgatacaaacaaaggcaaagtaaactttaagggtgcagacatgaatggattaccaacaaaaggaccaacagaaatctgtgataaaaagaaagactaaagaaattttcctaaaggaccccatcatttaaaaaatggacctgataatatgaagcatcttccttgtaattgtctctgacctttttatctgagaccggaattcaggataggagtctagatatttacctgatactaatcaggaaatatatgatatccgtatttaaaatgtagttagttatatttaatgacctcattcctaagttcctttttcgttaatgtagctttcatttctgttattgctgtttgaataatatgattaaatagaaggtttgtgccagtagacattatgttactaaatcagcactttaaaatctttggttctctaattcatatgaatttgctgtttgctctaatttctttgggctcttctaatttgagtggagtacaattttgttgtgaaacagtccagtgaaactgtgcagggaaatgaaggtagaattttgggaggtaataatgatgtgaaacataaagatttaataattactgtccaacacagtggagcagcttgtccacaaatatagtaattactatttattgctctaaggaagattaaaaaaagatagggaaaagggggaaacttctttgaaaaatgaaacatctgttacattaatgtctaattataaaattttaatccttactgcatttcttctgttcctacaaatgtattaaacattcagtttaaaaaaaaaatanaaatagacacacagccatctgtcacttcgngcttatcgatgacgcacatataaaaaaacaaaaa

SEQ ID NO: 38886 - DNA, 940 bp, Homo sapiens
  misc_feature (2)..(3): n is a, c, g, or t
  misc_feature (906)..(906): n is a, c, g, or t
  misc_feature (917)..(917): n is a, c, g, or t
  misc_feature (922)..(922): n is a, c, g, or t
  misc_feature (926)..(926): n is a, c, g, or t
  misc_feature (928)..(928): n is a, c, g, or t
tnngctagtagagccggtggttgaatcggccgagggcagcctgagggttgactggattggtgaggcccgtgtggctacttctgtggaagcagtgctgtagttactggaagataaaagggaaagcaagcccttggtgggggaaagtatggctgcgatgatggcatttcttaggacacctttggattaataatgaaaacaactactctctgagcagctgttcgaatcatctgatatttatactgaatgagttactgtaagtacgtattgacagaattacactgtactttcctctagggtgatctgtgaaaatggttcgctattcacttgacccggagaaccccacgaaatcatgcaaatcaagaggttccaatcttcgtgttcactttaagaacactcgtgaaactgctcaggccatcaagggtatgcatatacgaaaagccacgaagtatctgaaagatgtcactttacagaaacagtgtgtaccattccgacgttacaatggtggagttggcaggtgtgcgcaggccaagcaatggggctggacacaaggtcggtggcccaaaaagagtgctgaatttttgctgcacatgcttaaaaacgcagagagtaatgctgaacttaagggtttagatgtagattctctggtcattgagcatatccaagtgaacaaagcacctaagatgcgccgccggacctacagagctcatggtcggattaacccatacatgagctctccctgccacattgagatgatccttacggaaaaggaacagattgttcctaaaccagaagaggaggttgcccagaagaaaaagatatcccagaagaaactgaagaaacaaaaacttatggcacgggagtaaattcagcattaaaataaatgtaattaaacaacacaacaaacancaaaacaaganacaanaaananaacaagaggggg

SEQ ID NO: 38887 - DNA, 920 bp, Homo sapiens
  misc_feature (2)..(3): n is a, c, g, or t
tnngctagtagagccggtggttgaatcggccgagggcagcctgagggttgactggattggtgaggcccgtgtggctacttctgtggaagcagtgctgtagttactggaagataaaagggaaagcaagcccttggtgggggaaagtatggctgcgatgatggcatttcttaggacacctttggattaataatgaaaacaactactctctgagcagctgttcgaatcatctgatatttatactgaatgagttactgtaagtacgtattgacagaattacactgtactttcctctagggtgatctgtgaaaatggttcgctattcacttgacccggagaaccccacgaaatcatgcaaatcaagaggttccaatcttcgtgttcactttaagaacactcgtgaaactgctcaggccatcaagggtatgcatatacgaaaagccacgaagtatctgaaagatgtcactttacagaaacagtgtgtaccattccgacgttacaatggtggagttggcaggtgtgcgcaggccaagcaatggggctggacacaaggtcggtggcccaaaaagagtgctgaatttttgctgcacatgcttaaaaacgcagagagtaatgctgaacttaagggtttagatgtagattctctggtcattgagcatatccaagtgaacaaagcacctaagatgcgccgccggacctacagagctcatggtcggattaacccatacatgagctctccctgccacattgagatgatccttacggaaaaggaacagattgttcctaaaccagaagaggaggttgcccagaagaaaaagatatcccagaagaaactgaagaaacaaaaacttatggcacgggagtaaattcagcattaaaataaatgtaattaaacaaaaaaaagtctccccaggctggatccg

SEQ ID NO: 38888 - DNA, 1697 bp, Homo sapiens
  misc_feature (2)..(3): n is a, c, g, or t
tnngctagtagagccggtggttgaatcggccgagggcagcctgagggttgactggattggtgaggcccgtgtggctacttctgtggaagcagtgctgtagttactggaagataaaagggaaagcaagcccttggtgggggaaagtatggctgcgatgatggcatttcttaggacacctttggattaataatgaaaacaactactctctgagcagctgttcgaatcatctgatatttatactgaatgagttactgtaagtacgtattgacagaattacactgtactttcctctagggtgatctgtgaaaatggttcgctattcacttgacccggagaaccccacgaaatcatgcaaatcaagaggttccaatcttcgtgttcactttaagaacactcgtgaaactgctcaggccatcaagggtatgcatatacgaaaagccacgaagtatctgaaagatgtcactttacagaaacagtgtgtaccattccgacgttacaatggtggagttggcaggtgtgcgcaggccaagcaatggggctggacacaaggtcggtggcccaaaaagagtgctgaatttttgctgcacatgcttaaaaacgcagagagtaatgctgaacttaagggtttagatgtagattctctggtcattgagcatatccaagtgaacaaagcacctaagatgcgccgccggacctacagagctcatggtcggattaacccatacatgagctctccctgccacattgagatgatccttacggaaaaggaacagattgttcctaaaccagaagaggaggttgcccagaagaaaaagttgaggagctcaagcttgggaaaatggtgtgcattccttgtatcgtcattccagttctgctctggatctacaaaaaattcctggagccatatatataccctctggtttcccccttcgttagtcgtatatggcctaagaaagcaatacaagaatccaatgatacaaacaaaggcaaagtaaactttaagggtgcagacatgaatggattaccaacaaaaggaccaacagaaatctgtgataaaaagaaagactaaagaaattttcctaaaggaccccatcatttaaaaaatggacctgataatatgaagcatcttccttgtaattgtctctgacctttttatctgagaccggaattcaggataggagtctagatatttacctgatactaatcaggaaatatatgatatccgtatttaaaatgtagttagttatatttaatgacctcattcctaagttcctttttcgttaatgtagctttcatttctgttattgctgtttgaataatatgattaaatagaaggtttgtgccagtagacattatgttactaaatcagcactttgggctcttctaatttgagtggagtacaattttgttgtgaaacagtccagtgaaactgtgcagggaaatgaaggtagaattttgggaggtaataatgatgtgaaacataaagatttaataattactgtccaacacagtggagcagcttgtccacaaatatagtaattactatttattgctctaaggaagattaaaaaaagatagggaaaagggggaaacttctttgaaaaatgaaacatctgttacattaatgtctaattataaaattttaatccttactgcatttcttctgttcctacaaatgtattaaacattcagtttaa

SEQ ID NO: 38889 - DNA, 972 bp, Homo sapiens
  misc_feature (2)..(3): n is a, c, g, or t
tnngctagtagagccggtggttgaatcggccgagggcagcctgagggttgactggattggtgaggcccgtgtggctacttctgtggaagcagtgctgtagttactggaagataaaagggaaagcaagcccttggtgggggaaagtatggctgcgatgatggcatttcttaggacacctttggattaataatgaaaacaactactctctgagcagctgttcgaatcatctgatatttatactgaatgagttactgtaagtacgtattgacagaattacactgtactttcctctagggtgatctgtgaaaatggttcgctattcacttgacccggagaaccccacgaaatcatgcaaatcaagaggttccaatcttcgtgttcactttaagaacactcgtgaaactgctcaggccatcaagggtatgcatatacgaaaagccacgaagtatctgaaagatgtcactttacagaaacagtgtgtaccattccgacgttacaatggtggagttggcaggtgtgcgcaggccaagcaatggggctggacacaaggtcggtggcccaaaaagagtgctgaatttttgctgcacatgcttaaaaacgcagagagtaatgctgaacttaagggtttagatgtagattctctggtcattgagcatatccaagtgaacaaagcacctaagatgcgccgccggacctacagagctcatggtcggattaacccatacatgagctctccctgccacattgagatgatccttacggaaaaggaacagattgttcctaaaccagaagaggaggttgcccagaagaaaaagatatccagaagaaatgagaacaaaacttatggccgggagtaaatcagcttaataatgtttagggaaaaaaaaatccgggttctttcgggggaaaggttaagggcggttgttccgccccttgtaagggaatgcggccaaggggtatgaagtcggaaga

SEQ ID NO: 38890 - DNA, 1632 bp, Homo sapiens
  misc_feature (2)..(3): n is a, c, g, or t
tnngctagtagagccggtggttgaatcggccgagggcagcctgagggttgactggattggtgaggcccgtgtggctacttctgtggaagcagtgctgtagttactggaagataaaagggaaagcaagcccttggtgggggaaagtatggctgcgatgatggcatttcttaggacacctttggattaataatgaaaacaactactctctgagcagctgttcgaatcatctgatatttatactgaatgagttactgtaagtacgtattgacagaattacactgtactttcctctagggtgatctgtgaaaatggttcgctattcacttgacccggagaaccccacgaaatcatgcaaatcaagaggttccaatcttcgtgttcactttaagaacactcgtgaaactgctcaggccatcaagggtatgcatatacgaaaagccacgaagtatctgaaagatgtcactttacagaaacagtgtgtaccattccgacgttacaatggtggagttggcaggtgtgcgcaggccaagcaatggggctggacacaaggtcggtggcccaaaaagagtgctgaatttttgctgcacatgcttaaaaacgcagagagtaatgctgaacttaagggtttagatgtagattctctggtcattgagcatatccaagtgaacaaagcacctaagatgcgccgccggacctacagagctcatggtcggattaacccatacatgagctctccctgccacattgagatgatccttacggaaaaggaacagattgttcctaaaccagaagaggaggttgcccagaagaaaaagggtaaataagtagttgctcggttttgtttgtgatagtagaaagatttgtggttgctgtgatgactatcttaggacacctttggaataactatgaaagaaaactattctgagcaacccttttcacctgtcttattttggcttttgtaagtttgtttcttgactaataataaatggtaagttttctgtaatcccagcactttgggaggctgaggtgggtggatcacaaggtcaggagatcgagaccatcctggctaacacagtgaaaccccgtctctactaaaaatgcaaaaaaaaattagctgggcgtggtggcgggtatctgtagtcccagctactcaggaggctgaggcaggagaatggcatgaacccgggaggaggaactaggagtgagccgagatcgcgccactgcactccagcctgggtgacagagcgagacgctgtctcaaaaaaaaaaaaaactggtagttttatattcagtacctcaggcccgtatgattatctgctgatggccccacttagatgtacatagccacttcttagttcttttaagtcaagaacctgagtgattctgtacacttctttttacatctaatgaacttaagttctgttgatttctaccatttaagtatttttcccccttagtccttaacgactaggtttcctgcctccagaataagctgaagtcctccaagatgtactgtggttttctctaagaaacttaacacatttttctttccccagatatcccagaagaaactgaagaaacaaaaacttatggcacgggagtaaattcagcattaaaataaatgtaattaaa

SEQ ID NO: 38891 - DNA, 971 bp, Homo sapiens
  misc_feature (2)..(3): n is a, c, g, or t
  misc_feature (827)..(827): n is a, c, g, or t
  misc_feature (840)..(840): n is a, c, g, or t
  misc_feature (842)..(842): n is a, c, g, or t
  misc_feature (851)..(851): n is a, c, g, or t
  misc_feature (859)..(859): n is a, c, g, or t
  misc_feature (861)..(861): n is a, c, g, or t
  misc_feature (865)..(865): n is a, c, g, or t
  misc_feature (870)..(870): n is a, c, g, or t
  misc_feature (877)..(877): n is a, c, g, or t
  misc_feature (889)..(890): n is a, c, g, or t
  misc_feature (893)..(893): n is a, c, g, or t
  misc_feature (903)..(903): n is a, c, g, or t
tnngctagtagagccggtggttgaatcggccgagggcagcctgagggttgactggattggtgaggcccgtgtggctacttctgtggaagcagtgctgtagttactggaagataaaagggaaagcaagcccttggtgggggaaagtatggctgcgatgatggcatttcttaggacacctttggattaataatgaaaacaactactctctgagcagctgttcgaatcatctgatatttatactgaatgagttactgtaagtacgtattgacagaattacactgtactttcctctagggtgatctgtgaaaatggttcgctattcacttgacccggagaaccccacgaaatcatgcaaatcaagaggttccaatcttcgtgttcactttaagaacactcgtgaaactgctcaggccatcaagggtatgcatatacgaaaagccacgaagtatctgaaagatgtcactttacagaaacagtgtgtaccattccgacgttacaatggtggagttggcaggtgtgcgcaggccaagcaatggggctggacacaaggtcggtggcccaaaaagagtgctgaatttttgctgcacatgcttaaaaacgcagagagtaatgctgaacttaagggtttagatgtagattctctggtcattgagcatatccaagtgaacaaagcacctaagatgcgccgccggacctacagagctcatggtcggattaacccatacatgagctctccctgccacattgagatgatccttacggaaaaggaacagattgttcctaaaccagaagaggaggttgcccagaagaaaaagattccagagaantgaagaacaaaantntggccggantaatcgcntnaatnatgtnttacaanaaaaaaaccggnnctntcgggggggnaaaggttctaagggctgccacgttcgacctttgtaaaggggaatggcggccaagaggaaatgaacgcg

SEQ ID NO: 38892 - DNA, 1601 bp, Homo sapiens
  misc_feature (2)..(3): n is a, c, g, or t
tnngctagtagagccggtggttgaatcggccgagggcagcctgagggttgactggattggtgaggcccgtgtggctacttctgtggaagcagtgctgtagttactggaagataaaagggaaagcaagcccttggtgggggaaagtagtgatctgtgaaaatggttcgctattcacttgacccggagaaccccacgaaatcatgcaaatcaagaggttccaatcttcgtgttcactttaagaacactcgtgaaactgctcaggccatcaagggtatgcatatacgaaaagccacgaagtatctgaaagatgtcactttacagaaacagtgtgtaccattccgacgttacaatggtggagttggcaggtgtgcgcaggccaagcaatggggctggacacaaggtcggtggcccaaaaagagtgctgaatttttgctgcacatgcttaaaaacgcagagagtaatgctgaacttaagggtttagatgtagattctctggtcattgagcatatccaagtgaacaaagcacctaagatgcgccgccggacctacagagctcatggtcggattaacccatacatgagctctccctgccacattgagatgatccttacggaaaaggaacagattgttcctaaaccagaagaggaggttgcccagaagaaaaagttgaggagctcaagcttgggaaaatggtgtgcattccttgtatcgtcattccagttctgctctggatctacaaaaaattcctggagccatatatataccctctggtttcccccttcgttagtcgtatatggcctaagaaagcaatacaagaatccaatgatacaaacaaaggcaaagtaaactttaagggtgcagacatgaatggattaccaacaaaaggaccaacagaaatctgtgataaaaagaaagactaaagaaattttcctaaaggaccccatcatttaaaaaatggacctgataatatgaagcatcttccttgtaattgtctctgacctttttatctgagaccggaattcaggataggagtctagatatttacctgatactaatcaggaaatatatgatatccgtatttaaaatgtagttagttatatttaatgacctcattcctaagttcctttttcgttaatgtagctttcatttctgttattgctgtttgaataatatgattaaatagaaggtttgtgccagtagacattatgttactaaatcagcactttaaaatctttggttctctaattcatatgaatttgctgtttgctctaatttctttgggctcttctaatttgagtggagtacaattttgttgtgaaacagtccagtgaaactgtgcagggaaatgaaggtagaattttgggaggtaataatgatgtgaaacataaagatttaataattactgtccaacacagtggagcagcttgtccacaaatatagtaattactatttattgctctaaggaagattaaaaaaagatagggaaaagggggaaacttctttgaaaaatgaaacatctgttacattaatgtctaattataaaattttaatccttactgcatttcttctgttcctacaaatgtattaaacattcagtttaa

SEQ ID NO: 38893 - DNA, 1655 bp, Homo sapiens
  misc_feature (2)..(3): n is a, c, g, or t
tnngctagtagagccggtggttgaatcggccgagggcagcctgagggttgactggattggtgaggcccgtgtggctacttctgtggaagcagtgctgtagttactggaagataaaagggaaagcaagcccttggtgggggaaagtatggctgcgatgatggcatttcttaggacacctttggattaataatgaaaacaactactctctgagcagctgttcgaatcatctgatatttatactgaatgagttactcatgcaaatcaagaggttccaatcttcgtgttcactttaagaacactcgtgaaactgctcaggccatcaagggtatgcatatacgaaaagccacgaagtatctgaaagatgtcactttacagaaacagtgtgtaccattccgacgttacaatggtggagttggcaggtgtgcgcaggccaagcaatggggctggacacaaggtcggtggcccaaaaagagtgctgaatttttgctgcacatgcttaaaaacgcagagagtaatgctgaacttaagggtttagatgtagattctctggtcattgagcatatccaagtgaacaaagcacctaagatgcgccgccggacctacagagctcatggtcggattaacccatacatgagctctccctgccacattgagatgatccttacggaaaaggaacagattgttcctaaaccagaagaggaggttgcccagaagaaaaagttgaggagctcaagcttgggaaaatggtgtgcattccttgtatcgtcattccagttctgctctggatctacaaaaaattcctggagccatatatataccctctggtttcccccttcgttagtcgtatatggcctaagaaagcaatacaagaatccaatgatacaaacaaaggcaaagtaaactttaagggtgcagacatgaatggattaccaacaaaaggaccaacagaaatctgtgataaaaagaaagactaaagaaattttcctaaaggaccccatcatttaaaaaatggacctgataatatgaagcatcttccttgtaattgtctctgacctttttatctgagaccggaattcaggataggagtctagatatttacctgatactaatcaggaaatatatgatatccgtatttaaaatgtagttagttatatttaatgacctcattcctaagttcctttttcgttaatgtagctttcatttctgttattgctgtttgaataatatgattaaatagaaggtttgtgccagtagacattatgttactaaatcagcactttaaaatctttggttctctaattcatatgaatttgctgtttgctctaatttctttgggctcttctaatttgagtggagtacaattttgttgtgaaacagtccagtgaaactgtgcagggaaatgaaggtagaattttgggaggtaataatgatgtgaaacataaagatttaataattactgtccaacacagtggagcagcttgtccacaaatatagtaattactatttattgctctaaggaagattaaaaaaagatagggaaaagggggaaacttctttgaaaaatgaaacatctgttacattaatgtctaattataaaattttaatccttactgcatttcttctgttcctacaaatgtattaaacattcagtttaa

SEQ ID NO: 38894 - DNA, 1697 bp, Homo sapiens
  misc_feature (2)..(3): n is a, c, g, or t
tnngctagtagagccggtggttgaatcggccgagggcagcctgagggttgactggattggtgaggcccgtgtggctacttctgtggaagcagtgctgtagttactggaagataaaagggaaagcaagcccttggtgggggaaagtatggctgcgatgatggcatttcttaggacacctttggattaataatgaaaacaactactctctgagcagctgttcgaatcatctgatatttatactgaatgagttactgtaagtacgtattgacagaattacactgtactttcctctaggcatgcaaatcaagaggttccaatcttcgtgttcactttaagaacactcgtgaaactgctcaggccatcaagggtatgcatatacgaaaagccacgaagtatctgaaagatgtcactttacagaaacagtgtgtaccattccgacgttacaatggtggagttggcaggtgtgcgcaggccaagcaatggggctggacacaaggtcggtggcccaaaaagagtgctgaatttttgctgcacatgcttaaaaacgcagagagtaatgctgaacttaagggtttagatgtagattctctggtcattgagcatatccaagtgaacaaagcacctaagatgcgccgccggacctacagagctcatggtcggattaacccatacatgagctctccctgccacattgagatgatccttacggaaaaggaacagattgttcctaaaccagaagaggaggttgcccagaagaaaaagttgaggagctcaagcttgggaaaatggtgtgcattccttgtatcgtcattccagttctgctctggatctacaaaaaattcctggagccatatatataccctctggtttcccccttcgttagtcgtatatggcctaagaaagcaatacaagaatccaatgatacaaacaaaggcaaagtaaactttaagggtgcagacatgaatggattaccaacaaaaggaccaacagaaatctgtgataaaaagaaagactaaagaaattttcctaaaggaccccatcatttaaaaaatggacctgataatatgaagcatcttccttgtaattgtctctgacctttttatctgagaccggaattcaggataggagtctagatatttacctgatactaatcaggaaatatatgatatccgtatttaaaatgtagttagttatatttaatgacctcattcctaagttcctttttcgttaatgtagctttcatttctgttattgctgtttgaataatatgattaaatagaaggtttgtgccagtagacattatgttactaaatcagcactttaaaatctttggttctctaattcatatgaatttgctgtttgctctaatttctttgggctcttctaatttgagtggagtacaattttgttgtgaaacagtccagtgaaactgtgcagggaaatgaaggtagaattttgggaggtaataatgatgtgaaacataaagatttaataattactgtccaacacagtggagcagcttgtccacaaatatagtaattactatttattgctctaaggaagattaaaaaaagatagggaaaagggggaaacttctttgaaaaatgaaacatctgttacattaatgtctaattataaaattttaatccttactgcatttcttctgttcctacaaatgtattaaacattcagtttaa

SEQ ID NO: 38895 - DNA, 857 bp, Homo sapiens
  misc_feature (2)..(3): n is a, c, g, or t
tnngctagtagagccggtggttgaatcggccgagggcagcctgagggttgactggattggtgaggcccgtgtggctacttctgtggaagcagtgctgtagttactggaagataaaagggaaagcaagcccttggtgggggaaagtatggctgcgatgatggcatttcttaggacacctttggattaataatgaaaacaactactctctgagcagctgttcgaatcatctgatatttatactgaatgagttactgtaagtacgtattgacagaattacactgtactttcctctagggtgatctgtgaaaatggttcgctattcacttgacccggagaaccccacgaaatcatgcaaatcaagaggttccaatcttcgtgttcactttaagaacactcgtgaaactgctcaggccatcaagggtatgcatatacgaaaagccacgaagtatctgaaagatgtcactttacagaaacagtgtgtaccattccgacgttacaatggtggagttggcaggtgtgcgcaggccaagcaatggggctggacacaaggtcggtggcccaaaaagagtgctgaatttttgctgcacatgcttaaaaacgcagagagtaatgctgaacttaaggttacccaaaccactaacatcctgtgcaacttgggtggttgtttaattaatgttggctgttcagatttatgtccttgattttcttgttttcagtaattaactcatttaggattttttaaatttctacctgcagtttccacagaatgaaactatttccttttattttttttgagtccctttatggcaaaattctgtgaagatccagaagcgtgctctgtggtctctttaagccta

SEQ ID NO: 38896 - DNA, 829 bp, Homo sapiens
  misc_feature (2)..(3): n is a, c, g, or t
tnngctagtagagccggtggttgaatcggccgagggcagcctgagggttgactggattggtgaggcccgtgtggctacttctgtggaagcagtgctgtagttactggaagataaaagggaaagcaagcccttggtgggggaaagtatggctgcgatgatggcatttcttaggacacctttggattaataatgaaaacaactactctctgagcagctgttcgaatcatctgatatttatactgaatgagttactcatgcaaatcaagaggttccaatcttcgtgttcactttaagaacactcgtgaaactgctcaggccatcaagggtatgcatatacgaaaagccacgaagtatctgaaagatgtcactttacagaaacagtgtgtaccattccgacgttacaatggtggagttggcaggtgtgcgcaggccaagcaatggggctggacacaaggtcggtggcccaaaaagagtgctgaatttttgctgcacatgcttaaaaacgcagagagtaatgctgaacttaagggtttagatgtagattctctggtcattgagcatatccaagtgaacaaagcacctaagatgcgccgccggacctacagagctcatggtcggattaacccatacatgagctctccctgccacattgagatgatccttacggaaaaggaacagattgttcctaaaccagaagaggaggttgcccagaagaaaaagatatcccagaagaaactgaagaaacaaaaacttatggcacgggagtaaattcagcattaaaataaatgtaattaaatgtcttaccagggaacaccatccacaacaaact

SEQ ID NO: 38897 - DNA, 395 bp, Homo sapiens
cacattgtgcacatgtaccctaaaacttaaagtgtaaaaaaaaaaaaaagaatggtctgtgcttatagcagggtggaaaacttacctttttcctccttatcagtcagtttaaggaaccaaccgtaaggggcatttctgaagggctgcatttgcactgagtctgcccacatatgtgtcccagtggcaccaccttctcaccgtgtctacttgctttttcttctgttccagattgtacaaaaatatgatatcccacaacctgttgtatcctcatggtaattttcccttctgtaaccacttctcctttggagccctcctattaccagctcagtgtagctctgcccaagcctaatcttcccagatgataggttggtctccagtccaaccccctaaataaa

SEQ ID NO: 38898 - DNA, 373 bp, Homo sapiens
atgcaaaaaccatgaatcacaatcatgatatagacataaacagttcattccttttatatgtattttccaaatatatattacatatatttacatataatatagaaatgcatatataaattatatatgaataaaattatatgtatttatataaatatgtatttatatatcaatacatatatatgtatataaaaacatgaatcaatctcaaaaccattatgttacggtaaagaaaccagacacagaagtctacatactatatggttccatttatacaaaatgttttatttttatttatttatttattttttgagatggagcttcgttcggtcacccaggctggagtacaatggtgcaatctcaactcactgcaacc

SEQ ID NO: 38899 - DNA, 461 bp, Homo sapiens
aaggccaattacatttgttgttttcaatagaatgattatttgaacatttccttgatgatttattatttcatatctatgttaggtttttatagtccccctcccaccctcacccccagaattctgaagagttagttggaagaaggaagaaggcaccattttaggaatattttattccagtttattgaatacagcctcctaaattgaggattagcgacagtaataaagaaaaaaaaagacctttagaaaattagaacattaagggtgaaatcagtttcatccagtcctggggaaaaattcctgttcctctgatcctgggttagttagcctgctttcaaagttatctacttctggagcaaggactcttggagcctaccttggcctctggcagtgtctggtcaagaagaggatgtcaacgtggcagcctgtatgcatttgtcttttctagctcaaagcagaggcct

SEQ ID NO: 38900 - DNA, 832 bp, Homo sapiens
agagaaagacaaaaagggcacagagaagcagagagaactgtatatatacacatacattctggacttcaggaggaagagatgtactgcctaactgttctctccctgacacattctctaaggcatccaggtatacacacagctgcatcgtgtcactgcaagcggctcccagagttgttcctgttcatccaggaagaaagaaaatcccgccaaagattgagagagatcaataaatgtatttccaaagaacctgaaagaagatgtttccatttggctgtcttaccctctatccaagctcagagggaaatgcattcaagaacgttaacggccagcacaaattccattccaagccatggagcgggaagggcacatgataccaagtgtcccaccagacggccatcttgctaactaatacacctcgggattacatttgcatttacacaaaatgtgagctttgggagccagacgtattattttggttaatagtttggcacgttctcagcttggaagcctgagcatatgtgatgggtcagtaacacaataaaagtaacggggaagcatttctttccccagtggtgaatttctaccctattcaggaaacagacttcccaactcagccattacagctgtctggatcgttcataccatttgctgttaaatatacccaagtaggaaaaacagtgtctttgtatttgctgttaaatgtaatcagagacaatctttacggtcattcgggatcattactatcagcataattactgctttagagaacaataatcatacatatgtgtggtatagatatgcggggagtccaatgcagaaatgcagaagagac

SEQ ID NO: 38901 - DNA, 1160 bp, Homo sapiens
tcacttctttctacttacttgctgtgcttctctgagtgcctcgtggcctctttatcaccacctgttgaaggaaatgttagatccagatatggatggaaggtattatgtgacacgggaactttcagaaaatgaagacccaaaggaacaggagatctgtggattttcatggacagtcatctgtggattttcaaggacagtcatgcagaagcatacttggagaacagggattatcttgaggttctaggggctaagtgcatgtttgagtgaaagctgtaagagagctaatgagcacagaatctagaaaaaaaaatagatgtaaccagacataaaggaaattcaaatgaattctgaattcgaggttgaaattggtctaaggaacaatatttagctttgaaggtgaatttcagcattgccttcccttttgctgaatttgcagtttcccatatggcatccaggtatacacacagctgcatcgtgtcactgcaagcggctcccagagttgttcctgttcatccaggaagaaagaaaatcccgccaaagattgagagagatcaataaatgtatttccaaagaacctgaaagaagatgtttccatttggctgtcttaccctctatccaagctcagagggaaatgcattcaagaacgttaacggccagcacaaattccattccaagccatggagcgggaagggcacatgataccaagtgtcccaccagacggccatcttgctaactaatacacctcgggattacatttgcatttacacaaaatgtgagctttgggagccagacgtattattttggttaatagtttggcacgttctcagcttggaagcctgagcatatgtgatgggtcagtaacacaataaaagtaacggggaagcatttctttccccagtggtgaatttctaccctattcaggaaacagacttcccaactcagccattacagctgtctggatcgttcataccatttgctgttaaatatacccaagtaggaaaaacagtgtctttgtatttgctgttaaatgtaatcagagacaatctttacggtcattcgggatcattactatcagcataattactgctttagagaacaataatcatacatatgtgtggtatagatatgcggggagtccaatgcagaaatgcagaagagac

SEQ ID NO: 38902 - DNA, 311 bp, Homo sapiens
tcgcccaggagcttattagaggtgaagactctcaagtcccaaccctggcccactgagtcagtctgttattttaacaaaattcctgggtgatttgtgggcatcgtgatgtttgagaagtgctgatcatcttcttcattatcatccttactgtcctttaacttatcagcagaaacatgagacagcaggtccaattcaactccaataaactctcttctatttgtatttacactgaatttgttgaaggggtgtaaaggtaatgtttccctggtcaattccagaaatcctggaaaatattttgggaaaggatttaa

SEQ ID NO: 38903 - DNA, 390 bp, Homo sapiens
agtgagccaagattgtaccactgtactccagcctgggagacagagggagaccttgtcttaactaaaacaaaacaaaaataaagattttttttctttttaaactaaattctgttgtctcagaatggaatggcatactgttatctgacctggccagaagctctgattggtagttatgaatccctttgaattattaaaaaaattaggcaaattagtgcatttgctgggtaggagaggtttttcaagatctaatatgtgagagagaaagtgaaaactaaaggaattcttggagatcaggaagtggagaatctctggcctgtggcgctgctgagcctaacttcctggcttcacatcagcagtggaggcttccctgggaggtgttcttgcagtttg

SEQ ID NO: 38904 - DNA, 1072 bp, Homo sapiens
ctcggtaggagatggcagggatctcttggaggagcagcgcgcacttgtgctggcgcgcgcggcgggtggagatgtaatcgacgcgcggcaccacgtagttcttggacgagaaggtcacgatggccacgcgcgtggccgtgggcaccacggggaagtcggacagcagcttgcggacgaacatgagctcgctgcggaagttgacttcgcccacgctggacgaatcatccaccaggaagacaagctccaggcgctcgctgagctcccgcagcagccgcacgcgtcgccggaacgcctggcccagccgctccactctgctccccgccgcttcgtcgccaggagcgggcggcgcggggatactcccgggggccccgggcgcggtctcggggaagaggcggaagctgaaattgcgcgacggggacatctgctgaaaggtcgcccagcccgaaacgagcgccagaccccagcaacaaaaggccaggcgaggccacatcgcgctggagacagagcggctgccccggagcgcaggcggcggctcgggcgggaagaggcgctgggcggccggactcgcagaggggcgtgcgcggagctgggcgcggggcagcggccaagagcctcagcgccctttcatctgacactggggacagacacaatccagactcctcagcagctcgggaactccggagggaacggcgcgcgctctctacccctctcgctctcctctttttttcttccctctctcctcctcctctctctccctgaagcctataaaatgtttgaaggaaagggggcagtcaagaaaaatctcccgcttccctccttctctccctctctccctctccccgctcctgtctactttctgtatctgtgactctatctccctcctccccctctcattctcctcccgggatcaagccaaaggctcggagattccatgacaccagaaccccgcgtctgtcaggctgtcaacattcccgcagcaagcgcaccagcgccgaaagccctgattgatcccatatgtctggcaggagctgcagaggaattcactggagatggatccagataccgagagtgc

SEQ ID NO: 38905 - DNA, 1237 bp, Homo sapiens
caggctccaagcttctccctctagttattctctctctcttttccccagaactgagtttcttgagttagcatattcactttctacttcctttcctcccacttatcctcagttcacctccatgctatgaaagcagtttttcaaaattacatgatctactggttcctaaatttgaaggactttagttcatatactaggactcctctctcctgattctctggttgcttctgatgtgtggtctccttacttcttcctcaccaatccctttatacattggtgagccctgaggatctgcttcagttccgttttcattccacttcttctccctgagtgatttcatttattcccgttgcatcagctgctgcctatttaccgaggaccctcaagacctggctgctttggacccttccttctttatgaaaagcaccgggcctttagtctttaatttctgaaatatatttatttagttctctatggtctgtaacccttctgaaataagaacaatgagaattgatatcctttcggtagaaattaaaatactgaagttcagagggttaagtgatttgcccaagaatatgtggttagaaaatggcagagctaggccgggtgcagtggctcatgcctataatcccagcactttgggaggcataggtgtgcagatgacttgaggtcaggagttcgacaccagcctggccaacatggtaaaaccccatctctactaaaaatacaaaaattagccaggcgtggtggtgggtactctgtccatcattccagctatatgggaggctgaggcaggagaattgcttgaactcaggaggcagacgttgcaatgagccaagatcatgccactgcactccactctagcctaggcaacagagcaagacttttgtctcagaaagaaaaaaaaaaaaatggcagagctaaaattagtgctttctgacataaactataggccaaaatttccagttctctgttagctcaaaacccttctactatatatttggtccattctttcactcttaggtaatcgtgggatctcagctttcaccagaacccctgatttattggacaacatgaacaaattggagtacttagccattctattacttttcggggttgagattataatttttcagggtgtccatgggactaaaatgagcatgagtgggagcacggtttctcaaccttccaaccttcattatcccggcctctaaggagaaaaactaaatttaaattctcc

SEQ ID NO: 38906 - DNA, 821 bp, Homo sapiens
caggctccaagcttctccctctagttattctctctctcttttccccagaactgagtttcttgagttagcatattcactttctacttcctttcctcccacttatcctcagttcacctccatgctatgaaagcagtttttcaaaattacatgatctactggttcctaaatttgaaggactttagttcatatactaggactcctctctcctgattctctggttgcttctgatgtgtggtctccttacttcttcctcaccaatccctttatacattggtgagccctgaggatctgcttcagttccgttttcattccacttcttctccctgagtgatttcatttattcccgttgcatcagctgctgcctatttaccgaggaccctcaagacctggctgctttggacccttccttctttatgaaaagcaccgggcctttagtctttaatttctgaaatatatttatttagttctctatggtctgtaacccttctgaaataagaacaatgagaattgatatcctttcggtagaaattaaaatactgaagttcagagggttaagtgatttgcccaagaatatgtggttagaaaatggcagagctaggccgggtgcagtggctcatgcctataatcccagcactttgggaggcataggtgtgcagatgacttgaggtcaggagttcgacaccagcctggccaacatggtaaaaccccatctctactaaaaatacaaaaattagccaggcgtggtggtgggtactctgtccatcattctcctgcctcagcctcccaagtagctggaattacaggtacccaccaccacgcct

SEQ ID NO: 38907 - DNA, 432 bp, Homo sapiens
gaaaagagcctgggagggctccattcctttcccagcaagaaaggtgacgagggacaacagcaggagcacggaggaaatcatgtcttattaaccaagtgtactccaaattccagtaaaattcccagatataattaaggtgtttcctgcagtttaaatgacaagttaggctgaaagaggacagttaaatgtagagaataaatccccattcagcatctttagctgtacttgagcttgagattctaacctttctcccatggcaccttctctctgtgacttcagagtgtgtgtctatgtgtgggtgtgtgtgactaacaagatattattaatctggaaaggcaggcttcatctaatctaagcactccatcaccttccttcttcggttaacatcatacactatacacagttgaatcatgatcttgcccaaaatgtcac

SEQ ID NO: 38908 - DNA, 1223 bp, Homo sapiens
ataaatatttgttgaatgaaagtctgtacattgtatttatgctattggtattgctatgacctgaaactaaaaggagttgtggaaaagatttcttatggaacagaaatatcccttttgattaatatcacaatctcgtaaattgagaaaacaaaaaaatatatactactggagcattcatgtatagttggagattatgactcatttattggtgtgtttttggactcagaacaaagatgagggaatattccttaaagctctgtattgaaataacgaaaagcagtcacattttaataatagaagcttcctagcttactctttctgtaatcttcttttcctaaatgtaagagagcctcataattatgaggcttattactagagtaaggctgtcaaaggcagcaaaatgtctttctgtttggaagaataacataaacttgacatgtatggtgggggacagaaggtttcaaaagtttaagaatctgtgttgtcttaacaaatagatgcttctcaaggagcttacgctagtggttactctgtccagtcagggttttttcttctttaacttgggttcatttcctgatggcacacatgaagtttggatcatatggtttgactttagctatggtccttagctatggggagcagcatcagcgacctgtgacatgtaaattaaaaatacaatgccagggcccttccccagcccctctgatagagaacctcttggccatctgtatttttagatgttccaggttagtctgattaacacccttggttaagaaccattgggaggatctgattgccagtttaaggggaccttcaagcctgtaggtctttatagttaaaaaaaaaaaaagattttaaaaatcatgcatatgttgtggctgaattctggtttagcacatactgcttttaatggcctgaaatgtttttcccaaataaattgtcttgttatagctttcatgtgtgatttggtccagcttcttgttttgaagatacttacgggggggaacactttgtgatttctcttagtaacatattaacccacttaaaaaccctttctattacaggtcttcacatttaggcttaatgtgcttaattcaaatgtaaaaatacacctgcctttgttctcagtgaaagtatgtaataaataaatgaggggttggcaaactactgcccaccatctgtttttttatggcctatgaactaagaatcgttttggatagcta

SEQ ID NO: 38909 - DNA, 530 bp, Homo sapiens
agaaaaaatacatcattttctgtctgcaagatttttgtgcataatatttgtcacggaaaaactataccaatgaatggttcaaatgcattttgcatttgttaccaaacaatactggaaagtttgagatttctgttccattcaacccacagtacagtcttcccagcaagaagaacatgagtattccctccatctgggtcaagattagaggctgctttgaaggagcaaggaaaaatgtggactgttcccaagtatcactgacttttctgcttagcatggaaaaatgtgtcacttgagtgttttccttttctttccaagttttatttatttgaactcaacattatagcagctacaaaagaaattattataaagattaatgacccacaatttaatcacttggacacaactgttttcttcctatatttctttccattccttatctaaatgggaaattattttatacaattgtaattacagtatagatgatactttaaacatttaaacattacattaaagacaattttctaaatttc

SEQ ID NO: 38910 - DNA, 465 bp, Homo sapiens
tcaccccattccttgtgtgtacctctctagtactccccagtatgttccttttgcacaaacatgtagtactgcgtaactactgttctacagatgaactccagttatttaagtgaggcctgttttttagaactaagtaatactgtaactagtagaattctggcatgttaccacagtcaaaagcagaatgtgaagctgtatgctattgatgggaggaaaaaagaaatatatttcctacctttcctgtataaagcccagaagattcctgttagatttccaaaatgggtttttatataatataatataattcaacatttttttcagaggaaaaaaggaaaaagataagttgcttgaaagtcccatctcttttgctagtcggcttctgtctgataaaattttattctggttttgcttcattgtttattcattcagtagatgttcattgaacacttactgttaccaggcact

SEQ ID NO: 38911 - DNA, 343 bp, Homo sapiens
caaggccaagagcgtctggggtagcaaaccaactctcttgtgattggatttatcttaaaaattgataggtaacttttgcccctcacaacagatagcagtccaccttctgtttcatactatgtgtaactccatagccacctaggtaccagagttttatcttttcctttcgtctctttctttttccccagcaatatttaactatattctaatgcatcagggttgttctagtgaatctcattgctgccactgctaagtcatgagtccccaagaccaccctcacattcagagattcactagaaggactcgtcagactccacacgttgatacactcatgacggagact

SEQ ID NO: 38912 - DNA, 243 bp, Homo sapiens
gaccaacgtgctcatcatacacatgtgcttattatacacaatgcacagatactacagtccatctttaaatatgtctaattggaaactggaaggctgactggacatgagattatatgaagagattgtttcattttagaacagagaagggtttggtcatgagaatttggtgacgcaccaggcacggtagctcatacctgtgaggccaagtactttgggaagctgaggcggagaattgtctgagcc

SEQ ID NO: 38913 - DNA, 949 bp, Homo sapiens
agtattgatctttcactgccatgcagggatgagctgtccagatgataaattaagacaatgagaacataagggattggcttcaagatttgtggttgccgacggaatttcttcagcagaaagagaaggaaactgaactacggaactggtaggatattattatttttactgtaaacgatccaagcctgtcaggcctgtaacttccaagtgcaatgtattatgatctacagtgtaaaacaaaagattctgaatttgagtcagtaatagctggtttattccaggattcaaatgtaagtaacttactctcaccaacagtagtcaaaatgagaagcctgctatgctgtggatttatggctcatggactctggatgagttctgcatttatcttcgtggagtgacgaataattgaattggaaaatcatggcatccagaatggaactgcataaaaatctgctggagtgtttccgaaaaaatgaagacctctgggcccttatcccagactttctatttcagtggtccatggaagagcctgcaagcttggcttttccatctcaggacttagctgcagggtctcagggcacactgcagagactcgtcatcctgttgcctggaggtgtgcactggctatttgcagatgagccgccatcccgatgactgcccaatcctcggctgcctgtgctccgggtctccattcatttgaccagcaagacccacatccagcagcaaggactccaccgggatgggagcctggtgcttattctcgaactcagcaatccagcagtgcacctgggtctgtttccagcctggccaatgatattctaagcatgaattattacatattactaattattaaaaattaaatgtaaaaaaaaaaaaaacaaaataaacacagcaacacacaacaccctgcaaacaagaaaacaacaaaaaaacaaaagacggagggcggcgc

SEQ ID NO: 38914 - DNA, 422 bp, Homo sapiens
agcacgagttttcattaaaaataatatttattttaacgtttactctagcatatattactgtaaaaaacttttgtgatgtaacaaactgggaaagagctaatgatttaattaaaaagtaggacatcggccgggcgcggtggctcacgcctgtaatcccagcactttgggaggccgaggcgggtggatcatgaggtcaggagatcgagaccatcctggctaacaaggtgaaaccccgtctctactaaaaaaatacaaaaaaaaattagccaggcgcggtggcgggcgcctgtagtcccagctactcgggaggctgaggcaggagaatggcgtgaacccgggaagcggagcttgcagtgagccgagattgcgccactgcagtccgcagtccggcctgggcgacagagcgagactccgtctcaaaa

SEQ ID NO: 38915 - DNA, 471 bp, Homo sapiens
ccaaggaagaaagtttatttgggtgctacagccaaggggaacaggacataagtctcaaatctgtgtctctggcctactaaaattagggatttttatagcagggaagaaatgtaaccatgtgtgggaaacaggaattagggaggggtgaggaagaggagctggtcaacaggaagcggggggttggttaggcatcatggtgggtaaggggtctggtaagcttcaggttttgtttttgttttttgagacagggtcttgctctgttgcccaggctggagtgagaccttgtctcaaaaaataccattttttaatttaaaatttaaaaattttaaaaattaaaagtccagacaactgcagggctttgggcgatcccttttctttcagagccatttcctcctcagtgatatggaactatgcatcctcaggcagtatgcaggtggcacagggctgtgtgtctgtaagcacttaataaaa

SEQ ID NO: 38916 - DNA, 367 bp, Homo sapiens
ttttttttgagatggagtctcactctgtcacccaggctggagtgcagtctcatgatctcagctcactgcaacctccacctcctgggttcaagcaatcctccctcttcggcctcccaagtagctgggattacaggtgtgtgccaccatgtccagctaatttttttgtatttttagtcgagacggggtttcgtcatgttggccaggctggtctcgaactcctgacctcaaatgatctgccagtctcagcctgccaaagtgctgggattacaggcgtgagccaccgttcccagcgcaaaagtatgattttatatgaggttacaatctgttatccataattctgaagtccaaaaagtttgaaaaatgttat

SEQ ID NO: 38917 - DNA, 461 bp, Homo sapiens
atatttttagtggagatggggttttgcatgttgcccaggctggtctcgaactcctgggctcaagctgtccaccctccttggccttgtaaagtgctggtattacaagcatgagccaccacacctggcccctttttgttctttttaatagtacgtcagcttttttcctggtcattgaaaattcctcaaggatgtctttaatttacatcttaaaatgtaggctggacgcagtggcccacacctgtgatcccagcactttgggaagccgaggtgggtggatcatctgatgtcaggaattcaagaccaccctggccaacaatggtgaaaccctgtctctacaaaaactacaaaaatccatcctggccaacgtggtgaaaccctgtctctacaaaaaatacaaaaattagccaggcgtggtggcacacacctgtagtcccaactacttgggggctgaggcaggagga

SEQ ID NO: 38918 - DNA, 389 bp, Homo sapiens
cagatgccccttttctgtgaatcagggactggccgtggggaggcctgcttatggggtgcgttggggctgtctgtagggaatgccgtctccctccctcccttgtatttccgctggcttcctctggcatcacattcccaggagatttcaggtcagagaggaaatgcctctgtggatgtactggccatgcattgctctggccccggcactgcatgaggaagtggctgccaggtgtcctccagacccctcccaggaaggggcctcattcggtttcttgggaactgcctgtcttttgttgtgaatggaccacattgtgaccggcctgtgggtcttgtcaggggtttggggccctctgagctgaaatgcttcctgtgggtagagagttgcaggag

SEQ ID NO: 38919 - DNA, 384 bp, Homo sapiens
tcaaatacccctatgtctagttctggtgatatcagtcactaaaaatgggatcagcttgtggcagataccaccttaaatgctcatgtctgtctcagtcactaggaggaaaaccagagcctggaaaccagatccattttgatgaatgtccaagattttgagagtgaaaaactccaaaatgacagctcacagttggcagctaggccagaaggttcccaaggaacatcagaggtattcccggaatataaagaggcaaggccacagaatgactccacatagcagaggtgttgctacgagaggtgacactgtccctgtcagaaacaagtcagtgccaaggagactcaataacaaaaacaactaaacaatcctttcctgcctaacatgagt

SEQ ID NO: 38920 - DNA, 224 bp, Homo sapiens
gctattattgctgagtttttcctaaagaatgggaaatggacttactatgccaaaagaagccaactgaaaaggaaaggtcaaaggaatcaaaaatactcaaaagttcaggagtaaaaagatcatttagccaacccaaaagaataactcttcctatcagacacgaacaaaaataaattttaatgtggtgagaaaggtgtagtaacaagtacaggtgaaggggaaaa

SEQ ID NO: 38921 - DNA, 585 bp, Homo sapiens
ttgtgtaacaacgtgcagggtacttttacttttaattcggggtcctctgatgcagtgattctcaccctcagcataacaaaactgaggctcaaaggatctaatgggtgggctcaggctcctgcaattatagacgggctgaactgagactcgggctctgagcacagacgctggggctacgttccacgggttcaaatctggctctcctgcctgccggctttgtgatcctgagcctcagcattccaatctgcaaagtgggggtgataattgcacctacctcacagggtaggtgtcaggattgaatgggttagtgcacacagagggcttggagtggggctcagggtcagtgccaggaagtgtaaacagttataatggagcctgcgtcccctcactcccaggccagggctcattttactatgcctttgtcccgctctcactcctctctgcctcttctgctcagaaggtgtctgactcagcaaaagtgcccggttatgcctccctctcaagggaactgtcaggcaagcgggtgccctgcttgatccccccggcttggccccggagcctgacatccatctggctgctcccaca

SEQ ID NO: 38922 - DNA, 340 bp, Homo sapiens
cacctaaatccctgcctcaggctctgctttcagtggacctcacataagacactaggattttcttcttcttttttgggtcatattttaactcttcttcccaccccgctcccctaaaattaaaatctatttgtttcttacaaaatttatcctaaatcttccctcactaaccctcaaaactatcatacactgcttcgtaagaaccatttacccatatagcgtaagccagcagaggcatctggctcctttatctggatatcccttttaacccatgaatgcactggtaaattctctaagcatgccgatcaaacagtggtgatcaagagcaaattccatcactgta

SEQ ID NO: 38923 - DNA, 426 bp, Homo sapiens
tctcccacatcacagtaagaattccacacaccatacaacttggaaagaggctccagctgaaggaagccccacacttctttcaagtttttcttagtcttctcttcttggcaaagagtaccttttgtttcttctaattatgtaactattggtttagtaaatattcacccattcagtcaccctgtaagtggcaggcactgtttacagggacacaggaaggaataaaaacttgcaggcaccttggagcttgcattctattgaagaggtaatggaagttgggatagcagctaaactatgctggtattggccaggcgcagtggctcacacctgtaatcccagcactttggaggccaaggtgggcagatcatgaagtcaggagatcgagaccatcctggctaacatggtgaaaccccgtctctactaaaagta

SEQ ID NO: 38924 - DNA, 410 bp, Homo sapiens
agtatagcacatacagttatgtatagtacataatacttggtaataactgtgttacttgtttacatatttactatttatcattattttagaatgtactattacttataacaaattgtggccaggcatggtggctgatgcctgtaatcccaacactttgggaggctgagacgggaggatcagttgagcccaggagcttgagatcatcctgggcaacatagtgagatgccatctttacaagaaaaatacccaaaaaaattagccagacatggtggtgcatgcctgtagtctcagctacttgagaggctgaggcaagaggatcgcttgagccagggagttcaaggttgcagtgagcagtgatcacaccactgcattccaccctggatgagagagtgagacgagaccctgtctca

SEQ ID NO: 38925 - DNA, 379 bp, Homo sapiens
ggttattacattaaattcatctttttagtttaacttcctaactcctttctaggttgtttttagcatccactagctgtgtgctttaaaaaaattccagaaacaagccatttatttatgaataacaaatgaacagaggatgtcttatcagatgggtcactctctggaggagtgcttcagtgaaacatacacacacacacacacacaaccactcatgggcacacaaataaacacatacaaaagctatgatcctactgtctttctcccctaaaggctgtggttaactacaaagttgacattttctgcataataattcaattctgtgcatagctttggggactcacaggctaaatggcattgtgctttgactatggttttgtgt

SEQ ID NO: 38926 - DNA, 397 bp, Homo sapiens
aaacatactgactaaaagacattgtcagagtgggacaagacccatctatttgctatccagaagaaatccactttaaatattatacagaaaggttaaaagtaaaaggattgaaaatgatataccatgtaaacactaataaaacggaagtaactatattcatatctgaggcaaaggaaacttcagagccaggaaagttactaggaatataaggtgtcattacataataataaaagagttcactaagaagacaacaatcctaaatatgtatgtacccacctaagagcctcaaaatgaatgatgcaaaaactaagagaacttaaaagagaaatacggccgggcatgatggctcatgcctgtaatcccagcacttcgagaggccgaggcaggtggattgctt

SEQ ID NO: 38927 - DNA, 447 bp, Homo sapiens
gttcggggtggggagacatttttggtgggaaacgctggcgttccctgctgtttagcaagtggaggggaggtgaaagtgtgtacatactgcctgttttgagggaggaagagtagagtatgtgccacaaagaggagcaggcgaatgcctagagctcagggaggagcacagctacgtccagctgagagcactgaagaggcttgatggagtggtggacacccgagttgggtcttgaagtagggccaggtattgaaggcactcgtcttcaagctgaggtacccatgctcttgaggggacaagggtactccccaagagggacataatacaggtggctttgagggcacaatttccagtccttagtccatctcttcttgtccaactgatcagccaaaagcacacaatgcatgtggtccctgaaatgtggcttctcatctacatctcccattattt

SEQ ID NO: 38928 - DNA, 205 bp, Homo sapiens
taatcccagctactcaggagactgaggcagcagaatcgcttgaacccgggaggcggaggttgtggtgagccgaaatcacgccatcgcactccagcctgggcaacaaaagtgaaactccgtctcagaaaaaacaacaacaacaacaacaacaacaaaaaccccatgtcctttattcaattcagaaaacaattcagtgactcttggg

SEQ ID NO: 38929 - DNA, 426 bp, Homo sapiens
gagagagggtctcgctctgtcacctaggctggagtgcagtagtgtgatcatagctcattgtatcctcagactctcaggctcaaccatcctcctgcctcatccttctgagtggctgggactacaaacatccaccaccacacgcagctaatttttagttttttggtagagatggggtcttgctttgttgcccaggttggtctcaaactcttgggctcaattgatcctcccacctggccccggcctgcatcaaaatttcactcctttaatccctcaccatgttgttgttcacgccatcaaaatgtctccaaactttgattaaaatggtggccaaatctaaaggcacacaagggtgagcttgattccaaatccatagaataatacttttctatcatagccatagccctgtatgtggccctacaataatat

SEQ ID NO: 38930 - DNA, 241 bp, Homo sapiens
tatcggggatgtctgctttctccctgttctaaagctttggtactagaatagtagagtgattaagagtagaggctttgagataaataaacctggcttcaagtctctgctttacaacttactatctgggtcatcttaggaaaatctctgagcttcagtgctttgaatgataaaatacagacaatgataaatgtagggttaggagtagtcattgagataatgtatgcagtgggcagagcacagt

SEQ ID NO: 38931 - DNA, 403 bp, Homo sapiens
agtgatgagctaatcatcttgagtagaggccagtaggagatgcacagaaaccaagagagagtggtaacagaatacaacagtctgtgctcggggcagtatgcagggtgctacaggagaatgtatgagaaaacctgaatccaaagttgcaatggtcaggaaagacttttctggaggaaatgacagcttagttatcacctaagggattagtggaaaccagacaggaattagtcatgagcagcatacccttcttctgtatctataagagcacaaaacttagccatgatggtgtttcaggactattttaaggaaagttttaggacaaatgttggcttcaatacctaatcagtgtgcttgatgtgttagaaaaaaaaaaaagaagtgaaatgaaaagaaaagaaaattt

SEQ ID NO: 38932 - DNA, 1105 bp, Homo sapiens
gagaacagtggtgcactgtttccgctgccctcgtttgtctaattggcccagacgctccaccagcgcgaagcttcccgggagctcctcgctggccacccccgcggcccgcagcccggcagaggcgggaaagcagcgcgcctgcgccgtgggaaccggggctggaggcgaaaagcggggagcggaggggggccgctggagccgagtagcgtacagagcggcgtgtgacgcggggacgccgcgtgctcccaacgtcgccccggtttgacgcacacggcaccaaactgtctgattctctggcctttgtgtccctgggaagttactctgccagaggaaagcaggtgtgctccacttctcccgtgaacctgaagatgagttgtcccagactcttctcagtgattggaaacttaggtggtggagctaaaggttacttgttacgagacttctacagacaactcttgttgggatccatctatggtttagcaacattagtggaaaagttttcttgaatattgactttgaatataaaaacgtttatatttagacttcagattttgtgtgatcatcaaactcaacgaggggataaacataattgggggcgaatgatggtcttgtcttgttaataatttcaacagaagtatcacaacaccgccgactatcctgtccagtcctgactaattccacgcttgttgcatctggatggtagatttgttttaattgtgtattccctccctgcagtagtttgctttagttgtaaacattttttggtcccatgagaaggaaaacatttcaaaaaatagacaactaaagtttctcaaagaaaggaaacctggctgtttgccttcagttgcatgtgtaagtatctagggaacttgatggcagtaatattgcattttggtaggcttgctaagaaaaacctcgtttttataataaggctataatctagcttagacattttaattggtgaagcataaagcttgattagtattaatgcagtggtatgtattgcttttaaaagtcttacaatttctaacaaattaaagttatactgcaattatatcatactttgtgttggtattaactcatgaagtacaaaattttgaaacac

SEQ ID NO: 38933 - DNA, 870 bp, Homo sapiens
gagaacagtggtgcactgtttccgctgccctcgtttgtctaattggcccagacgctccaccagcgcgaagcttcccgggagctcctcgctggccacccccgcggcccgcagcccggcagaggcgggaaagcagcgcgcctgcgccgtgggaaccggggctggaggcgaaaagcggggagcggaggggggccgctggagccgagtagcgtacagagcggcgtgtgacgcggggacgccgcgtgctcccaacgtcgccccggtttgacgcacacggcaccaaactgtttgatttaattttggatgagatcgttcttgcagcaagatgttaataagacaaaatctaggtaagtagaagactgctttgttaaatgtacatatcaaggtaggaataatacaaaaaaattatgtcttaaaaatgtggtgttgagttcagaaccaaagagtttttaaataaaattttgaaatgcaaataattgactttttgacacacttggtccagttgatttgatgggagtaaaattataactatcacattgtggaactaaatttttagtttccttcttttgtgttgaggttaactaaagcattcaagtttccagtgaatattctaaaatgttagaaaatcaagttaatgtttggttcagccactcttattgaactctgaccacttcagtaagacatttattgtgtcacttcattgttctctcctttgttgataaagtatatgaatagtcattgcttttgtgaattttgcttcatttttaatgttaaggaagcactttcccaaatgggataaatttgccaaattgtgatttctttctgttaatatagtattcaaaattgtaaattattgttttaatgttttcctag

SEQ ID NO: 38934 - DNA, 732 bp, Homo sapiens
aacaaaactaaaatacgagtttaacaatggaagacctaggatttgaacggggtagtttaacttgagagtctgctattaaaggcttatgttatactgctctcaacagagtggtaaaataatttagtaaatattaaaataattcagtgaaataacataagaaatactacacaggaaaatacataattacatgtatactcttactttattatactctcacccatttatgtattatactctcacccattttttcctccctctcaggttattctggagcaaacccagacatatttgttatttattgatctccacctcatccccattggtaatttttttctagttttttttttttattatggtaaactatatgtaacatgaaatttgccattttaaccatttttaagtgtacagttgagtgttcctatatacatttataatgtgcactcatcaccaccatccatcttcataactttttgtcttgcgaaactgaaactctgtacccattaaacaacaattcctccgtttctcctgctcctgaggtcctggaaatcaccatttttctctctttgaatttgactaagtgtctcataagcagaatcatatagtgtttgtctttttgtgactggcttatttcacaagtgtgatgttttcacggttcattcatgttacagcattttgcagaatttcctcccattttaagtctgcataatactgtattgtatgtatgtaacacat

SEQ ID NO: 38935 - DNA, 511 bp, Homo sapiens
gagaacagtggtgcactgtttccgctgccctcgtttgtctaattggcccagacgctccaccagcgcgaagcttcccgggagctcctcgctggccacccccgcggcccgcagcccggcagaggcgggaaagcagcgcgcctgcgccgtgggaaccggggctggaggcgaaaagcggggagcggaggggggccgctggagccgagtagcgtacagagcggcgtgtgacgcggggacgccgcgtgctcccaacgtcgccccggtttgacgcacacggcaccaaactgtgagtttcaggggttatttggtcagattcgctgggacccgagtgggtttcgggcctctgggctgtggcagcggcgggactgagggtggcggaagaacttgggggacccggcctccggctctcgggcccggggagctacgccctaggctgggtcccagccatccaaaaggacgcattttgccgcacaggctaagatggcggcggcggccgaggaggcggagttggtgc

SEQ ID NO: 38936 - DNA, 6358 bp, Homo sapiens
gagaacagtggtgcactgtttccgctgccctcgtttgtctaattggcccagacgctccaccagcgcgaagcttcccgggagctcctcgctggccacccccgcggcccgcagcccggcagaggcgggaaagcagcgcgcctgcgccgtgggaaccggggctggaggcgaaaagcggggagcggaggggggccgctggagccgagtagcgtacagagcggcgtgtgacgcggggacgccgcgtgctcccaacgtcgccccggtttgacgcacacggcaccaaactgtctgattctctggcctttgtgtccctgggaagttactctgccagaggaaagcaggtgtgctccacttctcccgtgaacctgaagatgagttgtcccagactcttctcagtgattggaaacttaggtggtggagctaaaggttacttgttacgagacttctacagacaactcttgttgggatccatctatggtttagcaacattagtggaaaagttttcttgaatattgactttgaatataaaaacgtttatatttagacttcagattttgtgtgatcatcaaactcaacgaggggataaacataattgggggcgaatgatggtcttgtcttgttaataatttcaacagaagtatcacaacaccgccgactatcctgtccagtcctgactaattccacgcttgttgcatctggatggtagatttgttttaattgtgtattccctccctgcagtagtttgctttagttgtaaacattttttggtcccatgagaaggaaaacatttcaaaaaatagacaactaaagtttctcaaagaaaggaaacctggctgtttgccttcagttgcatgtgtttgatttaattttggatgagatcgttcttgcagcaagatgttaataagacaaaatctagactaaatgtgttaaatgggcttgccaacaatatggatgatttgaagataaacaccgatattactggtgctaaagaagaactcctagatgacaacaattttatctcagacaaagagagcggagttcataagccaaaagattgtcaaacatcatttcagaaaaataatacgttgactctgcctgaagaactgtcaaaggacaaatctgaaaacgccttaagtggaggccagtctagtctatttatacatgctggtgctcctactgtttctagtgaaaactttatcttgcctaaaggagctgctgttaatggaccagtttcacactcctccttaactaagacttccaatatgaataaaggcagtgtttcattaaccactggacagcctgtggatcagccaacaacagaatcttgttcaactttgaaggtagcagctgatcttcagctgtctacaccacagaaagcaagtcaacaccaagttttatttttgttatcagatgtagcacatgctaagaatcccacccattccaataaaaaactacctacctctgcttcagttggttgtgacattcagaattcagtagggagtaatataaagtcagatggcactttaataaatcaagtagaggtgggtgaggatggtgaagatttattggtgaaagatgattgtgtcaatacagtaacgggaatttcctcaggtacagatggatttaggtcagaaaatgatacaaactgggatccccaaaaagagttcattcaatttcttatgactaatgaggaaacagtagataaagctccacctcattctaaaataggtctagaaaaaaaaaagaaagcgaaaaatggatgtaagcaagataactcgttataccgaggattgctttagtgattctaattgtgtacccaataaatcaaaaatgcaagaagtagactttctagaacaaaatgaagagctacaagcagtagactcacagaaatatgcattatcaaaagtgaagcctgaatcaactgatgaagacttagaatctgtggatgccttccaacatctaatttataacccagataagtgtggagaagagagttcacctgttcatactagcacttttctttcaaataccttaaaaaagaaatgtgaagagagtgattctgagtcacctgctactttcagtaccgaagagccatcattctacccctgtacaaagtgcaatgtgaattttagggagaagaagcacctccacaggcatatgatgtatcatttagatgggaatagtcactttcgccatcttaatgtcccaaggccatatgcttgtagagaatgtggacggacatttcgagatcgcaattcacttctaaaacatatgattattcaccaggagagaagacagaagttgatggaggaaattcgtgaattgaaagaacttcaggatgaaggaagaagtgcacgattacagtgtcctcagtgtgtgtttggtaccaattgccctaaaacatttgtgcaacatgctaaaacccatgaaaaagataaaaggtactactgctgtgaagagtgtaacttcatggcagtgacagaaaatgaattggaatgccatcgaggcattgcacatggggcagtggtaaaatgccctatggtcacttctgatattgcccagagaaaaacacaaaaaaagactttcatgaaagactctgtagtaggatcatccaaaaaatcagctacctacatatgtaagatgtgtccttttactacttcagccaaaagtgttttaaaaaagcacacggagtacttgcattcatcatcatgtgttgattcatttggtagtcctcttggacttgataaaagaaaaaatgacatccttgaagaacctgtagatagtgatagcactaaaacattaactaaacaacagtcaaccacatttccaaagaactctgctttaaaacaagatgtgaagcgaacatttggatcaacctcacaatcaagtagtttttcaaaaattcataagcggccacacagaatacagaaagctcggaaaagcattgcccaatcaggtgtaaacatgtgcaatcaaaacagctctcctcataagaatgttacaattaaaagcagcgttgaccaaaaacctaagtatttccatcaagcagcaaaagaaaagtctaatgccaaggcaaatagccactatttgtatagacacaaatatgaaaactataggatgatcaaaaaatcaggtgaatcatatcctgtgcatttcaaaaaagaagaagctagttcattaaattctttacacctgttttcatcatcaagtaattctcacaacaattttatttcagaccctcataagcctgacgccaaaaggcctgaaagcttcaaagatcacagacgtgtagctgtaaagagagtaattaaggaatctaagaaggaaagttctgttggaggggaagacttggatagctatccagattttttgcataaaatgactgttgtcgttttgcaaaaacttaattctgctgaaaagaaagatagttatgaaacagaagatgaaagttcctgggataatgttgagttaggagactacactacacaggccatagaagatgaaacctatagtgatattaatcaagagcatgtaaatttattccctttatttaagagcaaagtggaaggtcaggagcctggagaaaatgctactcttagttatgaccaaaacgatggcttttattttgaatactatgaagatactggaagtaacaactttttgcatgagatacatgatcctcagcatttagaaactgcagatgcttcattgtcaaagcatagttctgtttttcattggactgatttgtctcttgagaagaaatcgtgtccttactgcccagcaacatttgaaacaggtgttgggttatcaaatcatgtcagggggcatcttcacagagcaggattaagctatgaagcccgtcatgttgtatcaccagaacaaatagccacaagtgacaaaatgcagcatttcaaaagaactggcacaggaacacctgttaaacgagttagaaaagctatagagaagtctgaaaccacttctgaacacacttgtcagctctgtggtggttggtttgatactaaaattggattatcaaatcatgttagaggccacttgaaaagacttggaaagacgaaatgggatgctcacaaatctccaatctgtgttctgaatgagatgatgcaaaatgaagaaaaatatgaaaaaatcttaaaggcattgaacagtcgtcgtattattcccagaccatttgtagctcaaaaacttgcatcaagtgatgactttatatctcaaaatgttatacctcttgaagcataccgtaatggcctaaagactgaagctctgtcagtgtctgcatcagaagaagaagggctgaatttcttaaatgaatatgatgaaacaaaaccagaactgcccagtgggaaaaagaatcagtctcttacactcatagaacttcttaaaaataaaaggatgggagaagaaaggaattctgctatttctcctcaaaagatccataatcagacagcaagaaagagattcgttcagaaatgcgttcttccattaaatgaggatagtccgttgatgtatcagccacaaaaaatggacttgactatgcactcagccttagattgtaagcaaaagaaatcaaggtcaagatctggaagcaagaagaaaatgctaacattacctcatggtgctgacgaggtttacattctccgatgcaggttttgtggcctagtctttcgaggacccttgtctgttcaggaagactggattaagcacttacaacgacatattgtaaacgctaatcttccacggactggagctggcatggtggaagtcacgtcactacttaaaaagcctgcctccattacagaaacttcattttctctactaatggccgaagcagcttcatagaaccaggaaaccttttaaatagccagtttgaattggatgtaaatttgaaattctttttttttaagccacattaaattatctgtttataaatactaaagcaggaaaatggggggaaagtgaattacagtgacatcagagcaaattgaatacttaaaacagtaagtagtctatatattttatatagggtggaagatgtgtttttaaggtttatgaagttttgttggttaactgtgttcactcagtaaaagagcagtacatgtaagcagccattaataaactgttgcacatggatacttatagacagacttattggacaattatgttttttgcagtgttaccagaatcaaggctctgtttattccccacaagacttgcatagaaaaataagatattatattttgtttgtatgtatttagtgttttgtataataccaagaaccgctgactaaatttactcaaattagggcattaaatatcatgtacttcatagtttgagactgttcactcaaatagggcagagtactattctatctagatgtgtaagtgttttttttaaaatcacatggaacggttttttttatactaaaaagtggagggagatttgtttaaacaagtatttctaaaagaaatatgtacatagttctggaaattatttgtggtaaggaaatattctttactccagttgcatttctcagacaataaagtggtgcatccatgctacctcctactttgtcaacaaagatgctatttaccctttacatttttgtatcataatagattttaaaaatctaatgttctttattgcaagacattcttttgttaacaggtttgtttctttttaatgttttacctaaaatttgacatgcttacaggacaggtttgcctcttactttatttaacattgtagaaatgtaattaataaacaatgctcactacacagtttagaatagacgttctcatttatattatcttccaaatttgatcagttagcaaaacttaatacaccaattaaaatatttctacatatgagaatgtttacaatttaaattttagaacttgttttggatgtgattatatgtacgaaaatcgtgtaacactatgctcatgctaagaaccgacataacagaattactgaaataaatgtgctgtgaggaatggaaaatatggtgcaggtgtcttggtcatgataaattgtgattctttttaaaaattttttccaaaaacaattaggtattttaatctgaaatcagattcctttacaaacaacaagtttttgtatgcaagcaccattttatttcatgtagtatggctaatactatagttgaaccaaggatatgcattgattctttgcttcgtatgtaaataaagttaaaaacagttaaaataaggagtattttggtagagtatatacatacctcactgccagtgaaattgctttcctatggtatatctccttaccagaaaaatctctaaataaaaaaaggtttaaagaaaattaaaatgtg

SEQ ID NO: 38937 - DNA, 5549 bp, Homo sapiens
aagcttgcggccgcggcggtcgctgggggccacggagcctgaggtttgatttaattttggatgagatcgttcttgcagcaagatgttaataagacaaaatctagactaaatgtgttaaatgggcttgccaacaatatggatgatttgaagataaacaccgatattactggtgctaaagaagaactcctagatgacaacaattttatctcagacaaagagagcggagttcataagccaaaagattgtcaaacatcatttcagaaaaataatacgttgactctgcctgaagaactgtcaaaggacaaatctgaaaacgccttaagtggaggccagtctagtctatttatacatgctggtgctcctactgtttctagtgaaaactttatcttgcctaaaggagctgctgttaatggaccagtttcacactcctccttaactaagacttccaatatgaataaaggcagtgtttcattaaccactggacagcctgtggatcagccaacaacagaatcttgttcaactttgaaggtagcagctgatcttcagctgtctacaccacagaaagcaagtcaacaccaagttttatttttgttatcagatgtagcacatgctaagaatcccacccattccaataaaaaactacctacctctgcttcagttggttgtgacattcagaattcagtagggagtaatataaagtcagatggcactttaataaatcaagtagaggtgggtgaggatggtgaagatttattggtgaaagatgattgtgtcaatacagtaacgggaatttcctcaggtacagatggatttaggtcagaaaatgatacaaactgggatccccaaaaagagttcattcaatttcttatgactaatgaggaaacagtagataaagctccacctcattctaaaataggtctagaaaaaaaaaagaaagcgaaaaatggatgtaagcaagataactcgttataccgaggattgctttagtgattctaattgtgtacccaataaatcaaaaatgcaagaagtagactttctagaacaaaatgaagagctacaagcagtagactcacagaaatatgcattatcaaaagtgaagcctgaatcaactgatgaagacttagaatctgtggatgccttccaacatctaatttataacccagataagtgtggagaagagagttcacctgttcatactagcacttttctttcaaataccttaaaaaagaaatgtgaagagagtgattctgagtcacctgctactttcagtaccgaagagccatcattctacccctgtacaaagtgcaatgtgaattttagggagaagaagcacctccacaggcatatgatgtatcatttagatgggaatagtcactttcgccatcttaatgtcccaaggccatatgcttgtagagaatgtggacggacatttcgagatcgcaattcacttctaaaacatatgattattcaccaggagagaagacagaagttgatggaggaaattcgtgaattgaaagaacttcaggatgaaggaagaagtgcacgattacagtgtcctcagtgtgtgtttggtaccaattgccctaaaacatttgtgcaacatgctaaaacccatgaaaaagataaaaggtactactgctgtgaagagtgtaacttcatggcagtgacagaaaatgaattggaatgccatcgaggcattgcacatggggcagtggtaaaatgccctatggtcacttctgatattgcccagagaaaaacacaaaaaaagactttcatgaaagactctgtagtaggatcatccaaaaaatcagctacctacatatgtaagatgtgtccttttactacttcagccaaaagtgttttaaaaaagcacacggagtacttgcattcatcatcatgtgttgattcatttggtagtcctcttggacttgataaaagaaaaaatgacatccttgaagaacctgtagatagtgatagcactaaaacattaactaaacaacagtcaaccacatttccaaagaactctgctttaaaacaagatgtgaagcgaacatttggatcaacctcacaatcaagtagtttttcaaaaattcataagcggccacacagaatacagaaagctcggaaaagcattgcccaatcaggtgtaaacatgtgcaatcaaaacagctctcctcataagaatgttacaattaaaagcagcgttgaccaaaaacctaagtatttccatcaagcagcaaaagaaaagtctaatgccaaggcaaatagccactatttgtatagacacaaatatgaaaactataggatgatcaaaaaatcaggtgaatcatatcctgtgcatttcaaaaaagaagaagctagttcattaaattctttacacctgttttcatcatcaagtaattctcacaacaattttatttcagaccctcataagcctgacgccaaaaggcctgaaagcttcaaagatcacagacgtgtagctgtaaagagagtaattaaggaatctaagaaggaaagttctgttggaggggaagacttggatagctatccagattttttgcataaaatgactgttgtcgttttgcaaaaacttaattctgctgaaaagaaagatagttatgaaacagaagatgaaagttcctgggataatgttgagttaggagactacactacacaggccatagaagatgaaacctatagtgatattaatcaagagcatgtaaatttattccctttatttaagagcaaagtggaaggtcaggagcctggagaaaatgctactcttagttatgaccaaaacgatggcttttattttgaatactatgaagatactggaagtaacaactttttgcatgagatacatgatcctcagcatttagaaactgcagatgcttcattgtcaaagcatagttctgtttttcattggactgatttgtctcttgagaagaaatcgtgtccttactgcccagcaacatttgaaacaggtgttgggttatcaaatcatgtcagggggcatcttcacagagcaggattaagctatgaagcccgtcatgttgtatcaccagaacaaatagccacaagtgacaaaatgcagcatttcaaaagaactggcacaggaacacctgttaaacgagttagaaaagctatagagaagtctgaaaccacttctgaacacacttgtcagctctgtggtggttggtttgatactaaaattggattatcaaatcatgttagaggccacttgaaaagacttggaaagacgaaatgggatgctcacaaatctccaatctgtgttctgaatgagatgatgcaaaatgaagaaaaatatgaaaaaatcttaaaggcattgaacagtcgtcgtattattcccagaccatttgtagctcaaaaacttgcatcaagtgatgactttatatctcaaaatgttatacctcttgaagcataccgtaatggcctaaagactgaagctctgtcagtgtctgcatcagaagaagaagggctgaatttcttaaatgaatatgatgaaacaaaaccagaactgcccagtgggaaaaagaatcagtctcttacactcatagaacttcttaaaaataaaaggatgggagaagaaaggaattctgctatttctcctcaaaagatccataatcagacagcaagaaagagattcgttcagaaatgcgttcttccattaaatgaggatagtccgttgatgtatcagccacaaaaaatggacttgactatgcactcagccttagattgtaagcaaaagaaatcaaggtcaagatctggaagcaagaagaaaatgctaacattacctcatggtgctgacgaggtttacattctccgatgcaggttttgtggcctagtctttcgaggacccttgtctgttcaggaagactggattaagcacttacaacgacatattgtaaacgctaatcttccacggactggagctggcatggtggaagtcacgtcactacttaaaaagcctgcctccattacagaaacttcattttctctactaatggccgaagcagcttcatagaaccaggaaaccttttaaatagccagtttgaattggatgtaaatttgaaattctttttttttaagccacattaaattatctgtttataaatactaaagcaggaaaatggggggaaagtgaattacagtgacatcagagcaaattgaatacttaaaacagtaagtagtctatatattttatatagggtggaagatgtgtttttaaggtttatgaagttttgttggttaactgtgttcactcagtaaaagagcagtacatgtaagcagccattaataaactgttgcacatggatacttatagacagacttattggacaattatgttttttgcagtgttaccagaatcaaggctctgtttattccccacaagacttgcatagaaaaataagatattatattttgtttgtatgtatttagtgttttgtataataccaagaaccgctgactaaatttactcaaattagggcattaaatatcatgtacttcatagtttgagactgttcactcaaatagggcagagtactattctatctagatgtgtaagtgttttttttaaaatcacatggaacggttttttttatactaaaaagtggagggagatttgtttaaacaagtatttctaaaagaaatatgtacatagttctggaaattatttgtggtaaggaaatattctttactccagttgcatttctcagacaataaagtggtgcatccatgctacctcctactttgtcaacaaagatgctatttaccctttacatttttgtatcataatagattttaaaaatctaatgttctttattgcaagacattcttttgttaacaggtttgtttctttttaatgttttacctaaaatttgacatgcttacaggacaggtttgcctcttactttatttaacattgtagaaatgtaattaataaacaatgctcactacacagtttagaatagacgttctcatttatattatcttccaaatttgatcagttagcaaaacttaatacaccaattaaaatatttctacatatgagaatgtttacaatttaaattttagaacttgttttggatgtgattatatgtacgaaaatcgtgtaacactatgctcatgctaagaaccgacataacagaattactgaaataaatgtgctgtgaggaatggaaaatatggtgcaggtgtcttggtcatgataaattgtgattctttttaaaaattttttccaaaaacaattaggtattttaatctgaaatcagattcctttacaaacaacaagtttttgtatgcaagcaccattttatttcatgtagtatggctaatactatagttgaaccaaggatatgcattgattctttgcttcgtatgtaaataaagttaaaaacagttaaaataaggagtattttggtagagtatatacatacctcactgccagtgaaattgctttcctatggtatatctccttaccagaaaaatctctaaataaaaaaaggtttaaagaaaattaaaatgtg

SEQ ID NO: 38938 - DNA, 6118 bp, Homo sapiens
aagcttgcggccgcggcggtcgctgggggccacggagcctgaggtctgattctctggcctttgtgtccctgggaagttactctgccagaggaaagcaggtgtgctccacttctcccgtgaacctgaagatgagttgtcccagactcttctcagtgattggaaacttaggtggtggagctaaaggttacttgttacgagacttctacagacaactcttgttgggatccatctatggtttagcaacattagtggaaaagttttcttgaatattgactttgaatataaaaacgtttatatttagacttcagattttgtgtgatcatcaaactcaacgaggggataaacataattgggggcgaatgatggtcttgtcttgttaataatttcaacagaagtatcacaacaccgccgactatcctgtccagtcctgactaattccacgcttgttgcatctggatggtagatttgttttaattgtgtattccctccctgcagtagtttgctttagttgtaaacattttttggtcccatgagaaggaaaacatttcaaaaaatagacaactaaagtttctcaaagaaaggaaacctggctgtttgccttcagttgcatgtgtttgatttaattttggatgagatcgttcttgcagcaagatgttaataagacaaaatctagactaaatgtgttaaatgggcttgccaacaatatggatgatttgaagataaacaccgatattactggtgctaaagaagaactcctagatgacaacaattttatctcagacaaagagagcggagttcataagccaaaagattgtcaaacatcatttcagaaaaataatacgttgactctgcctgaagaactgtcaaaggacaaatctgaaaacgccttaagtggaggccagtctagtctatttatacatgctggtgctcctactgtttctagtgaaaactttatcttgcctaaaggagctgctgttaatggaccagtttcacactcctccttaactaagacttccaatatgaataaaggcagtgtttcattaaccactggacagcctgtggatcagccaacaacagaatcttgttcaactttgaaggtagcagctgatcttcagctgtctacaccacagaaagcaagtcaacaccaagttttatttttgttatcagatgtagcacatgctaagaatcccacccattccaataaaaaactacctacctctgcttcagttggttgtgacattcagaattcagtagggagtaatataaagtcagatggcactttaataaatcaagtagaggtgggtgaggatggtgaagatttattggtgaaagatgattgtgtcaatacagtaacgggaatttcctcaggtacagatggatttaggtcagaaaatgatacaaactgggatccccaaaaagagttcattcaatttcttatgactaatgaggaaacagtagataaagctccacctcattctaaaataggtctagaaaaaaaaaagaaagcgaaaaatggatgtaagcaagataactcgttataccgaggattgctttagtgattctaattgtgtacccaataaatcaaaaatgcaagaagtagactttctagaacaaaatgaagagctacaagcagtagactcacagaaatatgcattatcaaaagtgaagcctgaatcaactgatgaagacttagaatctgtggatgccttccaacatctaatttataacccagataagtgtggagaagagagttcacctgttcatactagcacttttctttcaaataccttaaaaaagaaatgtgaagagagtgattctgagtcacctgctactttcagtaccgaagagccatcattctacccctgtacaaagtgcaatgtgaattttagggagaagaagcacctccacaggcatatgatgtatcatttagatgggaatagtcactttcgccatcttaatgtcccaaggccatatgcttgtagagaatgtggacggacatttcgagatcgcaattcacttctaaaacatatgattattcaccaggagagaagacagaagttgatggaggaaattcgtgaattgaaagaacttcaggatgaaggaagaagtgcacgattacagtgtcctcagtgtgtgtttggtaccaattgccctaaaacatttgtgcaacatgctaaaacccatgaaaaagataaaaggtactactgctgtgaagagtgtaacttcatggcagtgacagaaaatgaattggaatgccatcgaggcattgcacatggggcagtggtaaaatgccctatggtcacttctgatattgcccagagaaaaacacaaaaaaagactttcatgaaagactctgtagtaggatcatccaaaaaatcagctacctacatatgtaagatgtgtccttttactacttcagccaaaagtgttttaaaaaagcacacggagtacttgcattcatcatcatgtgttgattcatttggtagtcctcttggacttgataaaagaaaaaatgacatccttgaagaacctgtagatagtgatagcactaaaacattaactaaacaacagtcaaccacatttccaaagaactctgctttaaaacaagatgtgaagcgaacatttggatcaacctcacaatcaagtagtttttcaaaaattcataagcggccacacagaatacagaaagctcggaaaagcattgcccaatcaggtgtaaacatgtgcaatcaaaacagctctcctcataagaatgttacaattaaaagcagcgttgaccaaaaacctaagtatttccatcaagcagcaaaagaaaagtctaatgccaaggcaaatagccactatttgtatagacacaaatatgaaaactataggatgatcaaaaaatcaggtgaatcatatcctgtgcatttcaaaaaagaagaagctagttcattaaattctttacacctgttttcatcatcaagtaattctcacaacaattttatttcagaccctcataagcctgacgccaaaaggcctgaaagcttcaaagatcacagacgtgtagctgtaaagagagtaattaaggaatctaagaaggaaagttctgttggaggggaagacttggatagctatccagattttttgcataaaatgactgttgtcgttttgcaaaaacttaattctgctgaaaagaaagatagttatgaaacagaagatgaaagttcctgggataatgttgagttaggagactacactacacaggccatagaagatgaaacctatagtgatattaatcaagagcatgtaaatttattccctttatttaagagcaaagtggaaggtcaggagcctggagaaaatgctactcttagttatgaccaaaacgatggcttttattttgaatactatgaagatactggaagtaacaactttttgcatgagatacatgatcctcagcatttagaaactgcagatgcttcattgtcaaagcatagttctgtttttcattggactgatttgtctcttgagaagaaatcgtgtccttactgcccagcaacatttgaaacaggtgttgggttatcaaatcatgtcagggggcatcttcacagagcaggattaagctatgaagcccgtcatgttgtatcaccagaacaaatagccacaagtgacaaaatgcagcatttcaaaagaactggcacaggaacacctgttaaacgagttagaaaagctatagagaagtctgaaaccacttctgaacacacttgtcagctctgtggtggttggtttgatactaaaattggattatcaaatcatgttagaggccacttgaaaagacttggaaagacgaaatgggatgctcacaaatctccaatctgtgttctgaatgagatgatgcaaaatgaagaaaaatatgaaaaaatcttaaaggcattgaacagtcgtcgtattattcccagaccatttgtagctcaaaaacttgcatcaagtgatgactttatatctcaaaatgttatacctcttgaagcataccgtaatggcctaaagactgaagctctgtcagtgtctgcatcagaagaagaagggctgaatttcttaaatgaatatgatgaaacaaaaccagaactgcccagtgggaaaaagaatcagtctcttacactcatagaacttcttaaaaataaaaggatgggagaagaaaggaattctgctatttctcctcaaaagatccataatcagacagcaagaaagagattcgttcagaaatgcgttcttccattaaatgaggatagtccgttgatgtatcagccacaaaaaatggacttgactatgcactcagccttagattgtaagcaaaagaaatcaaggtcaagatctggaagcaagaagaaaatgctaacattacctcatggtgctgacgaggtttacattctccgatgcaggttttgtggcctagtctttcgaggacccttgtctgttcaggaagactggattaagcacttacaacgacatattgtaaacgctaatcttccacggactggagctggcatggtggaagtcacgtcactacttaaaaagcctgcctccattacagaaacttcattttctctactaatggccgaagcagcttcatagaaccaggaaaccttttaaatagccagtttgaattggatgtaaatttgaaattctttttttttaagccacattaaattatctgtttataaatactaaagcaggaaaatggggggaaagtgaattacagtgacatcagagcaaattgaatacttaaaacagtaagtagtctatatattttatatagggtggaagatgtgtttttaaggtttatgaagttttgttggttaactgtgttcactcagtaaaagagcagtacatgtaagcagccattaataaactgttgcacatggatacttatagacagacttattggacaattatgttttttgcagtgttaccagaatcaaggctctgtttattccccacaagacttgcatagaaaaataagatattatattttgtttgtatgtatttagtgttttgtataataccaagaaccgctgactaaatttactcaaattagggcattaaatatcatgtacttcatagtttgagactgttcactcaaatagggcagagtactattctatctagatgtgtaagtgttttttttaaaatcacatggaacggttttttttatactaaaaagtggagggagatttgtttaaacaagtatttctaaaagaaatatgtacatagttctggaaattatttgtggtaaggaaatattctttactccagttgcatttctcagacaataaagtggtgcatccatgctacctcctactttgtcaacaaagatgctatttaccctttacatttttgtatcataatagattttaaaaatctaatgttctttattgcaagacattcttttgttaacaggtttgtttctttttaatgttttacctaaaatttgacatgcttacaggacaggtttgcctcttactttatttaacattgtagaaatgtaattaataaacaatgctcactacacagtttagaatagacgttctcatttatattatcttccaaatttgatcagttagcaaaacttaatacaccaattaaaatatttctacatatgagaatgtttacaatttaaattttagaacttgttttggatgtgattatatgtacgaaaatcgtgtaacactatgctcatgctaagaaccgacataacagaattactgaaataaatgtgctgtgaggaatggaaaatatggtgcaggtgtcttggtcatgataaattgtgattctttttaaaaattttttccaaaaacaattaggtattttaatctgaaatcagattcctttacaaacaacaagtttttgtatgcaagcaccattttatttcatgtagtatggctaatactatagttgaaccaaggatatgcattgattctttgcttcgtatgtaaataaagttaaaaacagttaaaataaggagtattttggtagagtatatacatacctcactgccagtgaaattgctttcctatggtatatctccttaccagaaaaatctctaaataaaaaaaggtttaaagaaaattaaaatgtg

SEQ ID NO: 38939 - DNA, 5499 bp, Homo sapiens
cgcacgatatgacacagcaagttctctgtataccggttgtacaggcaatcaggaactaaatgtgttaaatgggcttgccaacaatatggatgatttgaagataaacaccgatattactggtgctaaagaagaactcctagatgacaacaattttatctcagacaaagagagcggagttcataagccaaaagattgtcaaacatcatttcagaaaaataatacgttgactctgcctgaagaactgtcaaaggacaaatctgaaaacgccttaagtggaggccagtctagtctatttatacatgctggtgctcctactgtttctagtgaaaactttatcttgcctaaaggagctgctgttaatggaccagtttcacactcctccttaactaagacttccaatatgaataaaggcagtgtttcattaaccactggacagcctgtggatcagccaacaacagaatcttgttcaactttgaaggtagcagctgatcttcagctgtctacaccacagaaagcaagtcaacaccaagttttatttttgttatcagatgtagcacatgctaagaatcccacccattccaataaaaaactacctacctctgcttcagttggttgtgacattcagaattcagtagggagtaatataaagtcagatggcactttaataaatcaagtagaggtgggtgaggatggtgaagatttattggtgaaagatgattgtgtcaatacagtaacgggaatttcctcaggtacagatggatttaggtcagaaaatgatacaaactgggatccccaaaaagagttcattcaatttcttatgactaatgaggaaacagtagataaagctccacctcattctaaaataggtctagaaaaaaaaaagaaagcgaaaaatggatgtaagcaagataactcgttataccgaggattgctttagtgattctaattgtgtacccaataaatcaaaaatgcaagaagtagactttctagaacaaaatgaagagctacaagcagtagactcacagaaatatgcattatcaaaagtgaagcctgaatcaactgatgaagacttagaatctgtggatgccttccaacatctaatttataacccagataagtgtggagaagagagttcacctgttcatactagcacttttctttcaaataccttaaaaaagaaatgtgaagagagtgattctgagtcacctgctactttcagtaccgaagagccatcattctacccctgtacaaagtgcaatgtgaattttagggagaagaagcacctccacaggcatatgatgtatcatttagatgggaatagtcactttcgccatcttaatgtcccaaggccatatgcttgtagagaatgtggacggacatttcgagatcgcaattcacttctaaaacatatgattattcaccaggagagaagacagaagttgatggaggaaattcgtgaattgaaagaacttcaggatgaaggaagaagtgcacgattacagtgtcctcagtgtgtgtttggtaccaattgccctaaaacatttgtgcaacatgctaaaacccatgaaaaagataaaaggtactactgctgtgaagagtgtaacttcatggcagtgacagaaaatgaattggaatgccatcgaggcattgcacatggggcagtggtaaaatgccctatggtcacttctgatattgcccagagaaaaacacaaaaaaagactttcatgaaagactctgtagtaggatcatccaaaaaatcagctacctacatatgtaagatgtgtccttttactacttcagccaaaagtgttttaaaaaagcacacggagtacttgcattcatcatcatgtgttgattcatttggtagtcctcttggacttgataaaagaaaaaatgacatccttgaagaacctgtagatagtgatagcactaaaacattaactaaacaacagtcaaccacatttccaaagaactctgctttaaaacaagatgtgaagcgaacatttggatcaacctcacaatcaagtagtttttcaaaaattcataagcggccacacagaatacagaaagctcggaaaagcattgcccaatcaggtgtaaacatgtgcaatcaaaacagctctcctcataagaatgttacaattaaaagcagcgttgaccaaaaacctaagtatttccatcaagcagcaaaagaaaagtctaatgccaaggcaaatagccactatttgtatagacacaaatatgaaaactataggatgatcaaaaaatcaggtgaatcatatcctgtgcatttcaaaaaagaagaagctagttcattaaattctttacacctgttttcatcatcaagtaattctcacaacaattttatttcagaccctcataagcctgacgccaaaaggcctgaaagcttcaaagatcacagacgtgtagctgtaaagagagtaattaaggaatctaagaaggaaagttctgttggaggggaagacttggatagctatccagattttttgcataaaatgactgttgtcgttttgcaaaaacttaattctgctgaaaagaaagatagttatgaaacagaagatgaaagttcctgggataatgttgagttaggagactacactacacaggccatagaagatgaaacctatagtgatattaatcaagagcatgtaaatttattccctttatttaagagcaaagtggaaggtcaggagcctggagaaaatgctactcttagttatgaccaaaacgatggcttttattttgaatactatgaagatactggaagtaacaactttttgcatgagatacatgatcctcagcatttagaaactgcagatgcttcattgtcaaagcatagttctgtttttcattggactgatttgtctcttgagaagaaatcgtgtccttactgcccagcaacatttgaaacaggtgttgggttatcaaatcatgtcagggggcatcttcacagagcaggattaagctatgaagcccgtcatgttgtatcaccagaacaaatagccacaagtgacaaaatgcagcatttcaaaagaactggcacaggaacacctgttaaacgagttagaaaagctatagagaagtctgaaaccacttctgaacacacttgtcagctctgtggtggttggtttgatactaaaattggattatcaaatcatgttagaggccacttgaaaagacttggaaagacgaaatgggatgctcacaaatctccaatctgtgttctgaatgagatgatgcaaaatgaagaaaaatatgaaaaaatcttaaaggcattgaacagtcgtcgtattattcccagaccatttgtagctcaaaaacttgcatcaagtgatgactttatatctcaaaatgttatacctcttgaagcataccgtaatggcctaaagactgaagctctgtcagtgtctgcatcagaagaagaagggctgaatttcttaaatgaatatgatgaaacaaaaccagaactgcccagtgggaaaaagaatcagtctcttacactcatagaacttcttaaaaataaaaggatgggagaagaaaggaattctgctatttctcctcaaaagatccataatcagacagcaagaaagagattcgttcagaaatgcgttcttccattaaatgaggatagtccgttgatgtatcagccacaaaaaatggacttgactatgcactcagccttagattgtaagcaaaagaaatcaaggtcaagatctggaagcaagaagaaaatgctaacattacctcatggtgctgacgaggtttacattctccgatgcaggttttgtggcctagtctttcgaggacccttgtctgttcaggaagactggattaagcacttacaacgacatattgtaaacgctaatcttccacggactggagctggcatggtggaagtcacgtcactacttaaaaagcctgcctccattacagaaacttcattttctctactaatggccgaagcagcttcatagaaccaggaaaccttttaaatagccagtttgaattggatgtaaatttgaaattctttttttttaagccacattaaattatctgtttataaatactaaagcaggaaaatggggggaaagtgaattacagtgacatcagagcaaattgaatacttaaaacagtaagtagtctatatattttatatagggtggaagatgtgtttttaaggtttatgaagttttgttggttaactgtgttcactcagtaaaagagcagtacatgtaagcagccattaataaactgttgcacatggatacttatagacagacttattggacaattatgttttttgcagtgttaccagaatcaaggctctgtttattccccacaagacttgcatagaaaaataagatattatattttgtttgtatgtatttagtgttttgtataataccaagaaccgctgactaaatttactcaaattagggcattaaatatcatgtacttcatagtttgagactgttcactcaaatagggcagagtactattctatctagatgtgtaagtgttttttttaaaatcacatggaacggttttttttatactaaaaagtggagggagatttgtttaaacaagtatttctaaaagaaatatgtacatagttctggaaattatttgtggtaaggaaatattctttactccagttgcatttctcagacaataaagtggtgcatccatgctacctcctactttgtcaacaaagatgctatttaccctttacatttttgtatcataatagattttaaaaatctaatgttctttattgcaagacattcttttgttaacaggtttgtttctttttaatgttttacctaaaatttgacatgcttacaggacaggtttgcctcttactttatttaacattgtagaaatgtaattaataaacaatgctcactacacagtttagaatagacgttctcatttatattatcttccaaatttgatcagttagcaaaacttaatacaccaattaaaatatttctacatatgagaatgtttacaatttaaattttagaacttgttttggatgtgattatatgtacgaaaatcgtgtaacactatgctcatgctaagaaccgacataacagaattactgaaataaatgtgctgtgaggaatggaaaatatggtgcaggtgtcttggtcatgataaattgtgattctttttaaaaattttttccaaaaacaattaggtattttaatctgaaatcagattcctttacaaacaacaagtttttgtatgcaagcaccattttatttcatgtagtatggctaatactatagttgaaccaaggatatgcattgattctttgcttcgtatgtaaataaagttaaaaacagttaaaataaggagtattttggtagagtatatacatacctcactgccagtgaaattgctttcctatggtatatctccttaccagaaaaatctctaaataaaaaaaggtttaaagaaaattaaaatgtg

SEQ ID NO: 38940 - DNA, 2144 bp, Homo sapiens
gagaacagtggtgcactgtttccgctgccctcgtttgtctaattggcccagacgctccaccagcgcgaagcttcccgggagctcctcgctggccacccccgcggcccgcagcccggcagaggcgggaaagcagcgcgcctgcgccgtgggaaccggggctggaggcgaaaagcggggagcggaggggggccgctggagccgagtagcgtacagagcggcgtgtgacgcggggacgccgcgtgctcccaacgtcgccccggtttgacgcacacggcaccaaactgtttgatttaattttggatgagatcgttcttgcagcaagatgttaataagacaaaatctagccttagattgtaagcaaaagaaatcaaggtcaagatctggaagcaagaagaaaatgctaacattacctcatggtgctgacgaggtttacattctccgatgcaggttttgtggcctagtctttcgaggacccttgtctgttcaggaagactggattaagcacttacaacgacatattgtaaacgctaatcttccacggactggagctggcatggtggaagtcacgtcactacttaaaaagcctgcctccattacagaaacttcattttctctactaatggccgaagcagcttcatagaaccaggaaaccttttaaatagccagtttgaattggatgtaaatttgaaattctttttttttaagccacattaaattatctgtttataaatactaaagcaggaaaatggggggaaagtgaattacagtgacatcagagcaaattgaatacttaaaacagtaagtagtctatatattttatatagggtggaagatgtgtttttaaggtttatgaagttttgttggttaactgtgttcactcagtaaaagagcagtacatgtaagcagccattaataaactgttgcacatggatacttatagacagacttattggacaattatgttttttgcagtgttaccagaatcaaggctctgtttattccccacaagacttgcatagaaaaataagatattatattttgtttgtatgtatttagtgttttgtataataccaagaaccgctgactaaatttactcaaattagggcattaaatatcatgtacttcatagtttgagactgttcactcaaatagggcagagtactattctatctagatgtgtaagtgttttttttaaaatcacatggaacggttttttttatactaaaaagtggagggagatttgtttaaacaagtatttctaaaagaaatatgtacatagttctggaaattatttgtggtaaggaaatattctttactccagttgcatttctcagacaataaagtggtgcatccatgctacctcctactttgtcaacaaagatgctatttaccctttacatttttgtatcataatagattttaaaaatctaatgttctttattgcaagacattcttttgttaacaggtttgtttctttttaatgttttacctaaaatttgacatgcttacaggacaggtttgcctcttactttatttaacattgtagaaatgtaattaataaacaatgctcactacacagtttagaatagacgttctcatttatattatcttccaaatttgatcagttagcaaaacttaatacaccaattaaaatatttctacatatgagaatgtttacaatttaaattttagaacttgttttggatgtgattatatgtacgaaaatcgtgtaacactatgctcatgctaagaaccgacataacagaattactgaaataaatgtgctgtgaggaatggaaaatatggtgcaggtgtcttggtcatgataaattgtgattctttttaaaaattttttccaaaaacaattaggtattttaatctgaaatcagattcctttacaaacaacaagtttttgtatgcaagcaccattttatttcatgtagtatggctaatactatagttgaaccaaggatatgcattgattctttgcttcgtatgtaaataaagttaaaaacagttaaaataaggagtattttggtagagtatatacatacctcactgccagtgaaattgctttcctatggtatatctccttaccagaaaaatctctaaataaaaaaaggtttaaagaaaattaaaatgtg

SEQ ID NO: 38941 - DNA, 2205 bp, Homo sapiens
gagaacagtggtgcactgtttccgctgccctcgtttgtctaattggcccagacgctccaccagcgcgaagcttcccgggagctcctcgctggccacccccgcggcccgcagcccggcagaggcgggaaagcagcgcgcctgcgccgtgggaaccggggctggaggcgaaaagcggggagcggaggggggccgctggagccgagtagcgtacagagcggcgtgtgacgcggggacgccgcgtgctcccaacgtcgccccggtttgacgcacacggcaccaaactgtttgatttaattttggatgagatcgttcttgcagcaagatgttaataagacaaaatctaggttattctggagcaaacccagacatatttgttatttattgatctccacctcatccccattgccttagattgtaagcaaaagaaatcaaggtcaagatctggaagcaagaagaaaatgctaacattacctcatggtgctgacgaggtttacattctccgatgcaggttttgtggcctagtctttcgaggacccttgtctgttcaggaagactggattaagcacttacaacgacatattgtaaacgctaatcttccacggactggagctggcatggtggaagtcacgtcactacttaaaaagcctgcctccattacagaaacttcattttctctactaatggccgaagcagcttcatagaaccaggaaaccttttaaatagccagtttgaattggatgtaaatttgaaattctttttttttaagccacattaaattatctgtttataaatactaaagcaggaaaatggggggaaagtgaattacagtgacatcagagcaaattgaatacttaaaacagtaagtagtctatatattttatatagggtggaagatgtgtttttaaggtttatgaagttttgttggttaactgtgttcactcagtaaaagagcagtacatgtaagcagccattaataaactgttgcacatggatacttatagacagacttattggacaattatgttttttgcagtgttaccagaatcaaggctctgtttattccccacaagacttgcatagaaaaataagatattatattttgtttgtatgtatttagtgttttgtataataccaagaaccgctgactaaatttactcaaattagggcattaaatatcatgtacttcatagtttgagactgttcactcaaatagggcagagtactattctatctagatgtgtaagtgttttttttaaaatcacatggaacggttttttttatactaaaaagtggagggagatttgtttaaacaagtatttctaaaagaaatatgtacatagttctggaaattatttgtggtaaggaaatattctttactccagttgcatttctcagacaataaagtggtgcatccatgctacctcctactttgtcaacaaagatgctatttaccctttacatttttgtatcataatagattttaaaaatctaatgttctttattgcaagacattcttttgttaacaggtttgtttctttttaatgttttacctaaaatttgacatgcttacaggacaggtttgcctcttactttatttaacattgtagaaatgtaattaataaacaatgctcactacacagtttagaatagacgttctcatttatattatcttccaaatttgatcagttagcaaaacttaatacaccaattaaaatatttctacatatgagaatgtttacaatttaaattttagaacttgttttggatgtgattatatgtacgaaaatcgtgtaacactatgctcatgctaagaaccgacataacagaattactgaaataaatgtgctgtgaggaatggaaaatatggtgcaggtgtcttggtcatgataaattgtgattctttttaaaaattttttccaaaaacaattaggtattttaatctgaaatcagattcctttacaaacaacaagtttttgtatgcaagcaccattttatttcatgtagtatggctaatactatagttgaaccaaggatatgcattgattctttgcttcgtatgtaaataaagttaaaaacagttaaaataaggagtattttggtagagtatatacatacctcactgccagtgaaattgctttcctatggtatatctccttaccagaaaaatctctaaataaaaaaaggtttaaagaaaattaaaatgtg

SEQ ID NO: 38942 - DNA, 1384 bp, Homo sapiens
gagaacagtggtgcactgtttccgctgccctcgtttgtctaattggcccagacgctccaccagcgcgaagcttcccgggagctcctcgctggccacccccgcggcccgcagcccggcagaggcgggaaagcagcgcgcctgcgccgtgggaaccggggctggaggcgaaaagcggggagcggaggggggccgctggagccgagtagcgtacagagcggcgtgtgacgcggggacgccgcgtgctcccaacgtcgccccggtttgacgcacacggcaccaaactgtctgattctctggcctttgtgtccctgggaagttactctgccagaggaaagcaggtgtgctccacttctcccgtgaacctgaagatgagttgtcccagactcttctcagtgattggaaacttaggtggtggagctaaaggttacttgttacgagacttctacagacaactcttgttgggatccatctatggtttagcaacattagtggaaaagttttcttgaatattgactttgaatataaaaacgtttatatttagacttcagattttgtgtgatcatcaaactcaacgaggggataaacataattgggggcgaatgatggtcttgtcttgttaataatttcaacagaagtatcacaacaccgccgactatcctgtccagtcctgactaattccacgcttgttgcatctggatggtagatttgttttaattgtgtattccctccctgcagtagtttgctttagttgtaaacattttttggtcccatgagaaggaaaacatttcaaaaaatagacaactaaagtttctcaaagaaaggaaacctggctgtttgccttcagttgcatgtgtttgatttaattttggatgagatcgttcttgcagcaagatgttaataagacaaaatctaggttattctggagcaaacccagacatatttgttatttattgatctccacctcatccccattggtaatttttttctagttttttttttttattatggtaaactatatgtaacatgaaatttgccattttaaccatttttaagtgtacagttgagtgttcctatatacatttataatgtgcactcatcaccaccatccatcttcataactttttgtcttgcgaaactgaaactctgtacccattaaacaacaattcctccgtttctcctgctcctgaggtcctggaaatcaccatttttctctctttgaatttgactaagtgtctcataagcagaatcatatagtgtttgtctttttgtgactggcttatttcacaagtgtgatgttttcacggttcattcatgttacagcattttgcagaatttcctcccattttaagtctgcataatactgtattgtatgtatgtaacacat

SEQ ID NO: 38943 - DNA, 380 bp, Homo sapiens
ggctgctcggttgtggccagaaacgctggctctggcattaactgtctacacccctccccttacttgggacaggaccgcatagccctcccctccccccgtcctgcaagatcttatgcggctaggtgcctgggaagtaacagcaagaggtaaatcgctcgaagtgtttgggttgccaggggcttggtgggtgtccagctaaagctttttgcctctccaggtctgattctctggcctttgtgtccctgggaagttactctgccagaggaaagcaggtgtgctccacttctcccgtgaacctgaagatgagttgtcccagactcttctcagtgattggaaacttaggtggtggagctaaaggttacttgttacgagacttctac

SEQ ID NO: 38944 - DNA, 865 bp, Homo sapiens
aagcttgcggccgcggcggtcgctgggggccacggagcctgaggtctgattctctggcctttgtgtccctgggaagttactctgccagaggaaagcaggtgtgctccacttctcccgtgaacctgaagatgagttgtcccagactcttctcagtgattggaaacttaggtggtggagctaaaggttacttgttacgagacttctacagacaactcttgttgggatccatctatggtttagcaacattagtggaaaagttttcttgaatattgactttgaatataaaaacgtttatatttagacttcagattttgtgtgatcatcaaactcaacgaggggataaacataattgggggcgaatgatggtcttgtcttgttaataatttcaacagaagtatcacaacaccgccgactatcctgtccagtcctgactaattccacgcttgttgcatctggatggtagatttgttttaattgtgtattccctccctgcagtagtttgctttagttgtaaacattttttggtcccatgagaaggaaaacatttcaaaaaatagacaactaaagtttctcaaagaaaggaaacctggctgtttgccttcagttgcatgtgtaagtatctagggaacttgatggcagtaatattgcattttggtaggcttgctaagaaaaacctcgtttttataataaggctataatctagcttagacattttaattggtgaagcataaagcttgattagtattaatgcagtggtatgtattgcttttaaaagtcttacaatttctaacaaattaaagttatactgcaattatatcatactttgtgttggtattaactcatgaagtacaaaattttgaaacac

SEQ ID NO: 38945 - DNA, 5707 bp, Homo sapiens
gcaatgcactgagtaacggggcgggccgagagcagtcaccaacccctctcgttgaggctgctcggttgtggccagaaacgctggctctggcattaactgtctacacccctccccttacttgggacaggaccgcatagccctcccctccccccgtcctgcaagatcttatgcggctaggtgcctgggaagtaacagcaagaggtttgatttaattttggatgagatcgttcttgcagcaagatgttaataagacaaaatctagactaaatgtgttaaatgggcttgccaacaatatggatgatttgaagataaacaccgatattactggtgctaaagaagaactcctagatgacaacaattttatctcagacaaagagagcggagttcataagccaaaagattgtcaaacatcatttcagaaaaataatacgttgactctgcctgaagaactgtcaaaggacaaatctgaaaacgccttaagtggaggccagtctagtctatttatacatgctggtgctcctactgtttctagtgaaaactttatcttgcctaaaggagctgctgttaatggaccagtttcacactcctccttaactaagacttccaatatgaataaaggcagtgtttcattaaccactggacagcctgtggatcagccaacaacagaatcttgttcaactttgaaggtagcagctgatcttcagctgtctacaccacagaaagcaagtcaacaccaagttttatttttgttatcagatgtagcacatgctaagaatcccacccattccaataaaaaactacctacctctgcttcagttggttgtgacattcagaattcagtagggagtaatataaagtcagatggcactttaataaatcaagtagaggtgggtgaggatggtgaagatttattggtgaaagatgattgtgtcaatacagtaacgggaatttcctcaggtacagatggatttaggtcagaaaatgatacaaactgggatccccaaaaagagttcattcaatttcttatgactaatgaggaaacagtagataaagctccacctcattctaaaataggtctagaaaaaaaaaagaaagcgaaaaatggatgtaagcaagataactcgttataccgaggattgctttagtgattctaattgtgtacccaataaatcaaaaatgcaagaagtagactttctagaacaaaatgaagagctacaagcagtagactcacagaaatatgcattatcaaaagtgaagcctgaatcaactgatgaagacttagaatctgtggatgccttccaacatctaatttataacccagataagtgtggagaagagagttcacctgttcatactagcacttttctttcaaataccttaaaaaagaaatgtgaagagagtgattctgagtcacctgctactttcagtaccgaagagccatcattctacccctgtacaaagtgcaatgtgaattttagggagaagaagcacctccacaggcatatgatgtatcatttagatgggaatagtcactttcgccatcttaatgtcccaaggccatatgcttgtagagaatgtggacggacatttcgagatcgcaattcacttctaaaacatatgattattcaccaggagagaagacagaagttgatggaggaaattcgtgaattgaaagaacttcaggatgaaggaagaagtgcacgattacagtgtcctcagtgtgtgtttggtaccaattgccctaaaacatttgtgcaacatgctaaaacccatgaaaaagataaaaggtactactgctgtgaagagtgtaacttcatggcagtgacagaaaatgaattggaatgccatcgaggcattgcacatggggcagtggtaaaatgccctatggtcacttctgatattgcccagagaaaaacacaaaaaaagactttcatgaaagactctgtagtaggatcatccaaaaaatcagctacctacatatgtaagatgtgtccttttactacttcagccaaaagtgttttaaaaaagcacacggagtacttgcattcatcatcatgtgttgattcatttggtagtcctcttggacttgataaaagaaaaaatgacatccttgaagaacctgtagatagtgatagcactaaaacattaactaaacaacagtcaaccacatttccaaagaactctgctttaaaacaagatgtgaagcgaacatttggatcaacctcacaatcaagtagtttttcaaaaattcataagcggccacacagaatacagaaagctcggaaaagcattgcccaatcaggtgtaaacatgtgcaatcaaaacagctctcctcataagaatgttacaattaaaagcagcgttgaccaaaaacctaagtatttccatcaagcagcaaaagaaaagtctaatgccaaggcaaatagccactatttgtatagacacaaatatgaaaactataggatgatcaaaaaatcaggtgaatcatatcctgtgcatttcaaaaaagaagaagctagttcattaaattctttacacctgttttcatcatcaagtaattctcacaacaattttatttcagaccctcataagcctgacgccaaaaggcctgaaagcttcaaagatcacagacgtgtagctgtaaagagagtaattaaggaatctaagaaggaaagttctgttggaggggaagacttggatagctatccagattttttgcataaaatgactgttgtcgttttgcaaaaacttaattctgctgaaaagaaagatagttatgaaacagaagatgaaagttcctgggataatgttgagttaggagactacactacacaggccatagaagatgaaacctatagtgatattaatcaagagcatgtaaatttattccctttatttaagagcaaagtggaaggtcaggagcctggagaaaatgctactcttagttatgaccaaaacgatggcttttattttgaatactatgaagatactggaagtaacaactttttgcatgagatacatgatcctcagcatttagaaactgcagatgcttcattgtcaaagcatagttctgtttttcattggactgatttgtctcttgagaagaaatcgtgtccttactgcccagcaacatttgaaacaggtgttgggttatcaaatcatgtcagggggcatcttcacagagcaggattaagctatgaagcccgtcatgttgtatcaccagaacaaatagccacaagtgacaaaatgcagcatttcaaaagaactggcacaggaacacctgttaaacgagttagaaaagctatagagaagtctgaaaccacttctgaacacacttgtcagctctgtggtggttggtttgatactaaaattggattatcaaatcatgttagaggccacttgaaaagacttggaaagacgaaatgggatgctcacaaatctccaatctgtgttctgaatgagatgatgcaaaatgaagaaaaatatgaaaaaatcttaaaggcattgaacagtcgtcgtattattcccagaccatttgtagctcaaaaacttgcatcaagtgatgactttatatctcaaaatgttatacctcttgaagcataccgtaatggcctaaagactgaagctctgtcagtgtctgcatcagaagaagaagggctgaatttcttaaatgaatatgatgaaacaaaaccagaactgcccagtgggaaaaagaatcagtctcttacactcatagaacttcttaaaaataaaaggatgggagaagaaaggaattctgctatttctcctcaaaagatccataatcagacagcaagaaagagattcgttcagaaatgcgttcttccattaaatgaggatagtccgttgatgtatcagccacaaaaaatggacttgactatgcactcagccttagattgtaagcaaaagaaatcaaggtcaagatctggaagcaagaagaaaatgctaacattacctcatggtgctgacgaggtttacattctccgatgcaggttttgtggcctagtctttcgaggacccttgtctgttcaggaagactggattaagcacttacaacgacatattgtaaacgctaatcttccacggactggagctggcatggtggaagtcacgtcactacttaaaaagcctgcctccattacagaaacttcattttctctactaatggccgaagcagcttcatagaaccaggaaaccttttaaatagccagtttgaattggatgtaaatttgaaattctttttttttaagccacattaaattatctgtttataaatactaaagcaggaaaatggggggaaagtgaattacagtgacatcagagcaaattgaatacttaaaacagtaagtagtctatatattttatatagggtggaagatgtgtttttaaggtttatgaagttttgttggttaactgtgttcactcagtaaaagagcagtacatgtaagcagccattaataaactgttgcacatggatacttatagacagacttattggacaattatgttttttgcagtgttaccagaatcaaggctctgtttattccccacaagacttgcatagaaaaataagatattatattttgtttgtatgtatttagtgttttgtataataccaagaaccgctgactaaatttactcaaattagggcattaaatatcatgtacttcatagtttgagactgttcactcaaatagggcagagtactattctatctagatgtgtaagtgttttttttaaaatcacatggaacggttttttttatactaaaaagtggagggagatttgtttaaacaagtatttctaaaagaaatatgtacatagttctggaaattatttgtggtaaggaaatattctttactccagttgcatttctcagacaataaagtggtgcatccatgctacctcctactttgtcaacaaagatgctatttaccctttacatttttgtatcataatagattttaaaaatctaatgttctttattgcaagacattcttttgttaacaggtttgtttctttttaatgttttacctaaaatttgacatgcttacaggacaggtttgcctcttactttatttaacattgtagaaatgtaattaataaacaatgctcactacacagtttagaatagacgttctcatttatattatcttccaaatttgatcagttagcaaaacttaatacaccaattaaaatatttctacatatgagaatgtttacaatttaaattttagaacttgttttggatgtgattatatgtacgaaaatcgtgtaacactatgctcatgctaagaaccgacataacagaattactgaaataaatgtgctgtgaggaatggaaaatatggtgcaggtgtcttggtcatgataaattgtgattctttttaaaaattttttccaaaaacaattaggtattttaatctgaaatcagattcctttacaaacaacaagtttttgtatgcaagcaccattttatttcatgtagtatggctaatactatagttgaaccaaggatatgcattgattctttgcttcgtatgtaaataaagttaaaaacagttaaaataaggagtattttggtagagtatatacatacctcactgccagtgaaattgctttcctatggtatatctccttaccagaaaaatctctaaataaaaaaaggtttaaagaaaattaaaatgtg

SEQ ID NO: 38946 - DNA, 996 bp, Homo sapiens
tgtggagagtgagtgagaggagagtgtgttcttacatgcacgtgttcaggctgatggcatgggactgtgacccgtccagtcacacagggtctcaaactccaaggagccccacacctggtttaatgctctgctgttgccctcttgctgatgcccttcttatttttttagagacagggtcttgctctgtcgcccaggctggagtgcagtggcacaatcatcattcactgtagcctcgaactcctgggctcaagtgatcctccccgtttctccccagccccggaagtagctcccaccatacccagctaattttaaaactttttgagagaccaagctggtctcaaattcctgggctccactgggtgcagtggctcatgcctgtaatcccagcactttaggaggccaaggtgggcagatcacctgaggtcaggagttcgagaccagcctggcaaacatggtgaaaccccgtctctactaaaaatacaaaaattagctgggtgtggtggcaagcgcctgtaatcccagctactcaggaggctgaggcacgagaatcgcttaaacccaggaggcggaggttgcagtgagccaagattacactactgcactccagcctgggcaacagagtgagactctatctcaaaaacaaaacaaaacaaacaacaaaaaatgggctggaggagcgggttgtaggcccttccgcctctggtgggtggggagaagcaggggagctggtgttcagctatattctacaaagaaggggtggatcctgagaggcaagggtgggactgaggcctagttacaggtggtcgggaaggaggttgaaggggaactgtgtgaccttggatgttctttgtaattatcttatgcttagctgacacatctgtaaaatggagatagcagcacccacttctttgagttgtgagaagtaaatgcatgtgaaatgtttagcgtgtgccgggcaccaagttaagagcccagtaaatgttggctgttaaaaaa

SEQ ID NO: 38947 - DNA, 627 bp, Homo sapiens
ttcggcacccaggtcggttcgccgccgggactgctgacggggagggctaggtagccctgggagtcgggatctagaaggtagaggagaagcggggctgtctgacccccggaggtgacaaggggagaggggctgtgtgaataccctccatgggcagtaatgggatgactatccccagggagcattgcgaaggagagaggcggctgagggactgcactttctggggccccccgggagagtcagagggcaacagagtgagactctatctcaaaaacaaaacaaaacaaacaacaaaaaatgggctggaggagcgggttgtaggcccttccgcctctggtgggtggggagaagcaggggagctggtgttcagctatattctacaaagaaggggtggatcctgagaggcaagggtgggactgaggcctagttacaggtggtcgggaaggaggttgaaggggaactgtgtgaccttggatgttctttgtaattatcttatgcttagctgacacatctgtaaaatggagatagcagcacccacttctttgagttgtgagaagtaaatgcatgtgaaatgtttagcgtgtgccgggcaccaagttaagagcccagtaaatgttggctgttaaaaaa

SEQ ID NO: 38948 - DNA, 972 bp, Homo sapiens
cagtcgcgtgtgcttaagagtgtgggcttcagtcgcgtgtgctctgcgcaagaaccgccggcgggtgtttgggctgcttgagcggccagtgctgctgccgcctgtgtccattgacactgccagctacaagatctttgtgtccgggaagagtggtgtgggcaagacggcgctggtggccaagctggctggcctggaggtgcctgtggtgcaccacgggaccaccggcttgcatggagaacacagatgccttcctcttcctcttctccttcactgaccgtgcctcctttgaagacctccctggacagctggcccgcatagcaggtgaggcccctggtgtcgtcaggatggtcatcggctccaaatttgaccagtacatgcacacggacgtgcccgagcgggacctcacagccttccggcaggcctgggagctgcccctgctacgggtgaagagtgtgccggggcggcggctggctgatgggcgcacactggacgggcgggctgggctggccgacgttgcccacatactcaatggccttgctgagcagctgtggcaccaggaccaggtggcggctggcctgcttcccaaccccccagagagtgctcctgaatgagtcacgagtggttgcctgtgatcccacccccaaccctcaggtctcgacatagggctggaggctggggcaggaacatggatcctatctggaggactggccagcatggcctgatcagggaggatgtggccagagaaggcccacccgcgagcagcgctttccttgcagaattcatggcagggaggtggggaccaaggccctgagctcgaacatctcccgtggcctttccccctttggcagcaccgatggaggatgactgggagagggggtgcctctcaagttacttcaatcaagaacctgtattggttgaggtgacaccatctgttgtaacagataaaccccgaaatcccagtgctgaactcca

SEQ ID NO: 38949 - DNA, 1484 bp, Homo sapiens
ttcggcacccaggtcggttcgccgccgggactgctgacggggagggctaggtagccctgggagtcgggatctagaaggtagaggagaagcggggctgtctgacccccggaggtgacaaggggagaggggctgtgtgaataccctccatgggcagtaatgggatgactatccccagggagcattgcgaaggagagaggcggctgagggactgcactttctggggccccccgggagagtcagagggcagttaagagggatcacaggcccggcttggtactgtcactccccttcccactccctgctctcagcattctgtcacctccctaccccgtcgcggtgcccagccatggccagacctcccgtgcccggttcggtggttgtcccaaactggcacgagagtgccgagggcaaggagtacctggcttgcattctgcgcaagaaccgccggcgggtgtttgggctgcttgagcggccagtgctgctgccgcctgtgtccattgacactgccagctacaagatctttgtgtccgggaagagtggtgtgggcaagacggcgctggtggccaagctggctggcctggaggtgcctgtggtgcaccacgggaccaccggcatccagaccaccgtggtattttggccagccaagctgcaggccagcagccgtgtcgtcatgtttcgttttgagttctgggactgtggagagtctgcactcaaaaagttcgatcatatgctgctggcttgcatggagaacacagatgccttcctcttcctcttctccttcactgaccgtgcctcctttgaagacctccctggacagctggcccgcatagcaggtgaggcccctggtgtcgtcaggatggtcatcggctccaaatttgaccagtacatgcacacggacgtgcccgagcgggacctcacagccttccggcaggcctgggagctgcccctgctacgggtgaagagtgtgccggggcggcggctggctgatgggcgcacactggacgggcgggctgggctggccgacgttgcccacatactcaatggccttgctgagcagctgtggcaccaggaccaggtggcggctggcctgcttcccaaccccccagagagtgctcctgaatgagtcacgagtggttgcctgtgatcccacccccaaccctcaggtctcgacatagggctggaggctggggcaggaacatggatcctatctggaggactggccagcatggcctgatcagggaggatgtggccagagaaggcccacccgcgagcagcgctttccttgcagaattcatggcagggaggtggggaccaaggccctgagctcgaacatctcccgtggcctttccccctttggcagcaccgatggaggatgactgggagagggggtgcctctcaagttacttcaatcaagaacctgtattggttgaggtgacaccatctgttgtaacagataaaccccgaaatcccagtgctgaactcca

SEQ ID NO: 38950 - DNA, 555 bp, Homo sapiens
ctagattttgaatgttttgcctgccagaaaccaatggttttaaaaaatcattgagtggtcctacagattcaaagcgagcatccaaacatccctcacatggcctcttacaatgacataaaactgaagcccacttttttatttggaaaactcaatccctttggacaagccacaataatttttcattaactacttgaggttgcctgcaaattcagctagctttccagcctgctatcagcaaagccataaacatcttttttaaaaataggttaaggttggccaggtgcggtggctcacgcctgtaatcccagcactttgggaggccgaggcgggcagatcacgaggtcaggagatcgagaccatcctagctaacacagtgaaaacccatctctactaaaaatacaaaaaattggccagccgtggtagtggacacctgtagtcccagctactcaggaggctgcggcaggagaatggcatgaacccgggaggcagagcttgcagtgagccaagatcgcaccactacactccagcctgggcaacacagcaagactccgtctc

SEQ ID NO: 38951 - DNA, 169 bp, Homo sapiens
gatcagaggcttcttaaatcaagtttgtatctaagttctggtccagtctgtgctacttagcatgggattttaagccaattgtttgttggctttgagcctcagttttctcatttgtaaaataggataagagtgggttgcaaattcaaagctcactgctgggcacacagta

SEQ ID NO: 38952 - DNA, 231 bp, Homo sapiens
ccaccgcgcctggccctgccttcagtgttgatattgaccaagaacagctcatccctgcctctccccaaaccaactctattaatctgctttaagtagtcacaaaataattcatgtgctatttaggaataaaataattccaaatgttgacacctcaccttttatcttgtaagatacactattgaatggccccagaacttaggatctgaagaataaatgattcttgtccagtca

SEQ ID NO: 38953 - DNA, 443 bp, Homo sapiens
tgaacacttttgtacatgctatgtatcctggagaaaatgctgtatttgtgaagttgaactctcctactctagaaatttaaaaatctgatattttcaagtattactctgaatttttgtttacattagccaggctgggaatttcttaatggttttggtctgtcagaaaaccaagcaatgtgttagaggctctaagtctatccagtatagttccaggatggtttcttgtattgttacttctttaattattacacaaatactgaatgtggatacataattgacagtgccttacatattcagataccatgagtttttcattttattatcatcaaatttcttattgagtagaaaacgcttttggacaacaaaagaaataatcctcttagtaaacaaacaacctatggcatgggacaaaccatctgcaaactatgcatctgacaaaggac

SEQ ID NO: 38954 - DNA, 286 bp, Homo sapiens
ttagaaactgaatcacttactcagtgaagcaattaaaaatgctgtcctaaattttgcatgttgaggcggggcgtggtggcttatacctgtaatcccagaactttggaaggccaaggcaggaagcttgattgagcccaggagtttgagactagcctgggcaacatagggagaccctgtctctacagataatttttaaaaagttagccaggtgcacctatggtaccagctacttgggaggctgtggcaggaggatcgcctgagcccaggaagtcaaagctgcaatgag

SEQ ID NO: 38955 - DNA, 2446 bp, Homo sapiens
  misc_feature (1216)..(1216): n is a, c, g, or t
ccaaccccctaaatcagaatccctggggttgggcccaagagtctccattttttgacaagctcctccaggagattcctccagacatggaaatcctcacttgactcttcccccataacaaactgccctgatgtctgcagagagagggtctgctgtagacagggattaagaaaaagcaggacattttcagataggatgcccaaacccagacgcagattaggacccatgaagtagggggtagagctgaccctcaggaatgtgcccagacagagctaagctttcaggaaaattagaaagaccctcagacccagagtctgtctgagtttagcttcgcagcatgaaggctgccttgagaaagctgatataacaagaagcagcagaaatttaatactttggaggggcccagcaacccactcagggccaccctgggagaccccacagaccccaaggctatggtccagacctgttcactcaacacctggccaggcggggcctccagctggacctagagctacagatgccccaccaccactaccaagcccggctacccagaccaagacacggcttttcctggaggagagagagagcaaaggccctgtctctacccaagacctaacggcccctgttgaaggagagggagcaggagagggaggagggaggaggtcacagccaggaccacatacactcttgggggccctgctgagactgcaagagtcatgaattctaacgttccacaggtgaaagattccaagattctaggattgcaaaaccccatcattctaagattccaatggaatgattccatgtttctaagattccatcacactatgattctatgctgctaattcttgaaatttcgagtctcattgttcgttgctgttccccagacctgtgggccctagcatttttttaaaagcacaaaaaaaaaagagcaagaaagagagaaagagatggggagggagacagctgaaaacagatactaagaaaagctccatcccttggatctgagttacagatgcaccttggcaagggccaaagaccctccttttgagtggggtgcagaacgtctttccctggtagagtggcagaattgcatgcatcaggccttcctgggggtaaaaggggctggctgttccaggctacagctgagtaaagccccacacaggccacagtgcccactggctggtggacctaggaaccaagcagggccccactggcncagtctggggagggactcatctggggtggaatttccctccctgcagcaaggaagctgcagggccaggaatttgccttgggagacccccactgaggaatatttccgaagcagaaccccttcctattcagagccagagtcttaacactggacaaccacagggtgttgctgcaaactccagagccaggtgccttccctctgacatttgggacatagcttccatggccacacagccttcgcccccttccaagaccccccttgacctttctaatcttagtcactgccttccagagctgggaggccacacggcagaggtgcctgtgaatcactccgtcatcagcctggccgctttcccctctgtggagagggactctgatgggcagggggcaccaagttgagcctctgaggctggcccagcataggccaggcagggacattcactcacaaccagcctttttggactctagagaagagtaattaccacttggtcatgcccagcccccaaatcataatcatagctgctatttcttgagtgccagcaatgtgccaggcaccgtgcccaactttttatacacaatgtcttgcctaatcctcacacctctgtgagacaggtacaattattactcccattccacagactagcaaactcagagacgtgacatggtggctctcccaggtcacacagccagtaagtggcctctgaccccagtaccccccacttaatcaccatgctatgctgctaccagtggtacacactcagcccctctccactgtcagatcctttgccagtcaaatcccagatccccgggggggcactgtggcaccctctttgagcgtggcctccctggagctgctgtcagagccatgggctgtgggagtgagtgtgcacactccttctcctgaagtgtctgccccagcctgagctatgcagaccggagctctcaaccagggtatggggctgtctggcagggtttcccagaaccctgtttcctgtggtcataaatatgggttttcctgacaatgttgggaggtcagggactgatacagctggggttccaaccgccgtgggtcagacctggctcctccggaccccactgctgtgaccaaggaaatctcaccagctgtgtccaagatcaaccctgaccctgttactccaatgcctttgtaggagtatttttagcagaaccgtttttttcccaaaataaatgtgaattgtaaaaattatcacttgga

SEQ ID NO: 38956 - DNA, 541 bp, Homo sapiens
cctcattagaagggctataaaagggatgcagataaagtaataagggaatttgtatcatttggacttcctcacgtgacccactccatggcttctggaactaggcagatctgagtttgaacattattacccatgacattggctggcacagtgtattttaagctatgtctccatttctgtcagtttttaaatgaggatagtgacacctaccttgcagggctgttgggatgagtaaatgagatactgtgtgtacagtgtaaagcagtgcttggcacaggtgagtccacccggaatggcagcttccttcctacctcctttatgccacgctgcatcccctgtcagtcatacagatgcctctcacaaacctgcctgcaccttacaagtgaaccacaagcattaagatggcttcttgaggctgggtgtggtggcttccgcctgtaatcctagcactttgggaggccaaggtgggtggatcactcgagcctaggagtccaagaatagcctgggcaatatggcaaaatctcagctcaaccaaaaaaaaaaa

SEQ ID NO: 38957 - DNA, 414 bp, Homo sapiens
actccttcatcctaccaccaccacacccttaaatcattcaatggctttccattagtcttatgataaagactaaaatctttggaggagccttggtggtactttatagtctgactctgcctctctcttcattcttatcttaacccacataccctctggctctcaggatggcaggaatgccaggcatctttctgtgacagaaatgtcccacattgtccatgctgtttcccctgcttagaatgcttcctgcccacctcctttccctagcgaagtcctgttcattagcatttgatcattcatttccttagggaaatctttcccaacctccatattatgtaccgtgctatgaattcttacagtactacattgccctctttttgaaagcatgtaactccatttgaaataatgaattcatta

SEQ ID NO: 38958 - DNA, 349 bp, Homo sapiens
catgatccttatcactgagctcccgtgaagatgttctgccacttaatttcctgatctttttcaggttactgatagtatagggacatggctattaagagtgccaaaaagaaatgcaaaggaagagagaaggaaatccagcgaattcctcaagccaaggtgcacactcaggccacaaggaaaacgcagggaaatcaggtattctaatttcttaacaaagagaaagccgtctggaaaccacggggccactgactgcttctgatttggaatgaatgggaaagctcgcaaagcatcaggaagcttgcagatgagccagcatgagttctcatctgaatttacgtcacaggcggga

SEQ ID NO: 38959 - DNA, 708 bp, Homo sapiens
gagtttaatagtacaatcaccacccaattggaactgggcactgacccatcaggataaaccccagccataaataaacaagcagtactaccttaccagcgtctacctgttgaatgttcatctaggtttcaccccaatttgtagtttactagggaacataactggttctgatgatcataccatgctgccaactttcaagagagagaaggggacactccccgtttataccaaagggaaatctttttaacaaccagataagtaggtcttctgtcttagttaaaatgttcagcaaaaccattttctcccaatggtaataaaaggcattcgaaatgatagattttgttttatggtttatgattttagtactgacctttgccatctggtctgctgggataaatttggaaattttatatctctaaagctactcagtttattttatctcactcttctagcatgcttttctttatttaggtgaaatgaaaagcagatctgtcacagtgtgtgcactgacagtagagttcccaaaagaaaatagagataccttgagacctttgttatccacaggaacgaggtcatggcattacccttttggacacatggtaggatagttactcaacacaagcattcctgtttccttaagaatttggagcatacctaattgttgttgctgggacatgttttttaagtaacgtgcaatttgctgagaaaaaa

SEQ ID NO: 38960 - DNA, 191 bp, Homo sapiens
cttcgagtcaatgaactttaagtaaggaaagtgaaaatcatacacatactcataatcttttttctattctaaaatgccattgattgcaagattatttagctttgattatgacaacttttctgcaaaacaagatgcaataccacattgaatgtgtacactgattgtctgacctatccaaatatcagaaaaat

SEQ ID NO: 38961 - DNA, 296 bp, Homo sapiens
agaaattaaacaacacaatttaaaaatgggcaaaggacttgaatagatatctctccaaagaagatgtacaaatagctaataagtacataaagctgctccatattactaatcactacagaaatcaaaaccacaatgagataaccacttcgcctccatcaggatgggttttttctttttttgagttggagtctcgctctgtcgcccaggctggagtgcagtggtgcaatctcgactctctgcaacctccgcctcctgggttaaagcaattctcctgtgtcagcctcccgaatagctgg

SEQ ID NO: 38962 - DNA, 222 bp, Homo sapiens
acttctctttcttgagtcgacgaaagtttagaaaaatggaaatttccaggagggtgctttataatggctttgtttcccattactctttcttgcatgttatttatttttaatgagagaaaaattatatgtaggaaataaaagagaaacgtggctctggctgtgtaagcataggaagccttgagcttaacacaaggcaaattgcaaagaaaaaaaaagtctaaa

SEQ ID NO: 38963 - DNA, 974 bp, Homo sapiens
ggaagacttacggctaaggtagcgaggccgggtgtttttcctagtttcccagtcatcatcatttatggttatattagtcatgcacagtaatttgcatgtaattgagtatttattgaatgtatgaaaagatatctaatataatattgttttaggtgattgaagtaaaagtacattttccccactgcctgatttcctttcattctgggtttttttttgagagacagtctcaccccgtacctaggctagagtgcagtggcactgccgtctcgggtcactgcaacctccgcctccccggttcaagcgcagtggcgcaagtctcgggtcactgcaacctccacctccccggttcaagcaattcttgtgcctcatcctcccaagtagctgggattataggcgggtgccgccatacctgactaatttttatatttttagtaggggtttttgccatgttggccaggctggcctcgagctcctggccttaagtgatcattctgtgttgactgtttacctatgtttccttatgttattgtaacatcatgttttttccttagagctctttgaaactgttttcaatttgttaattattatgtgcccactatgtgtcaggcacattccaagaacagtaaatgtaattttttagaaggtttatttttcaccaattgatcttctcacttttgcccagtggttggatataactactaatttgatcagaatataatgagtcatagtaaccaagctcctcccactccacttctttcctaatccccagtactctccatgtccccccgtcaaatgacagtgtcatattcaaggattgtcactttgactgtaactgatacagacctaccttggaggatagcatttttgtttaggaatatttcatgatgtacctagcattttgtaagcagaaaggagtgtcacttggctgtcctgctaattctgcctatttgggggaggtggtgaggtctaagcat

SEQ ID NO: 38964 - DNA, 484 bp, Homo sapiens
caggagaggaaaatgaaattgaggagtaaattaattggctgagcattaaggaagcccattgtcacgattgctgaggttctcccttgaattagcagtagactgcaggtttcatctgagtatgagccaccaaggcaaatcagaaacaaccgaacaaccaaaaacttaaaagtagcaattcccagtgcagaatccactccagagcagtccccgtctcaacacctggaagtcctaggcttggggctctctcatctcgcctgcttcccgatttgtttggaggtgacagtgtttttacctactgagcaaatgggaggatttgggttgtttaagattctctgggggctggacaagggcccttgtaagtctgtgtttgaagaagtggatgggctcaccaacaaaactccttcctgtgctgcctcttggcgtatctggccttggtcataggttctaagttgtttttcttttcctgtctaatgtaagtgggtga

SEQ ID NO: 38965 - DNA, 414 bp, Homo sapiens
gcctccacaccagccccctccctcttcaccatttccccttcaatagcaccactctcatcatctatgggggacagtgctttcttctctccctgcctcctccatcaaaatcttttctcaggggagggtctgaaaaggccttcactcccccgtaaataacgaatggtgcttacagggctgggctcccacgtgcatgcacattaacaccaaaggtgctgtagtgaatggaatttggggcactgaggggaaggagtggaggtgttggtaggaacttgttgctggtgggggatgggcgccgtagatatcctttacaccactggctactccccctatctcctctggggtgaccctgagtatcctctgtgggacaccggcatcctgtgaggcgccctccttgcccacattgacgctgcgctg

SEQ ID NO: 38966 - DNA, 390 bp, Homo sapiens
ctgctccaactagtacttgcagtttcttaaaaccatatgttcattttactaaaggagttatccctccacattgtcagctgaaccaatggaatccagtacagatgaccatcgctgctccccagagttcttcccctccattaagccatttctatggtataggggcagaagtctcagggaacaacccccataggatcctttgaaatgcgcttcattgccgcctcacctcctccacccccttctccctctcttaagttctccgctaaccaaaccttctcttgttatatacccaatgataaaaccaaagtagttgtagaggttaaagatttaaaacaaactatagcaattgacacagggtatcaggacacaaatgcttggcttgaatggattaaa

SEQ ID NO: 38967 - DNA, 564 bp, Homo sapiens
gggcacagacactccatgctttacagccattactggggagtggggaaggggtggttttggctattcaaaactttccctcctgccctcctcaatgcctcttgcaatgatacgaagtttaaaccagatactgtgattgtctacctgatttttggttcttgtgatggtgctctcctgtgttcagatagttgttaaaatttggggtccctgcagggggattgaacagtgtaggcttctattttgccatcttcctccactctaagatgaaaccattgcgagtgtgtggcacctcccctctctctctctcttgctccttttgtggctatgtaacgtgcctgctacccctttatcttccatcatgattgcaagtttcctgagacctccccagaagccaagcagataccaacatcatgttcctgggcagtctgcagaaccttgagccaattaaatttcttatctatataaattacccagtgtcgagtatttctttatagcaaagcaagactggctaatacacagttctaagatgcaagtttatagtgtttaatgcctacagtgaaaaaggta

SEQ ID NO: 38968 - DNA, 366 bp, Homo sapiens
ctgaaatacataacatattaatgaggatatggccaacctcactgataacaaagaagaagaaattaaaatgataggtgaaaaatacatttggctgtcagaaaatttaaagattggtaatacacatttagtatagtttgggtatggtaaaatgactattctcatgagttcgttgtgagtataaattaggtaaaacctgtttggatgaaagtctgtgaatatgtatcaaaagcctttaagaaagtatataacatgtgacaagcaattttgcttttaggaacttatctgaggaaataagtgtacaaatgtgaagtcgtgtgtacagggaaatttgtactggctttattacataactgtgcataaactgag

SEQ ID NO: 38969 - DNA, 2076 bp, Homo sapiens
  misc_feature (330)..(330): n is a, c, g, or t
tttgaaaacagtttttgaatagaacctgttgagtccaccaatataataaaatcagctgtttgtttttgaaataaatacatatttatttcaatataataaaatcagctgtttgtttttgaaataaatacatatttcaaaaagtataaaattttagttgtttcagcgcttctttttactcttgtgtcccagtttgcatgataaattatatagtattcacactttaaagacatttctcataagttatatgagatttttctgcttacatcctgttgaccagaatttaattatatagccatacctagctgtaagggaagctagaaaatgtaattnttattgtaggtcatcatggatccagccaaaaatctggaagatacagataaaagatactaggagacaagtaacattctgccctaccttctcatcatgtgtttgcatttttggctagcacatatactcatgaggtagacctgcggaatttaagggagaaagtagtatggtacctttaatatctaatttatattcatatttttttaaaagctaaagtaaaaaatgaattgatcctattaagcagactattagagaatcttggtcaggcatggtggctcatgcctatcatcccagtactttgggagatggaggtgggaggatagcttgagcccaggagttggagaccagcctgggcaacatagcaagaccctgtctctacagaaaaaaaaaacaaaaaacaaaaaacaggcatggtggtgcatgctgttagtcctagctactcagcaggctgaggtggtaggatttcttgagcttaggagttggagactgcattgagctatgaatgcaccactgtttctctagcctgggcaatagagcccctgtctcaaaaaaaaaaaaaaaagaaagagaatctgatgtctctctccaattctattttatttcatctcaaatgtctctctcctttatgcatatagtatactttgacgggtcccactaaattctctccttcactggaattcacatgttaacagaaggtgagtggttctttgcccctgggactcacaaactgtatcatccatctctccttttcaccatatttgcagtggtctgtgataaaacttagcccttgtttagagaagaaagaggcctcagaaagtgcagatctgacatagtgtctggacaccttgagctgcacatgaccagctctagcttcacaggctggccgttcatggattagacctacaaagctgaggggaggagatattctggaccttgatagtacctaggtccacattttggtaatttgcctcggtatagttgccaccttagaaaaccaagactcgttgcctttggacaaatttctatttgttttctgtaatcatttgttttaactttgaactattctgatgaaatcttacataaggttcaaacggtggtattgtatacaaacataatcatgttaaatgatacaaacaaataatcacttgtttaaactgcttccctttatgggactaatatttaacatgttcctttttcttaactagcttgtgtcagtcacacatgctttttttcaatgtggttcaagtacagtgaaaatggaagctttactcccatcaaaatcaaatcagattcacagcctgtgaaatccactcttggtgttttgcattcagaagcatcactataaatgttccagagtctaagacctccaccatctgctccattaggcactggatttcagtagcactacttgatttagaaaaagaaaaagaaaaacttagcatatccaagcaactattcagcctgaagcttcttgaaataagaatgatctggcatttccttccccttcagtgagcctcataactccatggtctctgcacaggtttacacctttaaatttgcattttatcaacctttctctggtgaggaattttttcctttttaggctatgatatgtttttttctgaatttgatagttgtatgttgaattgaaggctttattctgtgcagccctcctgttaatctcaaacgtgaatcttttgcaccttgttcttcaaagggtcattgaaggctctaccaggtcaatttcag

SEQ ID NO: 38970 - DNA, 449 bp, Homo sapiens
aagcagatcactctggaaattcttgccatgctttgggcattgacagaaggttccaggggcactgttagtcctgctacaccccttggcagacggttcttccccaagagacaaagtcgcacctagaaatttgagagcacgctgccctgattggtccctcactgtcacattggatttggacttgagacccagccaggctggagggagaggagccagatgggacattctcaagctgcgaaggggttttgtccagtcctgattcagggcgctagagtcccaacatggcacctgagaaaaagtgaattgggtgtcctcagttcagacccctgggcacagcttatggttgtttgatttaaaataatctctcagttgctctgtggcctatgtgtaattgtattactatttctgtggaaaaggaatcacttctttttatacatagtttgaaaaaaaaa

SEQ ID NO: 38971 - DNA, 385 bp, Homo sapiens
gacaaaacagccagccagtcttctatgagaaagatgtcacttgccacatacagtcccagttggtttcactgtcccgagaccctaaggatgttttcgtagagctttgaccttgatgaagcacagagaagtgtctggtccccatgcccgccctcctcccctttaactcctcgcctgccccttcaacttcagttttctaaagagaaaacttgctccctaagctcccagaaggcattactcaggtgacatttggggaaggaaatgatcagtagggcaagttttaatttagggcatttaaacccattgtgcttaagtaccagatttcattgcagactctttagaaaaaatgtatggcatcttgacgcagtgttcctggccaaaaaagaaa

SEQ ID NO: 38972 - DNA, 438 bp, Homo sapiens
gggattacaggcgtgagccaccgcgcccggccagaatgtagaatatttgaaaagcaactagtctggtctgtgcaaaatgttaaatataatagggagagaaaaaggtaggggtacaattctagattgaaagaaacaagtacaacaacccaaacgcaaccgtataaacgcctaacttgatcttggtcgaaaaaccaaacagctataaaggaagactttgggaacagctggggaggaataaaaatggactggtattagttattctaggaaatctgttaattttcctggttgtgataaaagggtatccataggtatgtcaaagaatgtcctcatgaggtgcatgtctgcagtttactttcaaatggtttgacaaaaatgtatacatttatgtaaagcaaatatggcaaaatgttaagtttttgaatctaagctggagaacat

SEQ ID NO: 38973 - DNA, 381 bp, Homo sapiens
agattaatatgcctggggtagcttaggtaccagaaaaatccatgtttacagaaatgtttgtttgcagcattcagtggcacaggaacaaaatatttatttgtggggatacatccagcattttgtcaaattcactggggaactgcctgggacaggcatatcaatgaatttagtgacttggaagtcacacagtctattctgtaggagagagagaaggaaggttagattcccacttctccctcctctgtaccctggctcatgggttcataggcgctcacgttgggggaattttccccaaccactgtgacatgggtaagggtagcatcttccgactatcctccagggaggtgggctgtaatctggcctggatcctctgatgactaa

SEQ ID NO: 38974 - DNA, 405 bp, Homo sapiens
tgctagagccatcatgttggcattccagccttcattttgagtagacagtacaaagatgtgtacaagaagggcacatcttctttcttttaaaattatttgcataactcttccatttacatctttttagccagaactaggtgtcttagtcaccccttgctagagggagactgggaaataggttcttttagcagagcagagtcagccctctgtatccacaggctgtgtccttgcagattcaaccaaccacagattgaaaatattcagaaaaaaataacaatacaacagtaaaaaaatacagtgtaaagactacctaggcgtttacattgtattagctattgtaagtaatctaggagattatttaaagtatattgggagaatgtgcataggtttaaatgccaatttgac

SEQ ID NO: 38975 - DNA, 433 bp, Homo sapiens
gctgggattaaaggcgtgagccaccttgctcaacctaaatattgttacataagtgtatgttaactgtaccttatatatactcccaggagcaattgtggttatagaaaaaaatgtgggcaaatattttgaagttcctgaatttcatgatagtacactatttaattccatgaagaaataacctaaaaagaaagtgtcacaggattatgacttcttaaaatacaactgtccaacagtctgctgaaggaaagtgcaagtaattagtcttagattttgaattgtgtagaacttttgaaagttaaagcttacccccacactggggagatgtttcataagaatacagagtggctgtgtgcagtagctgatgcctgtaatcccagcaactttgggaggctgaggcgagaggattgcttgagcccaggagtttgagcccagc

SEQ ID NO: 38976 - DNA, 422 bp, Homo sapiens
ctaccccattttacaaattagactcgaaggggttaagtgatcacactgacgcaaggcctggaacctgggtcagtcttgcttcaaatctagggctctttccacgctgcctgccaagccgcctcctctagggaggtgatgaggaaaagctgcaatgttggaggagggggagctgcaccgctgaccctccggtggagaagatggggtgggaggcaacagcagaaatctgctccaggggcgggaatgcgcagccagggctgagagcagccaaggcacagaggatagcaggctgggcaggcgacagcgccggtgacagctgtgttagggtgggcagttcggtacgccgctgcgggagcgggcggggaacgtcagcctggaatcctgggtcccccgacccccggagtagtgtcaactcagagcaccac

SEQ ID NO: 38977 - DNA, 446 bp, Homo sapiens
gtattcaaatattgataaggaaaaagtaattcttcatgaaataattctagctaacaagtagaattataataccatcatttgcaaccctaatgaaacaataggtccgagtgttatcaatggctgctaaaagcattgcatgaaaagccagtgggaaattttgtaatggatgaatctagctggccccattgatatatcttaatgttacaaaaagggagatgactctgaaaaaaagaaaaaagaaaaaaaaaaaacaaagatgaagctgaattggattactctctcaatataacacccatttataagaaatacaggacatagaagaatatgttaaataataccacaaggatacaatcaaccatatccagactctaatgaaacaataggtctgagtgttatcaatggctgctaacagcattacatgaaaagccagtggggaattttgtaat

SEQ ID NO: 38978 - DNA, 358 bp, Homo sapiens
tttttttgagacagggtctttctctgtcacccaggctggagggcagtggtgccaccttgactcactgcagccttgacctccctggctcaggtaatcctctcacctcagcacccatggagcagacaacagttgggactacaggcacgtgtcaccatgcctggcaatttatttttattttttgaagagatggagttttgccatgttgcccagactggtcttgaactcctgggctcaagcaatcctcctgcctcagcctcctcaaatgctgggattacaggcatgagccactatgcctgaccatacaacattattttttggctcttttccttcctatttcccaatcttcttttagggtcat

SEQ ID NO: 38979 - DNA, 366 bp, Homo sapiens
atttttttttccttgtgtctgtccctaccccctgctatggtctgaatgtgtgccccaaaattcaggtgttgaaactgaatctccattgtggtggtattaagacgtggggccttttgagaaatgattaaattaagggggctccgccttcatgaatagattagcgccttataaaagggctggaaggaacccagcttgggtcccttttacccttctgtcccttgcaccacgtgaggacatctagatgaatgagtctgtaccagacacctaacctgccagcgccttgattttggacttcccagcctccaaccgtgaggaaatgagtttcttttatttcaaaattaccagtctgtggtattttgttataac

SEQ ID NO: 38980 - DNA, 594 bp, Homo sapiens
cattcagagtccaatggcttttagttttaattcacacacttaacgagtttagttatgccagaaggttggaagacaggtgagggtggctagaggcagacacgtagacataagacatcctgacagcaagggagatgacaagaatcagtaatacagcatagctgagccattcaccacagggacagttgtgctctacaagccacagtcaggggctaacaaacatactaaaaaggaaaatactaaagcactgtaaggttaaattatactcactatatcctactaaataaggttggggagactgaaatttattttagaaaatgttacctaaaaaattaatctgaaagagtagaaagaacagtgtacagccttagtattgttaaaaaaaaaaaaaaaaagatacctatcccataaggtttttacaaagataaaatgtggcaatgtacatccggctccaagatggcacttcacacataacatagaaggtttttagtatgtggtagtagttttcattacaaataacacttaaaaataggtttcccttatctggaaaattcacttttgtggaatatctaacttcctgatcaaactaaataatta

SEQ ID NO: 38981 - DNA, 334 bp, Homo sapiens
ctaggcctagccatgtgtaatttattattaaaatcatgttaccaaaattgtagaaaataaaaaagggtgggtgcagtgtaatcccagcacttcaggaggccaaggagggagtactgcatgaggccaggattttgagaccagcttggacaacatagggagacaccatctctacaaataataaatatttagccgactatggtgacgtgcgtgtgtggtcccagctactcgggagactgacgtgagaggatcgcctgagcccgggaggcggagattgcagtgagctgtgattgtgccactgtactccagcctgggtgacaaagtgagacgctgtctc

SEQ ID NO: 38982 - DNA, 652 bp, Homo sapiens
tccaggagtttgagatcagcctgggcaacatggcaaaaccctgtctctacaaaaaactacaaaaattaggcccggcatggtggctcaagcctgtaatcctagtactttgggaggccaaggtgggtggattatgtgaggtcaggagtttaagaccagcctggtcaacatggtgaatccctgtctctactaaaaatataaatattagccaggtgtggtgatgtgcacctgtagtcccagctactcaggaggctgaggcaggagaattacttgaacccaaggaggcagtggttgcagtgagcctaagattgcaccactgcactccaacctgggtgacagagcaagactttgtctcaaaaaaaccaaaactacaaaaattagcagggagtggtggcatgtacctgtactcccagctactcgggaggctgaagtgggatgatcacttgagcccagaaagtcaaggctgcagttgagtcatgatcctgtcactgcattttaacctgggtgagagtgagactgtgtctcaaaaaaaaaaaaaaaaaaaaaaaaaagaaagataaatagatcaatggaacagaattctgtacagaaatagactcacacttctatagctcatttcaacaaatggtgttggaataactggatatctacatgg

SEQ ID NO: 38983 - DNA, 313 bp, Homo sapiens
taaggtcatcctctatggaccagagaactctgggaatttcttgcctcttgggatccagaaccagagaaacagcagagcatagggtgacttacttgtgggctcccacaaacagaaggccactcagacctgctgtttgccacccctgcccattccttctttggtcagggtttttggggtttgccagagatgtgtttaagtgctctgcccagaaccggggggaggggggggtttggtggaaattttttgttatgatgtctgtgtggaaagcggctgtgcagacattcaattgttattattatgtcctacaagtata

SEQ ID NO: 38984 - DNA, 335 bp, Homo sapiens
aagagagtagaaatccaaaagatggttacctttggagaaacatgtgcttattccattaatgttgctattgctctaagcatgctgggaagtactggagagctgttaactcttcaggtattagaaggagaatctcatgtttctccaaatttccttgcttctgggatacaatttctggttcttttgttaccctaattgccttcatctcgtatggattcgtatctctccttttatgcccagctttcagagttcattgtctcactgcaggtatgatatgagcagcacagagcctatggttcattaacaatgcaggaaatgacatggaatcacaccgtaac

SEQ ID NO: 38985 - DNA, 418 bp, Homo sapiens
tggagggagcagtgtgagtaaaggccctgagggcattcatgttcagggagggttgctgcccactggcttgcttggcacacaggagagtgggtattcctgccttagtaactttatgtaaacaagtatttcctcagtctgttcctctcaaactgcctgctctggcacattcagaatgtcacagaactcacctggatgcattcagccccttgcctaaaggtgacagtgcatctccttccccaccccacccctcataccactgaagcacctgtcagactggcccagtctgtgggcaaggagcctagagagggcttagtttcagcttgaaaggagctgggatttaccaagaagcaaatgagagacgaggattgcaacaactgtgccatttccccagcttcagctgactcctgtatattgactg

SEQ ID NO: 38986 - DNA, 237 bp, Homo sapiens
gacctatggtgtactttctcttcattttttcccctatttctttttctaaaattaattttactctgtatatttgaggtttacaacatgatgctatgggattcacagagataatagtgactatagtgaagcaaattcatctatcaatgatctcgcacaaagtaggccctttgtatctgcatgttccgcatttgcagatcccaccaaccacagatcgaaaatacttgggagaaaaacaaa

SEQ ID NO: 38987 - DNA, 562 bp, Homo sapiens
tattcgctctctgctgaagaagatttcttgctatttcaggtggggctgatgggcacatcgtgaggggccctcttccgtaaaaacgagacgatgtcaggcaaacactccttaccctgccatttctagttacgtcaaggatcttactgctccaggacggaggaccttcaaggaactgcagggtagcgataatcaccgatgcagttaagccgggccctgggctgattcactctcagaccccggggggagtggcccttgcgcccgaaagagggctacggcgtagacccggcccggcacccaagttgactccttgcttcccgtaccccaaaagcctaagcgcggaagaggccggggacaccaaagaaacccgcaccaactccccgacccaggccctggggaaaaatggcgaagcccaggggcgggggacaggacggagcgagtgacctggcgctccccgggcctcagagcccgtggagtgggtcgtggtgggcgacgccacgcaaccgcgacccgtccgttgcctccgccatcttctcctactcacccggactccccccgcggccgc

SEQ ID NO: 38988 - DNA, 443 bp, Homo sapiens
ccccataggggttaacaccagctgatcatttactagaaagtggcctcccacagagaggggtgtctggtactctctcccagccctgcagccccttagaaccatcatttccttgtgaaccagcattacccaaattacccgacaccctcagtcaggccatctctgaccattgtacatcttttgttatgtagactagggttcatttagggttacttcttgtagaattctttttctgacccatctttaattgtataagaatatttacaatatactatttgggagaaagggaacttatgaagattattttccatatatttaaaaaataatagaaataacccaattgtgtaataaggttatagaagatttggtcctaagaacttcttttttatttccattgtgaaatagtcaagggaattgagcaagaaaaagattaaaacatgtaaaag

SEQ ID NO: 38989 - DNA, 772 bp, Homo sapiens
agcgggagtttctcttttcccctcccttcttcttcaccttcttccttctatttatccttctgtttcatctacaaatatttgagtgtcactgtgttctaggcactgtgccagacattgggattcgttggtaagcaagagagagaggcatggcctctgtccttatgagcttgcagtttatcctagtgttacttatctagtctgccctgccttcaaggttcagtggaagcccgatcttcatgtagtcctttgacttctttggcccttgcaaacctatccctttgacctatgctactttaaatctgattcatacaatttagcatttattgatataatttcttatactgtgggctaattgtttaaatatcttgttttactggctagagtatagttccttaaggacagagactgtcatgttattatttttttttttggcaatactgagcccaaaggttttgatttcagtctgccctgctgaatgttgaagttactagtagctcttgggacttagaagtagtgatgagataatgccttgctttttagtttattttctatttggttattttatgtttcttttttgaaatggtatgggctggccgcagtggctcacgcttgtaatctcagcactttgggaggccgacgtgggtggatcacctggccaacatggtgaaaccccgtctctactaaaaagacaaaaagttagccaggtgtggtgccggggacctgtaatcccagctactagggaggctgagacaggagaattgctcgaacccgg

SEQ ID NO: 38990 - DNA, 359 bp, Homo sapiens
ctttgtcttactttcactcaaactctaaaatctttttcagaagtctttcctactggccaggcgcattggctcatgcctataatccagcactttgggaggccgaggcaggtgtatcacctgaggtcaggagttcaagaccagcctggccaacatggtgaaacccccgtctataccaaaaatacaaaaattagccaggcatggtggcaggtgcctgtaatcccagctacttgggaggctgaggcaggagaatcgcttgaacccaggaagcggaggttgcagtgagctaagatcacaccatggtactccagcctgggcgacagagcgagactccatctcaaaaaaaaagaagtctttcctac

SEQ ID NO: 38991 - DNA, 255 bp, Homo sapiens
ttaagagacagatctctcctgttgctcaggctgttcttcaaatcctggcctcaagcaatcctcctgccttggcctcccaatgcactgggaatacaggcatgagctaccatggttggcctctgttcatttttcatagttcttgtcattatatatacatacacacatacatatatcatacataattcattcattcaatgaacattcactgagcacttatggctcacaatcaagtagaggagagacacacataaacaa

SEQ ID NO: 38992 - DNA, 715 bp, Homo sapiens
ggatttctgaaatcatctgacatgggccttttcttcagtccattccagattgggggagaatagtagggacccatattccaacatcgccagttcctgaagtcaagtctgagatagggctgtccactgggcactggccgggtttcacctcctccattcctacctcatgtctttgctgttgataaagaaccttagacgccctccatttgccctccatttgagaatgaagtgagggaacaggatacggttcatctgcccattgtgttgtattccacttttccgccggggcattatgggctgcactttattttacttcatttagtttgtttttttcctctactagaatgtaaatccatgaggaagagatatttttgtcaattttattcactgtttcattcctagcacttataatggtgtacagtgcctagtaggcacttagtaaatgttggacaaatggccgtttcccagataacttattatttcataatgattattacgcatccttggttcatgcctctcaatccatctcatcctaaatatggctactaatggcagttacatatgttgaaattcaccttttgaaattctagtttggccaggagtggtggctcatgcctgtaatcccagcagtttgggaggccaaggtgggcagattgcttgagctcaggagttcaagaccagtgtgggcaacatggccaaaccctgtctctactaaaaa

SEQ ID NO: 38993 - DNA, 838 bp, Homo sapiens
ctagatgtggtttttgaattaaataacataatggtgctcaaccttttaaacctcatttgctatcagtgatacttcaaaaaaccttattcctactattgataaaaacaatatgtctgcttttctaaggccatttatatattcaacgatactcctattataatttggttaactatttgatggcaagcatggcatagtttagaaagcaagagctttagagtgatgtatctgggcaccattcctgagtaacttgtgttaatgttttaaatttactaaacctgtttttctcatctgtaacaccagaaattgaccttccagagttggtaggaatcaaatgaaaaagcacctctaaggtttcttgcacatagtaatgatgcaatcagtgatagctataataaaaagatagtattttaaaaagcagctttatacataattcacatattcaatttacctatttaaagtctaacacagttcaatttatatatagagttgtgcaactttatcttccattgcttataatacatttataatttattggaaaatttataaggaaaatgaatttcttacagttatggaagctgagaaatcctaggttgaggggccacatctggtgagagccttcttgctggtggggactctgaagagtcctgaggcggcacagtgtatcacatggcgattgctaatgtacttaggtctcttttcctcttataaagccaccagtccactcccatgatagcctattaattcattaatccatgaatagattaatcaatttctgatgacatagcccttatgatccagtcacctcttaaaggccccacctctcaatactgccacattg

SEQ ID NO: 38994 - DNA, 354 bp, Homo sapiens
cctttatccttatattaaaactgtatttttgttctatgtacaattctaggttaaaagtttgatttcatctttagcttaaaattatctctccattgtcttttggcttccagtgtttatattagaaagtcatatgttcatctgatcttgttcatttttaagtagtttgttgttttttggtacactttgaggtgtttcaatctgactttttttccccctttaattctgagaaattcttaaatagtcttatctttattttctcctggaacttctatagtatggatagtgatatttctacttctatttctatctattaaattttgttgttttctgtctcttaattcccacaaaaaaatt

SEQ ID NO: 38995 - DNA, 393 bp, Homo sapiens
gtgatctgcctgccttagccttccaaagtgctgggattacaggcatgagccaccacgcctggcccagagtttagaaatcttaaaacagttgagacataaaataggtattctaaatgtctacaaaaacatatttcagtggctttatagggaacataggagactttgctgtcattgcaccttcaagttttggtctgattaaaaaaggtgcctaagttccttggaggcttagtgtttcttcatgtttatatttcagagttcttaatagtgatacttaaatatactattttttccctgtactttcgaagatttggatatgagttttcagatttaaatgtgggaactcatttgagtataatccgtgaacagcatttgttcaacacatttttggggagg

SEQ ID NO: 38996 - DNA, 269 bp, Homo sapiens
agtaacctctagattttgcgcattttcctctccttctagaaaagagataacataattctacccaaatctacactcatccctaacatgtaggtcaaatgatcttttatatataagcctcccaatattactaatgatgaaatcagactaagtgatttttcagaaaactccataatcgctactgaatatgaagtttctttttagagaaatgaaaatgttctggaattagtgaagaggctgcaataccttgtgaatatactaaaaaaaaaaaa

SEQ ID NO: 38997 - DNA, 387 bp, Homo sapiens
cagcttgaaggttcaagttcacttcaaaccacacacgaatttccttttatttttactttgcactgccaaaactgggggccttctaactcagaagacagggtgggaaagtggccttggtccactgagcagtcctgaaacaccaccacccaggcaggatgccggccgaggaatcccattcagtccccatgggaaggagggggcccccagccaccgaaaaccttgggcagccccagcctgctccttcttcctggagttttccagcttccccacaacttgccttggggttgttcctattggagtgtgtgtcagcgtgtgtgcgtggatatgtgtgtgagcaggcatatgcatgtgagcctgtaggagtatgcatgagtgtgcgtgcatatg

SEQ ID NO: 38998 - DNA, 461 bp, Homo sapiens
aggatatttgctcttaaaacaaaatgacagactgaattttcctcttatacatttaactgagcagaaaaattcagtatacattacctgaagatgcaaagttatgggactttaaaactctggttctctaaactcaaaatttctacatcaatccagcagggcaacagggaccatggcccagtgaacacaccacaccccggcactccaatggaacccaaattatattttaaaatgaaaatcaatgggaaaattaagcctcataatataaaatttggctttataatcagcttttctgaaacatatctattccaaatgtgcacaaatatctgcataacaagaatctattagattaaaatggtaattagctgttttccattccataggaaaggatttacataattaacaacagacacaaacttatattaagcaaaatctaactacagtgaaatctcaaccagcttagc

SEQ ID NO: 38999 - DNA, 440 bp, Homo sapiens
aagatttggctgccataagttacttgggaatcttgttttagactcttagatagttgaataagcctgatttccacctctgttaattattgtgacttcttatcgacatgaggacccaatgttgttgtattactgtgatctttgtaaggtggaaaaggtttaaaataacttggaatcataaagttgttttccccaaaacatattgtgaaaatgttcaaacatataggaaaaattggaagaattttacagcaagcacctataagccttatcatctagattctactattaacattttcattacatgctctaacacatatctatccatgtaactattctgctgtctacccatcttatttttttgatgcgtttctaaataaattgcagatatcagtacattttccagaatcatagaggttttaggcttaagagtaattttcaagctt

SEQ ID NO: 39000 - DNA, 367 bp, Homo sapiens
acaacaaaaccccacaagatccgtttaattcctaacacatacatagtcctttggaagatatctgtgtgttatatgtttattattaatagggagtaatgagacttctttccatgccctctacatgcacaccctgagttcctgacagatacgtacttttaaaatattagtgagcctttattgcacactcactatgtgacagcagggctaggaattgtaagcctcattctataggcaaagtaatgcaggcaggaagatgccagcactacacatcttgtcagtggcttcaaaatatgtggcgcttcctggtgtcccgtggagattctgtacacaaagactcaacaatttacttaaatgtcagaggaaaatc

SEQ ID NO: 39001 - DNA, 267 bp, Homo sapiens
ataatttgagctccttgcagttggaattatatcatctttatttctttctgagcatctagaacagtggtctatcaaagaataggtgtttaataactacttgttcaatgaatcagtgaatttgtttccttatttaaatatttgttgccagccaatacaacatggaaggctctgtgcagggggctggtgtggatgcaaaggtgtatagggcacattcccactcggggttgggacagtttaaggcctgccggggagacagacacgcagctg

SEQ ID NO: 39002 - DNA, 1174 bp, Homo sapiens
tagttttgtttcatgtatacaacagctgttacagatatatgccagcaatattcatacttttttaacaagcttttgttatatattttctaatctccataaaagtctaatcatctatgaaaaagatatttagggagaaaatacttgttttctgtaataaaacaattaggttggtgccatgtatgccaagttggataaaagaatacaaagaaacagctgaaggttttgggagctcgctctgacattaattactagaaagcaaactaaaatgcaaagtgaatagttaactcagaagatttgaattttttgaaatagggtctcactctgtcctctaggctagagtgcagtggcactatcacggctcactgcagcctcaacctccctgggctcaggtgatcttcccacctcagcctctggagtagctggaactccaggcatgcaccaccacacctggctaatttttgtatttttagtagagacgaggttttgccatgttgcccaggctggtctcgaactcctgggcttaagagatccacccacctggcctcccagaagtgctaggattacagacataactaccacacctggcctgaagatttttaaatgtgaaaatattttaagaagctaaggggaaaatcgttattttaaaatcctgatccccttaactttaccccttaccattccccttacctttccaattcacttttgtctatttattatagaatcagaattgtgctaagaagaaaccctggagataatctagctagtctcccactccctcaccccaaccttcatcctcaagaaacagaggctcagaggttgtggtgtgatcaagatcatatacctaaagcagagccagaatcaaacccagtctcccatgggtttggggaggcagtgggttgttaactccattttgcagtttctttatagttctggtctagtagttggtgaatacaacacattaagaaaagtgttaaatccagaaaaaatgtagagtaatctagatggggaaatgttggaaatgttaagtatatctacagatgtaaggatcaatacattattctaatttatgccttactattttctgccacataacagttgtatgctgccattttatagttgaatacatttgttgggatttatttaaatataaaataaaccctgtgaaatggctttg

SEQ ID NO: 39003 - DNA, 176 bp, Homo sapiens
aggactctacttgatgctgcatgattgcaaggtcttctaattctgaatatttgaaacatatattatcctcagcttctgtgtgagctctgagaatggttcagtctaatgctttacaataattctttctctggcctgaagtagtttttttcttatgcatgcacaaagcagtaataagg

SEQ ID NO: 39004 - DNA, 364 bp, Homo sapiens
gatacacaggtgtaataatcttaatttaaaaaaaattttttaatctcagattttttcctgtgcaaactaaacttaataataatggcataggaattgtttcaataaaccataaaatctgttaggccagttaggccagttaccaaaaggcaaaagaaaagaccttctacagtgtaccaaatattatattggaagaaaacatttcctttagacctttaagaaaacattgttagcatcaggccacaacaaacagaacccaaggaaaaacaacttatatgagctgaaaatgagttgttagtatttcgtggcctttaaaaggggagaaaaaagcaaaaatagtgagatgcaataaaagttgaactttggt

SEQ ID NO: 39005 - DNA, 238 bp, Homo sapiens
tagagtttctgtttgaagtgatgaaaaattagaaatagttggtgatgatggttgcacaacattgtaaatgtaattaataccactgagttgtacacttaaagtggttaaaatggcaaattttgtgatgtatattttactccagttttttaaaaataatagtgaactatacaaaaacatttgaattgtactttaaatgaatgagttatgtggtatttcaataaagctgttaaaaaataca

SEQ ID NO: 39006 - DNA, 339 bp, Homo sapiens
tgatgttcctgtcagagagagggtgctgttgccccacccatggtggcttttcttttacatcacctgacacagaggctgaggtgggaggatcacttgagccaggggaggttgaggccgcaatgatctgtgatcacaccactgcactccagcctgggcaacagaatgagaccccgtctcaaagaaaaaacaacagtggaaaggaaatctgcagagaacaataaaagcaaaattgtggactccttgaggattttttcacaaatgcttctgtctttagttatggctgccattaaatgtaatttttttttcctcaagaaatttttctgagcttggtgttctaca

SEQ ID NO: 39007 - DNA, 318 bp, Homo sapiens
gagacagactctcttgcagccaccccaggctggagctcaactgcagccttgaggctgaggtgggaggatcacttgagccaggggaggttgaggccgcaatgatctgtgatcacaccactgcactccagcctgggcaacagaatgagaccccgtctcaaagaaaaaacaacagtggaaaggaaatctgcagagaacaataaaagcaaaattgtggactccttgaggattttttcacaaatgcttctgtctttagttatggctgccattaaatgtaatttttttttcctcaagaaatttttctgagcttggtgttctaca

SEQ ID NO: 39008 - DNA, 440 bp, Homo sapiens
cggcaaaatttgttattttgtagtgacaaggccttgctatgttgcccaagctgctctcgaactcctgggcttaagtgatccacccgcctgggctctaaaagtgcagagattacaggcgtgagccactgcacctggctagtggtacttttagatgtgatttgacatttaaatcagtagaccttaagaaaaaaagattaatctccataatgtacatggccctcatccaatcagttggaaaccttattagcaaaaactgaggttccccgacatagaaggaattatccacagaactaccacatgaaaacccattgggagatatacctaatgctagatgacgaattagtgggtgcagcgcaccagcatgtcacatgtatacatatgtaactgacctgcacattgtgcacatgtaccctaaaacttaaagtataataataataata

SEQ ID NO: 39009 - DNA, 280 bp, Homo sapiens
acttaattcataggcaaaggtaatgaaaatttctaagatgtctctgaatcctcctcacagacaaggagccttggctgggcacagtggctcatgcctgtaatgcccgtactttgggaggccaaggcgggaggatcgctggagcccagaagattgagaccaacctgggcaacatagtgaggccctgtctctacaaaaataaaattaaaaaataaaaaactagctgagacatggtagtatacacctgtggtcccagctactcaggaggctgaagtaggaggat

SEQ ID NO: 39010 - DNA, 442 bp, Homo sapiens
gagattgtcccctttccacttgggtggtcctctcacggaccgggcatgagctgttatggtagctctcttccaaaaccccacagcctggggtgatgagtgatggaagactctttcactgctgttccctgaggttaagagccctgcgggtcagcccctgaggtccatccagcctccagcccctggtgtttacttcacctcctgcctttcatggcagaggaaaaagttagcattccttggagacttaacagggtgcagtgaaaccaagccttttcaagaggttacccatcagtctgcccttgttcatccccgagcagatgtgtagtggtattgcaggggactattgctgggtactctgccaagtaattaaagcagcactcatgctttagtccaattggccatccctttcaccctagcattccgtcaacacgattaaaaaaaaaag

SEQ ID NO: 39011 - DNA, 453 bp, Homo sapiens
tgggcatctctgtgttgccgctaaagagccgtttgtaccagaagatgctgacagggaaaggcttggacgggcttcacgtggagcggctccccatcatggacaccagcctgaaaactatcaatgatgaggcccccacagtggctctctccttccagctgctttcctctgagagaccagaaaacttcttgacaccatcgggtcccccagagactcatagagtatccagggcagtgggtatgcccctctcccttacccatcccactctgttccaggcacgccatccctccttgttcctgactcttgactacgtccttgtttatcctctcacctctggttcggtctcctcctccatccatcacctgagactaaagagattaataaacgagactcataactcagctgctgggatgcagcagatatttacggctccgtttcaatttgcagagagattaa

SEQ ID NO: 39012 - DNA, 454 bp, Homo sapiens
aagctgtgtgaccttggataaatcactccacctctctgctcctgtctcctcattgttaagtagagggaacactgtcaccctgtccacctcttgagactatggggaggattaacaagagaatgaggggcaatgtgttggaaactgtaaagggctgtccactttgcaggagacttaatagtcactgtgttcctggggccctgcgatcaaggcggagaataaaaaggaagcaaaaatcccccaggcctctccctctgaccctttctccggcagggctgttcccagacccctgacccacttctcctccctccttcccccatccctccgagtctcagcgggccattctcctcctccatccatcacctgagactaaagagattaataaacgagactcataactcagctgctgggatgcagcagatatttacggctccgtttcaatttgcagagagattaa

SEQ ID NO: 39013 - DNA, 533 bp, Homo sapiens
ggtactgggggttaggacctcagtatcttttgggtgagacataactcaacacataatagcatgcaacatgaggattgaaataaaaagactaatttatggagtttttctcatttaattggaaagactgggccacatttcttgacacttaaaggcagcagtgggatattgaagtatatggaactatagtctatgtatgaggtcttctgctagaaaataggatttattaatatcccaagtgaagatctaacctcagtttttctagtacattttagtatttcccagatttgatgtgcttttaatccattcttcagtaacatttaaacttaaaaatataatcaaggatatgaactcctttatgaaattaggagctgtttacccatttgtatttggatactttaagcatttcaatctacttgaagaaactaatttttttttagccaagataaaataatttatttgaaaatcaaaatgtggccgggcacagtggctcatacctgtaatcctagcactttgggaggctgaggcaggtggat

SEQ ID NO: 39014 - DNA, 415 bp, Homo sapiens
gatccaatatttaccagcctgtgatcttggggagagattttcccagctgtggtcaaggagagatgtgatgagggaagaatggtcagagagatgctgcactactggctttcaagatagaggaaggggccgtgaaccaaggaatgtggatggcctctagaagctggaaaaaggcaaggaagcagattcttcccaacctaaagaggaggaacacagcctgccaaacaccccagctttagccctgttaaacctgtgttaaacttttaacctatagaactgtaatataacagatttgtgttgttttaagctgttaagtttgcagtaacttgttacagcagcaatagaaaactaatacattctgatggctaacactacatatgcatgggaaaatgtctaaaagaatgtattctccaatgta

SEQ ID NO: 39015 - DNA, 685 bp, Homo sapiens
aatttatctggttattcacatttctgaaaatcacttacttaagtcaaatatgaataaaacaatgactaaatgtattttgtcagaaaataatagtttatgaaataatagattagctatcactttctgcaaataatgggtttctaatgtttgttgacttaaattcatatattgaattaaatttactagtgaaatatcagatcatttaatagtcatttgtgatatcttagggtaataaaattttaaaatatgtatatgtttttgattgaacagacacaacatgacaatctaatgattaagaagatatgggtcctacattttgggtctttccagtattgtcaacagtgtaggagttttcgatgggaaatagccatagtcatcaaaaatccatttatttagttttaaaatatactaaaatattttcattgtaatgtggagtacatctgcctcttaagtttgtgtatattaataattgtatcctcagtgctttgcacatgaaaggcattcagtaaatgtttgttaaataaatgaataaatacagtaaggctactcagtgaggcctgctttccagattctgttctgacgccctcttttcaactcttcagttcatcactatttgctatgagcctcttcaagacaagcatcttgacctagcatcaacctaaacagatttgtctgcccttcctcc

SEQ ID NO: 39016 - DNA, 1929 bp, Homo sapiens
  misc_feature (1867)..(1867): n is a, c, g, or t
gaacggcccaggcaggggccttactagtaagcacgttttgggaagtcctcagggcacgcaggcaccgtgacctcacacactagtgcgctggagtgtgtcattagcatctggaatctctccccagggatgtggtttttgtttgtttttttttttttttttggtattataatgagctaaaagctattcaggggcgagttatcagaggtgagcccgtgctcttcagcggagaagatcccctacctggccgccggccactttctgtgggccgtggggtcctcaaggagacggcccttgggctcaggggctgcgtttccacacgcgcctttcccagggctcccgcgcccgttcctgcctggccgccggccgctccaacagcagcacaaggcgggactcagaaccggcgttcagggccgccagcggccgcgaggccctgagatgaggctccaaagaccccgacaggccccggcgggtgggaggcgcgcgccccggggcgggcggggctccccctaccggccagacccggggagaggcgcgcggaggctgcgaaggttccagaagggcggggagggggcgccgcgcgctgaccctccctgggcaccgctggggacgatggcgctgctcgccttgctgctggtcgtggccctaccgcgggtgtggacagacgccaacctgactgcgagacaacgagatccagaggactcccagcgaacggacgagggtgacaatagagtgtggtgtcatgtttgtgagagagaaaacactttcgagtgccagaacccaaggaggtgcaaatggacagagccatactgcgttatagcggccgtgaaaatatttccacgttttttcatggttgcgaagcagtgctccgctggttgtgcagcgatggagagacccaagccagaggagaagcggtttctcctggaagagcccatgcccttcttttacctcaagtgttgtaaaattcgctactgcaatttagaggggccacctatcaactcatcagtgttcaaagaatatgctgggagcatgggtgagagctgtggtgggctgtggctggccatcctcctgctgctggcctccattgcagccggcctcagcctgtcttgagccacgggactgccacagactgagccttccggagcatggactcgctccagaccgttgtcacctgttgcattaaacttgttttctgttgattacctcttggtttgacttcccagggtcttgggatgggagagtggggatcaggtgcagttggctcttaaccctcaagggttctttaactcacattcagaggaagtccagatctcctgagtagtgattttggtgacaagtttttctctttgaaatcaaaccttgtaactcatttattgctgatggccactcttttccttgactcccctctgcctctgagggcttcagtattgatggggagggaggcctaagtaccactcatggagagtatgtgctgagatgcttccgacctttcaggtgacgcaggaacactgggggagtctgaatgattggggtgaagacatccctggagtgaaggactcctcagcatggggggcagtggggcacacgttagggctgcccccattccagtggtggaggcgctgtggatggctgcttttcctcaacctttcctaccagattccaggaggcagaagataactaattgtgttgaagaaacttagacttcacccaccagctggcacaggtgcacagattcataaattcccacacgtgtgtgttcaacatctgaaacttaggccaagtagagagcatcagggtaaatggcgttcatttctctgttaagatgcagccatccatggggagctgagaaatcagactcaaagttccaccnaaaacaaatacaaggggacttcaaaagttcacgaaaaaattgaattaaaagataaaaattaa

SEQ ID NO: 39017 - DNA, 1196 bp, Homo sapiens
gaacggcccaggcaggggccttactagtaagcacgttttgggaagtcctcagggcacgcaggcaccgtgacctcacacactagtgcgctggagtgtgtcattagcatctggaatctctccccagggatgtggtttttgtttgtttttttttttttttttggtattataatgagctaaaagctattcaggggcgagttatcagaggtgagcccgtgctcttcagcggagaagatcccctacctggccgccggccactttctgtgggccgtggggtcctcaaggagacggcccttgggctcaggggctgcgtttccacacgcgcctttcccagggctcccgcgcccgttcctgcctggccgccggccgctccaacagcagcacaaggcgggactcagaaccggcgttcagggccgccagcggccgcgaggccctgagatgaggctccaaagaccccgacaggccccggcgggtgggaggcgcgcgccccggggcgggcggggctccccctaccggccagacccggggagaggcgcgcggaggctgcgaaggttccagaagggcggggagggggcgccgcgcgctgaccctccctgggcaccgctggggacgatggcgctgctcgccttgctgctggtcgtggccctaccgcgggtgtggacagacgccaacctgactgcgagacaacgagatccagaggactcccagcgaacggacgagggtgacaatagagtgtggtgtcatgtttgtgagagagaaaacactttcgagtgccagaacccaaggaggtgcaaatggacagagccatactgcgttatagcggccgtgaaaatatttccacgttttttcatggttgcgaagcagtgctccgctggttgtgcagcgatggagagacccaagccagaggagaagcggtttctcctggaagagcccatgcccttcttttacctcaagtgttgtaaaattcgctactgcaatttagaggggccacctatcaactcatcagtgttcaaagaatatgctgggagcatgggtgagagctgtggtgggctgtggctggccatcctcctgctgctggcctccattgcagccggcctcagcctgtcttgagccacgggactgccacagactgagccttccggagcatggactcgctccagaccgttgtcacctgttgcattaaacttgttttctgttga

SEQ ID NO: 39018 - DNA, 1222 bp, Homo sapiens
gaacggcccaggcaggggccttactagtaagcacgttttgggaagtcctcagggcacgcaggcaccgtgacctcacacactagtgcgctggagtgtgtcattagcatctggaatctctccccagggatgtggtttttgtttgtttttttttttttttttggtattataatgagctaaaagctattcaggggcgagttatcagaggtgagcccgtgctcttcagcggagaagatcccctacctggccgccggccactttctgtgggccgtggggtcctcaaggagacggcccttgggctcaggggctgcgtttccacacgcgcctttcccagggctcccgcgcccgttcctgcctggccgccggccgctccaacagcagcacaaggcgggactcagaaccggcgttcagggccgccagcggccgcgaggccctgagatgaggctccaaagaccccgacaggccccggcgggtgggaggcgcgcgccccggggcgggcggggctccccctaccggccagacccggggagaggcgcgcggaggctgcgaaggttccagaagggcggggagggggcgccgcgcgctgaccctccctgggcaccgctggggacgatggcgctgctcgccttgctgctggtcgtggccctaccgcgggtgtggacagacgccaacctgactgcgagacaacgagatccagaggactcccagcgaacggacgagggtgacaatagagtgtggtgtcatgtttgtgagagagaaaacactttcgagtgccagaacccaaggaggtgcaaatggacagagccatactgcgttatagcggccgtgaaaatatttccacgttttttcatggttgcgaagcagtgctccgctggttgtgcagcgatggagagacccaagccagaggagaagcggtttctcctggaagagcccatgcccttcttttacctcaagtgttgtaaaattcgctactgcaatttagaggggccacctatcaactcatcagtgttcaaagaatatgctgggagcatgggtgagagctgtggtgggctgtggctggccatcctcctgctgctggcctccattgcagccggcctcagcctgtcttgagccacgggactgccacagactgagccttccggagcatggactcgctccagaccgttgtcacctgttgcattaaacttgttttctgttgaaacaaaaaaaaaaattctccagcgct

SEQ ID NO: 39019 - DNA, 1164 bp, Homo sapiens
gaacggcccaggcaggggccttactagtaagcacgttttgggaagtcctcagggcacgcaggcaccgtgacctcacacactagtgcgctggagtgtgtcattagcatctggaatctctccccagggatgtggtttttgtttgtttttttttttttttttggtattataatgagctaaaagctattcaggggcgagttatcagaggtgagcccgtgctcttcagcggagaagatcccctacctggccgccggccactttctgtgggccgtggggtcctcaaggagacggcccttgggctcaggggctgcgtttccacacgcgcctttcccagggctcccgcgcccgttcctgcctggccgccggccgctccaacagcagcacaaggcgggactcagaaccggcgttcagggccgccagcggccgcgaggccctgagatgaggctccaaagaccccgacaggccccggcgggtgggaggcgcgcgccccggggcgggcggggctccccctaccggccagacccggggagaggcgcgcggaggctgcgaaggttccagaagggcggggagggggcgccgcgcgctgaccctccctgggcaccgctggggacgatggcgctgctcgccttgctgctggtcgtggccctaccgcgggtgtggacagacgccaacctgactgcgagacaacgagatccagaggactcccagcgaacggacgagggtgacaatagagtgtggtgtcatgtttgtgagagagaaaacactttcgagtgccagaacccaaggaggtgcaaatggacagagccatactgcgttatagcggccgtgacagtgctccgctggttgtgcagcgatggagagacccaagccagaggagaagcggtttctcctggaagagcccatgcccttcttttacctcaagtgttgtaaaattcgctactgcaatttagaggggccacctatcaactcatcagtgttcaaagaatatgctgggagcatgggtgagagctgtggtgggctgtggctggccatcctcctgctgctggcctccattgcagccggcctcagcctgtcttgagccacgggactgccacagactgagccttccggagcatggactcgctccagaccgttgtcacctgttgcattaaacttgttttctgttga

SEQ ID NO: 39020 - DNA, 996 bp, Homo sapiens
gaacggcccaggcaggggccttactagtaagcacgttttgggaagtcctcagggcacgcaggcaccgtgacctcacacactagtgcgctggagtgtgtcattagcatctggaatctctccccagggatgtggtttttgtttgtttttttttttttttttggtattataatgagctaaaagctattcaggggcgagttatcagaggtgagcccgtgctcttcagcggagaagatcccctacctggccgccggccactttctgtgggccgtggggtcctcaaggagacggcccttgggctcaggggctgcgtttccacacgcgcctttcccagggctcccgcgcccgttcctgcctggccgccggccgctccaacagcagcacaaggcgggactcagaaccggcgttcagggccgccagcggccgcgaggccctgagatgaggctccaaagaccccgacaggccccggcgggtgggaggcgcgcgccccggggcgggcggggctccccctaccggccagacccggggagaggcgcgcggaggctgcgaaggttccagaagggcggggagggggcgccgcgcgctgaccctccctgggcaccgctggggacgatggcgctgctcgccttgctgctggtcgtggccctaccgcgggtgtggacagacgccaacctgactgcgagacaacgagatccagaggactcccagcgaacggacgagggtgacaatagagtgtggtgtcatgtttgtgagagagaaaacactttcgagtgccagaacccaaggaggtgcaaatggacagagccatactgcgttatagcggccgtgaggagatcttcagggctcgtgaattctgattccgcccagcagtcactctccagcccttcggtatccacgaagttggtggggtgctgaggtgatgcttcagactcagtgtggcccacatcgactttataacttaatatggcaaaatgatttgtacagtgatgtataagatga

SEQ ID NO: 39021 - DNA, 425 bp, Homo sapiens
gtgtcaggcattggaattgcgtgattgccttctctcggtctttattgcctattagaaatatttccacgttttttcatggttgcgaagcagtgctccgctggttgtgcagcgatggagagacccaagccagaggagaagcggtttctcctggaagagcccatgcccttcttttacctcaagtgttgtaaaattcgctactgcaatttagaggggccacctatcaactcatcagtgttcaaagaatatgctgggagcatgggtgagagctgtggtgggctgtggctggccatcctcctgctgctggcctccattgcagccggcctcagcctgtcttgagccacgggactgccacagactgagccttccggagcatggactcgctccagaccgttgtcacctgttgcattaaacttgttttctgttga

SEQ ID NO: 39022 - DNA, 535 bp, Homo sapiens
caaagtcctcagaggccagagagaggtgtaggaactgtgctagtgtaaggcagtgcctgctacagtgggtccagatgaaatactgggaggtaggaagaaaatctggatttcatatcatccatttttaaatgaaaaattaagctttaatagtgttaaatgcgccacagagaacagtgtctatgtcactcttacaagagatgcacaaaaccaaggtgtacagccttcaagtgtgttctcaaaggagggtgcatgccttaaaaattgtggagaccactgctctgtcatctgtgattcccctgaaaacctctgggtacatgaagccctccccaaggggaatctggacacccagcacattctgcccacagggagatcttcagggctcgtgaattctgattccgcccagcagtcactctccagcccttcggtatccacgaagttggtggggtgctgaggtgatgcttcagactcagtgtggcccacatcgactttataacttaatatggcaaaatgatttgtacagtgatgtataagatga

SEQ ID NO: 39023 - DNA, 829 bp, Homo sapiens
cgcccagaagctcctgctcagtaactacagacgcgaagctcagcctctcggtttgggaattttcttggaggccgaggccctgcgcctctgtctgcacccaaggcgaccgcccagcttacccccggctcttctgagcacagggaggcctcccagcaaagcctgaaccctctaagtttagctgcaggcttcgaaccccgaccgtccccgccgagccttgggctgctgaggtggggatgaactgggcgaaagacacttgggagttaggaagaaacaaacaagcagggaagtgaccaggagacaaggtgagactttgcccggctcaggtctgaactgagtgttggagataaccacagttaacaaaataaacaaaattattcgcccccgtggagctgttagcaaccctggtgcctgggaagcctggaagaggctcgggttagtaacaacctccaggatgccctccgaactggtactggcgccgggactctagacaaggtccagattcccgggcccttccccttacgggtgcaaaaagggagggtcaggacctgccagtcctggcttcaggatgttgactggacggacctggactcatgggaactgtgcgccaaagtcctgggagcaaagtgtcataacgctcctcgtttgtctcttgccttcacaggagacagccctgctgcaagcggccagtgggaatccttggcctttgggggtatgatccaagaatgtaaacgctagcttttcagtgttttcgatttcgtgatattcaatgcatacaatacaatgtgactcttgaagcttaataataaaattatcattcttgagcccagca

SEQ ID NO: 39024 - DNA, 408 bp, Homo sapiens
gttgctatgaaagattctcatattcactgctttcaaacgcaaaagttgttcatcctaaactcaagtgtgaaacttttaatttaatttaattaattaattaatttttttgtgagacagagtctcactctgtcacctaggctggagtgcagtggtgtgatcttggctcaccacaagctccgcctcccaggttcaagcgattcccctgcctcagcctcccgagtagctgggactacaggtgcccgccaccacacccagccaatttttagatttttagtacagacggggtttcactatgttggccaggctggtctcaaactcctgacctcttgatctgcccgccccagcctcccaaagcgctgggattacaggtgtgagccaccgcgcctggctgaaacttttaattttaaa

SEQ ID NO: 39025 - DNA, 392 bp, Homo sapiens
ggctggtcttgaactcctgacctcaagcgatccgtctgcctcggcctcccaaagttctgggattacaggcgtgagccactgcgcccagcccattattatactttctgacaaaatgtatatatgtatagtcctgacagcctgaggtggaagaaaggtagttaacttagatacaaataactgcttgcccatttaggaatctaagactaagcaattaacattctcacatgtatctccctgcacatgtgtacacatatctgagaagtgcctggtttggttaactgtcttctgatcagaatccattacttactaagccaggcacagtgttgtgtacctgtagtcccagctacttgggaggctgaggtggggagatcacttgaccccaggagttcaaa

SEQ ID NO: 39026 - DNA, 439 bp, Homo sapiens
gccccaaatgacagctccggctcgagctttggcggcgcccaggcaattcccaagacctggcggcggagtctccccctgcggcagattctcggcagaatcacttgaacttttcacgaagttcttagaggggcaagatgcgaaggaaggaaccaaggagatgttttctctcagcagctgcatcccgcttcttctttgccatagatttatttttaaggggcgtctggtagataaagccctagaccttgtccacactctcacccccatccccaactttccctggaccggtgccgcccccacttgatgcttgctcaaggccggggactggagcgggctacttgtatatttcgttgtcagtctgcagaatgtgtttgatttttatttttccctccttctctgacatgtgtcaaggaataaagactggatacaggtccattacgtc

SEQ ID NO: 39027 - DNA, 460 bp, Homo sapiens
aacaggttctccatcccatagtgcctgtgacgggctcagataaaatcagcaggagtggctggtgctccaccgctggcctgttacagctggctcctggacagccgctcccccagcatccaggagggtcatggactaccacccaggccgtggcccctggaaccgccctacctaagctattgccagcaaggacaggcacttgagcaaaggcaacagtgtgctcacttatggtggggggagggatctggcgaggcatagctaggtcctcatgtccctcgtaggttcccaagcttggagtcagtgccacttcccactgtcctcatcccctgcccacctcttgcctcccaccaggctgtagcatagactgggcaacccctgaggatttctgggtcagcactaccctggcccaaagagattaaagagccaggggaccggagaggagaggaaagtttaaaaatttaaa

SEQ ID NO: 39028 - DNA, 412 bp, Homo sapiens
attatgttaagttattgtaaaacacagaaataataaaatttgtcagtcatgttcttgactaactaccttggacatttcaccattcaaaatcgtcttgttttaatcctctttaaaggatggtttataatcagctataggactttgacacatgctctcaaatgcaagtttctgataactttggagattatgacattggaataaaggaaaaatgtacaggactcatgaagagctaaaatattcatgaatatcaagcaaaacaagagttaacaaaatggactttttaacctttttgcttaaaatgttgctgatccttattttgtttttcagagtcaaggaaacttattttaagctatttatagcctctaataattatgtaaggtatacttctgtaaataaaattcagagcatattt

SEQ ID NO: 39029 - DNA, 347 bp, Homo sapiens
ggctctttaccagggatgcttcatataaaggagggagaacaatttccttgacaaccaattaatatgtatagcttaaggctatgactgtattctgcaagaaatagattacatttctgaggtctgcacatctgaagatattataaactagctaggagatttttatgatgatatgatacagatcagcaatacgtaagacagaaagggggtttcacccagcaagagttaggatttatagtcccagtatgcccgagttttacatattgtgaactttgctaaccttcacctttatcaacaagctgtgagtgactctccagcacaaagctttgagtatcaagcatgcatatagt

SEQ ID NO: 39030 - DNA, 732 bp, Homo sapiens
ataatattagaatgggtaacgcctttgtaagtcggtgattcaaaagatcaataaatctgaaagcacaaatataaaacatttatatttggtatcaataaataaataaataaagccaaaatacaaacaataaaatcttaagattatctgtaactcataagactgaaaagggctaacttctctataaaaagttctcttacaaatctttgagaagaccttccttactttctgcctcctccagacaaaactgggtaaaggattttaataggcaattcataaaagaagaataaagtagaggtcatataaaacaatatttaacctcactcataattaggaaaaaaaatagtaatttagcatttctttcatttaccagattgtcaaaaattttaaaatttgataataggcaatcatgtagacagtttaggacagtggacactgttgagcattattgactggaatatatagtacttatataacctttttagagggccatttgacaatgtctgtgaaaatcatgttctttatgacacggtaaattattctgcaaagaatgtgtcccatagatatattcatagaagtaggcatatatacacacatgcttatagtattaaataatagctgtgcatttattaaaaagaatacagtctggggcactgtgccatgcacctgtggtcccagctacttgggaggctaggaggctgaggcaggaggatagcttgagcccaggagttcaaa

SEQ ID NO: 39031 - DNA, 714 bp, Homo sapiens
ggaggcttggcagtctgataccatggtgccggcatctggtgagggtctcctttctgcatcagcccatggtataagagaaagagagggccaaatttgcttttataataggcccactcccacaataatgacattaacccatctgcttcttactagtgattaataatcaccacttattaggccccacctcctaacacttgcattgaggattaagcttccaacccatgaactttgggggacacattcaaagcatggcacgggcctagtgaaagactggactctttcagtagggccaaattcttgtatggatctgatagcaaaccaacttaaaattttgtttttaaatctcgcaagctttctttttttcttcctttctttccttccttcctttttctttcctttctttccctcccctcctctcccctcccctcccctttttttgtgaaagcaggtttattaagaaagtaaaggaataaaagaatggctactccataggcagggcagccaaatcttgtaagccttcttcagtttggagaaaatgagaaataaagaggaaggatattccaaaaaaataacatgccattctgaattgtttttaaaaattagggaattggccagatgcggggctgatctgtaattccagcactttggaagacttaggtgggaggatcacttgaggccgggagttcaagaccagcctgggtaacatagtgagac

SEQ ID NO: 39032 - DNA, 316 bp, Homo sapiens
taagtgggccatatgtgaactgtatctcaatacagctgttaaaaaaaaaaaatctttgagaggccaaggcgggaggatcacttgagcccaggagttcaagatcagccctggcaacacagcaagaccctgtctctacaaaaaattttttaaaaattagcgtggtgtggtggtgcatgcctgtagtcccagctactcgggaggtttaggcaggacgaccgcttgagcctgggagatcgaggctgcggtgacctgtggttgagccactgtataccagtccagatggcagagggagactctgtctcaaaaggaaaaaaaa

SEQ ID NO: 39033 - DNA, 398 bp, Homo sapiens
tcccaaacttcctaattggatcctctcaagcttgttacagtgctgaaaatcacaggtggtttacacaacagaaagatttctagagtgatgagaaagtgaggatgtgatattttgtcatgggttgagcataagcaacctgctaaaatgggttgccaaatgctacctatatcccaagagaaggaagtggaagtgatagtgtagctatataaataatgtgagaaaaaaatggaaaatagatctgaattcactgcagaatgtgggtcggggaaaaggtgaaattttagtggagtgaggaaaacatacatagataattgctataacatgaaatgtaattggacttgctttgcctatgaaatgagagtggctaaataaaaaagaattcagcctggttattagaa

SEQ ID NO: 39034 - DNA, 505 bp, Homo sapiens
tttattttggttcaacttgcttctggtttacacataaaaactgcgatgtcactgctgtaacttataagaaggggtgagcaggttcaggaaaacccttattacaaatctgagaaagcagttatgattacgagataaggatgcaatcccaggggaggttctaaatgtttccatgtaatctggacccaagcaaccgtcgtcaaaccactgttcatgaaatctgtgggtgcaaacaaattgagctgtcaggctgcaggacgcgagcaaacactggccaggcaaatggcatttcctccctccagcacatttctgctgctgacccgcctgctctaaggcccactgaaacctgacacccagaccagctggcctctccagggaacgggcctggcaccaaacgctccatctgttagcacacctcaagccacctggccactttgctctttttccctggttcccttacaggcaggagaatcttgttcctctgccacctgtaaactcacagagcctg

SEQ ID NO: 39035 - DNA, 770 bp, Homo sapiens
agccctgttcctgctccggctcctgcggggatggatgcttcacgcagtaagcgagtaagcgagccctggagaccggggccctgggtgtgcggtcggctcagtgccacgcggtgagataggcatggttatcaacccacgccaaggcggttgtgtacctggcatagaaaacactgctgttgaatgttgtttccatagtcattcgccagcgtccactgatgagaggtgccaccacggacacccggccttgctccgtcgaagctttggtccattaggaccaaagtcaggccccagcgggcctccctgccattcctggacggcctcgcgtcctcccagagcctgaccttctcttatctctgcagcctaagtcgcggaagcgtagacacccggcttttcccgcgtgctctatcgggctcccctggacacggagggtggagcagaaagagcagaggggccggtgggagccatggggagtccgcctagctccagaggacaccttacctggatccgcctttgtagcctcctcctggctctgggggctgtcctgtggggtcccgagtagctgaaagacagcccctccatgtgaggaagcccccaactggggaaaaccccctcgtggactcattcctgtccctgcatgtggccttcacctgactgtctgcattgaggcatcctctgccaagagcaatttcaaagtggcaggaaagtgctgctttcaacatctgccacatttgcaagaagagcaaaggtggcccatttgagaccacccttga

SEQ ID NO: 39036 - DNA, 1010 bp, Homo sapiens
agccctgttcctgctccggctcctgcggggatggatgcttcacgcagtaagcgagtaagcgagccctggagaccggggccctgggtgtgcggtcggctcagtgccacgcggtgagataggcatggttatcaacccacgccaaggcggttgtgtacctggcatagaaaacactgctgttgaatgttgtttccatagtcattcgccagcgtccactgatgagaggtgccaccacggacacccggccttgctccgtcgaagctttggtccattaggaccaaagtcaggccccagcgggcctccctgccattcctggacggcctcgcgtcctcccagagcctgaccttctcttatctctgcagcctaagtcgcggaagcgtagacacccggcttttcccgcgtgctctatcgggctcccctggacacggagggtggagcagaaagagcagaggggccggtgggagccatggggagtccgcctagctccagaggtaagggcgagaatggcttcatcctccccccttcatcctccaggccagcctcggacccagcagcatcctgcccagggggcacccccacctccctggatgccagccagagctggagaatattcacgacccagaggagggcctggactccagagaagggaccccctttcacagtgcactctgtgtctgtgtggatctgatttcatgtctagtgaccactatttttatcctcccaattcctaggacaccttacctggatccgcctttgtagcctcctcctggctctgggggctgtcctgtggggtcccgagtagctgaaagacagcccctccatgtgaggaagcccccaactggggaaaaccccctcgtggactcattcctgtccctgcatgtggccttcacctgactgtctgcattgaggcatcctctgccaagagcaatttcaaagtggcaggaaagtgctgctttcaacatctgccacatttgcaagaagagcaaaggtggcccatttgagaccacccttga

SEQ ID NO: 39037 - DNA, 914 bp, Homo sapiens
  misc_feature (468)..(468): n is a, c, g, or t
ctgggattacaggcgtgaaccactgtgcccggccttgatttgcctttgaactctctctttggcatctctttgggatagattccaaaatctttggtgtgggacctgaggcccttcacaggcagacactaagcccccttcagggtgccagttcagccctgctgtgtcctgggccttgccctgtggtgtgcccattgttgctggcctctgtcacttccatacactttatcttgcttggtatacaccattctgttcttgtccatctggggaatccgttggtccttcaagttctggctcacaggttggcccctctgaagcctcttggcatcgcctggaattctgtgagtacttgctgcacttggccgctgtggccgggtgtgctgctgctacgggcttacatgcctgtccccactggccttcactttctgtgcaggccagggactggagctgtttaaatcccagctccaagcnacagtgccctatggcagatgctcagtaaacgctgagctgaagtgaatctgtgtatttcagtaagagaaaaaaaaaagagctgaggatgcagccggtgaccggaatgtgaattgggctctattggtagtgtacccgaggtagattatttgtactcattgagtctttatcttacctgtaaactgatgagaacagtgtatagttcattgtcaggaaatatgcagagttacagttgagctttgttggaaaatttaaaaaagtggaaatgagaaaacattttaagctgtaagatagcatgtgtgtataaactagtattatttgtaggaaaatatgccaaatagaatgaagtataggcttcctcagtgggacactggattttcagattgcttctaaaatgctgtccttgacgtgaactttccatgttatccttttttttttttttttttttt

SEQ ID NO: 39038 - DNA, 209 bp, Homo sapiens
tgatacgaatcagctcggtaccctcgataagggcaattttaagctgtaagatagcatgtgtgtataaactagtattatttgtaggaaaatatgccaaatagaatgaagtataggcttcctcagtgggacactggattttcagattgcttctaaaatgctgtccttgacgtgaactttccatgttatccttttttttttttttttttttt

SEQ ID NO: 39039 - DNA, 547 bp, Homo sapiens
tctcccttgctaatatctagatttttttagtacctctaatactaagagatttttaatttctttgctatacttctgtccttttcttctctattcatgctcaaaagaaagtaagtgctataactactcttttttgtttgcttaaaaaatgactcatgaacttaaggtacttaagtatggacactcctgacaactaatacccatagcggagaactactgagttaaagggtacccagtgcaaatagagggctgaaaacaaggaaggtcagtcagtgaatgggaaagaaatatgacaaagcctaggaaagggagctcctctagcatcaaactgtctgcatgtcgagtctcagaaaaacaaggattcgtcagtcaacccctttctgcatgcacagtggatttagggtaaagtttatgttaccctgtctttggccgagcgcagtggctcctgcctgtaatcccagccctttgggagactgaagcaggaggattgcttgaccacaggagtctgagaccagcctgggcaacatgacaaaacctcatctctactaaa

SEQ ID NO: 39040 - DNA, 513 bp, Homo sapiens
ggttaaaagcccagagaagaccgccaggggcgcgtggaaatggtgtccctcgtctccaaggcccagacggagcttagcttcctcttgaaggagccatatctgtatttctggtgaacgtcgtgtttgacatcaaaggaatgtttagagacatgatttcagccttccttacgcagagaatgctcatcaaaaaataaaatggacacaccatacactgacgtcactcagatttctatggctggaagttaacaaatattgttttcaaatgcgtgtagcctgatgctccagagttagtttggcgagcctcagcattttctgtcaggcacaagaaagaaaagactccagacaccatgatgtggaacgtggagtggggatgtttggtggccttgaatgcctattccatattgttatgcaggctggatgtgatggctcatgcctgtaatcccagaactttggaaggcctaggcaggtagatggcttgagctcaggagttcaagactagcctgggcaacatgg

SEQ ID NO: 39041 - DNA, 329 bp, Homo sapiens
gagccaccatgcccagcccttggtaataactattccttaatgtgttttatcacagtttaaactccttaccctcctctgtcgtgctccccacacccctggtcatgagatatatttgaaatgggagccacgggcaaggggtctttgtatgtctagccctagtgtctcgcgcatagtaaaaggataaagaatatttgttttgactgtacctgagtagttcacatggaaattactgaagccctgtggtgcgtatgtgttaagtaatactgctgccacgactgtttatcaaacatgtatggggtgagatattacttttacccaggagttgctcc

SEQ ID NO: 39042 - DNA, 395 bp, Homo sapiens
ataggtgtgagccactgcctctggcccagttgaagtgtttcaaaagtcctgtagctcatgaagatccgagcctgaaacagtgaagtaagaggatttcttccataatgtagaggagataactatagtgtagagaagttcattagacttctttttacctgaagaaactacttgtgcgtttttaagttaacacctaaatttctaaattacaagttgaataattgcataagatataatttggatgtttggtattgacatttaaaaataaagtggttgcattgctcttttaaatgtatccagtgaaatctaaataccctagcaattggatacttgctttcatctcttttttaaaaaaaaatgctaaggtgcaagatgttggtgttacaaagtactcttaa

SEQ ID NO: 39043 - DNA, 304 bp, Homo sapiens
gaagtgagagaatgactagtttctggcagtgtgacaccatgagcatgctcctaggctaatggagcagatggaagagctccctccaagagaggctccctgcagccctccccttttttcttctgaaaatgtgtgtctttcttttcaagccacgacttaaagtcttattttgttcctactcttagaaacagtcaaaaagagccccataccgtaccggccattttatgaatcaatgtaattttaatgcagagggatagtaaagcattatttgtctctccggccttggttccttttctgcatactgcaa

SEQ ID NO: 39044 - DNA, 367 bp, Homo sapiens
ttggatattgggatataggaataagatgtggatactctggattctatcatatagttccaaagagtgttgagtttcgtgttttggtagcttagttggaattagtttttttggtttttctgtttttatttttatttttttgtagagatgaggtcttgctatgttgcccagtctggtcttcaactcttgaactcaagcgatcctcctgactcggcctcccaatgtgctgggactacaagcgtgaaccactgtgcctggcttcttgctgatttacagaccatacatgcacccccagcaaaagatttaaaaactaatcttcagccagggcaacacactgagaccttgtctctaacaaaaattagctgggtgt

SEQ ID NO: 39045 - DNA, 456 bp, Homo sapiens
gcgtcgacctaaataacagaagaaaaaccacaaatgatcaaaatagaaaaaagatgctaaaccttaccaaaatgtaaataatgaaaacgcacacaaaacctttttcaatgatcaaattggtgaaactggtaaagactgcttatgcaggagtggactctacagagaaagtctaattcccaaatgctggccgggtgcggtggctcacgcctgtaatcccagcactttgggaggccgaggcgggtggatcacgaggtcaggagattgagaccatcctggctaacacggtgaaaccccgtctctactaaaaatacaaaaaattagccaggcgtggtggcaggtgcctgtggtcccagctacaaggaaggagaatgatgtgaacccgggaggcggagcttgcagtgagctgagatctcgccactggactccagcctgggtgacagagcaagactccgtctc

SEQ ID NO: 39046 - DNA, 318 bp, Homo sapiens
ctattgcacctcttcatttggaagattttaaaacaaacaggacaattattttaagttgcacatattagagttcttaaaaaagaggctcagtgtttttgacaacaaaatcatgtaacaatggaaaaacatttcccaacatcacttttcttcatgtaacatggatttctttcatatagtaattattttctcatcccttttttaaaaaaagaataaagttgtagagtagaggaagtaagcatttcatttaacctaaatatgtatatgagcctgtttctgtgcatacagcaaaaatttaataaaacaatagctttgccttta

SEQ ID NO: 39047 - DNA, 467 bp, Homo sapiens
agtgcacaagctttccccagcaagaaaaataacatgtgtgtgatgtttctagagaaccccattagagattcagaacccaaggtttttactgggggctggtcacgtagacaccttcaacctgacatgtaccaacatttcatactcccagaaggagagcaggtattcagcataaaccacattgtgtgtttaaatgttctaggtcagtgagccacctttatcacgtaggggaagtttttttttttttaaatcagtgtaagaaactttaccagtcaaattcccaggtcctagccaaaggccagtgttgcaagcatgcctttttgaaaatagtaatagtcacactaggtgtagtggctgatgcctataatcccaacactttgggaggccgaggtgggaggattgcttgaggccaggagttcaagaccagactgtgtaacataacaagacctcatctctacaaaaaataacta

SEQ ID NO: 39048 - DNA, 391 bp, Homo sapiens
agagattatttggagacataatggccaaaagcttcccaaatctgatgcaagacataaacataaaaatccaagaagctcaatgaattccaaataggatgaactcaaagagatccaccccaagacacaagacacagtatactcaaactgttgaaagacaaagagagaatcttgaaaacaacatgagagaagcaactcattatgtagaaggaatcatcaatacgattatcagaattattgtcagaaatgtaggagtccagaatgcaatgggctgacatagtcaaagggctacagaaagaacaaaacaaaacaaaaaaaactgccaaccaagaatcctacattcagcaaattgtccttcaaaagtgagtaagaaattaaggcattctcatattaa

SEQ ID NO: 39049 - DNA, 828 bp, Homo sapiens
cagctacttttaaaaatattgaaataataaatacattttgaatatacatgaactatagtcaccttcttgtgcaatagaacaccagaacttattcctcctatctacctgtaactttgtaccccttggcaaatgtctttcctttctctgtccccactccccaaccctaccacccagcctctggtaaccaccattctactctctacttccttaagtttttagatttcatgtataagtgagatcatatggtatttgtctctctgtgcttgtaaagccctaactttttgagcaatttttttttaccctggaataataaataagttttgtttatttaagaagaaattactccagatttattctaccctaggtatataccccaaagaactataaattgaaaagaactataaattgaaaaagcacttgtgagttttaatatatttggtctgaactaaaagtttacgaatagaatttcgcttgctttcaaatcaaagtatcagcttcagtagataatcctatgattagaattacttctaacataaagttttatgtttctgtttgtgacagagactaccagttgccttccaatacatttttttcttcttccttagtaacaaaccttaggaaatgtgtctagcttttagtcttttagactacattttctggccattcttaaagcaagatgtagccatgtgaataattctggtcaataagaagaaagctgaagtgttgtgtaggattctaggagggatcctcccttctgctgctgaaatgaggatgccatggttagaaatcaaacagtcatcagagaacatgaggaagtaagtcagggcc

SEQ ID NO: 39050 - DNA, 238 bp, Homo sapiens
atgtccctactgaagggagaggagaattgagtgttatgaatccattgaaatgtgtgccctcactccagcatgatgatgatttgcatgtttctggttttgcatcagaagctgctctgaaggtgcacagaaaagcagctgtatgagttagagtcccgatgtttacccaagggcagcatgactaggggccctacctgctctggcagggctgtcagagacacatttcacttctgggaggagg

SEQ ID NO: 39051 - DNA, 4573 bp, Homo sapiens
tagggaattcggctgaggctttgccggcgcggcgaagaaggtggcaggcggcaggctgagctccactggacacagcctagtggcccggggcgcgcccgctgcactcccggcgtccaggtctggcgcaccgcgggaggcaggcgcgctgccactctccgcagccgcttcgtcccctggtctgtctcgcctcggcttcagcgggcaaacccacagctggtctcctgggcgctgatctccctgcaatccttgcttacataaggcgggcgggcgtgctcccgcccccggttaccccccagaggagttgtgctgcgccctctacgcctccttggcgagcgccttcgcgcacccgtgcgccctactctaggatgtgaacctccttggccacccagcagcgacagccgggacatctctccgccggcgtgagaacactgagattggagaccagagcgcctgacggtgcccaagcttcctccctccgttccctcctcctccaactccccccacttcaacccccacccccacccccacccccggtgtctgtgtgtgttcctcacaggcgaggggacccggagagcagtccagacttcggcgtgcggcggagctgcggctgctcctgctgctggggggagcggcggaggtggccgccttgcgcctccctggacttcccaagtgggggcagagcagtcgctcgcgggagacgtcagttagaaggcattgggaaagagggaccttcaaactcctcctcggcgtctcctctcctcccccttttggcccctgcctttggagaaagtggagtgtggcgcttggttgtcgttatttcttcggactgcttcgcggtgcacggattcagcttctgcccagtggggctttcagctgtttgcgcgtctctctgtccccctcccctccccccggcacacctctgtctacgatgaggaaaggtctgcgggcgacagcggcccgctgcggactgggactgggatacttgctgcaaatgctcgtgctacctgccctggccctgctcagcgccagcggcactggctccgccgcccaagatgatgacttttttcatgaactcccagaaacttttccttctgatccacctgagcctctgccacatttccttattgagcctgaagaagcttatattgtgaagaataagcctgtgaacctgtactgtaaagcaagccctgccacccagatctatttcaagtgtaatagtgaatgggttcatcagaaggaccacatagtagatgaaagagtagatgaaacttccggtctcattgtccgggaagtgagcattgagatttcgcgccagcaagtggaagaactctttggacctgaagattactggtgccagtgtgtggcctggagctccgcgggtaccacaaagagccggaaggcgtatgtgcgcattgcatatctacggaagacatttgagcaggaacccctaggaaaggaagtgtctttggaacaggaagtcttactccagtgtcgaccacctgaagggatcccagtggctgaggtggaatggttgaaaaatgaagacataattgatcccgttgaagatcggaatttttatattactattgatcacaacctcatcataaagcaggcccgactctctgatactgcaaattacacctgtgttgccaaaaacattgttgccaagaggaaaagtacaactgccactgtcatagtctatgtcaacggtggctggtccacctggacggagtggtctgtgtgtaacagccgctgtggacgagggtatcagaaacgtacaaggacttgtaccaacccggcaccactcaatgggggtgccttctgtgaagggcagagtgtgcagaaaatagcctgtactacgttatgcccagtggatggcaggtggacgccatggagcaagtggtctacttgtggaactgagtgcacccactggcgcaggagggagtgcacggcgccagcccccaagaatggaggcaaggactgcgacggcctcgtcttgcaatccaagaactgcactgatgggctttgcatgcagactgctcctgattcagatgatgttgctctctatgttgggattgtgatagcagtgatcgtttgcctggcgatctctgtagttgtggccttgtttgtgtatcggaagaatcatcgtgactttgagtcagatattattgactcttcggcactcaatgggggctttcagcctgtgaacatcaaggcagcaagacaagatctgctggctgtacccccagacctcacgtcagctgcagccatgtacagaggacctgtctatgccctgcatgacgtctcagacaaaatcccaatgaccaactctccaattctggatccactgcccaacctgaaaatcaaagtgtacaacacctcaggtgctgtctccccccaagatgacctctctgagtttacgtccaagctgtcccctcagatgacccagtcgttgttggagaatgaagccctcagcctgaagaaccagagtctagcaaggcagactgatccatcctgtaccgcatttggcagcttcaactcgctgggaggtcaccttattgttcccaattcaggagtcagcttgctgattcccgctggggccattccccaagggagagtctacgaaatgtatgtgactgtacacaggaaagaaactatgaggccacccatggatgactctcagacacttttgacccctgtggtgagctgtgggcccccaggagctctgctcacccgccccgtcgtcctcactatgcatcactgcgcagaccccaataccgaggactggaaaatactgctcaagaaccaggcagcacagggacagtgggaggatgtggtggtggtcggggaggaaaacttcaccaccccctgctacattaagctggatgcagaggcctgccacatcctcacagagaacctcagcacctacgccctggtaggacattccaccaccaaagcggctgcaaagcgcctcaagctggccatctttgggcccctgtgctgctcctcgctggagtacagcatccgagtctactgtctggatgacacccaggatgccctgaaggaaattttacatcttgagagacagacgggaggacagctcctagaagaacctaaggctcttcattttaaaggcagcacccacaacctgcgcctgtcaattcacgatatcgcccattccctctggaagagcaaattgctggctaaatatcaggaaattccattttaccatgtttggagtggatctcaaagaaacctgcactgcaccttcactctggaaagatttagcctgaacacagtggagctggtttgcaaactctgtgtgcggcaggtggaaggagaagggcagatcttccagctcaactgcaccgtgtcagaggaacctactggcatcgatttgccgctgctggatcctgcgaacaccatcaccacggtcacggggcccagtgctttcagcatccctctccctatccggcagaagctctgtagcagcctggatgccccccagacgagaggccatgactggaggatgctggcccataagctgaacctggacaggtacttgaattactttgccaccaaatccagcccaactggcgtaatcctggatctttgggaagcacagaacttcccagatggaaacctgagcatgctggcagctgtcttggaagaaatgggaagacatgaaacggtggtgtccttagcagcagaagggcagtattaaccaccatgctggaaggggaaatgaaggacaaaaatgcacagggagtctgtggccgtccaggtgaatcacagctgaggaggaaatccagatgagaccaatgcacttcacaggcaagaatgcagcaggagccagaaggaaaacagatacaactgcccatgtacatgcccactttactcggagatcatcacgggagttaagaaaaattgtgtaaatttgtaccttgaatttagctatcaacctaattttcctcttagttgggctgtatgctgtgtggtacaggatcttacagtttcctaggaaacgctttttattgctatccagatatatggataaactttcttaacaaacccaatttctacaaatgttgtttacatcaaattggacagggatgcagacactgtccatggctcgttctatttttgttcaaatcatttgaagttgaagctgtggacggtttgttgtgtctatttcagattagtaatttacagagaaatcacagacttttgctacaaatcgtgtgcatcaagtgtctcagataatcctcccatcagtgttctgtttctagaacttgtagaaccagtgttactgtttgtatcagggaagtggagaatctaagtgtaaaaaagaaataactaagactcctattccttggagggacccttctggtgccctttgggaataaagctgtagcactgcagggaagacagtgattcatgttcaaccccacaaacaagcatttttttcacaacatgtgtgtttgtttgtaatatgcaatatgaagtgtttttttttaaaggtattattattatttacaggtattctggtaaaatgatttttttaaatttctat

SEQ ID NO: 39052 - DNA, 502 bp, Homo sapiens
atttttgagatgggggtctcattctgtcaccaggctggagtgcagtggcgcaaacacagctcattgcagcctcagtctcgcaggctcaggtgattctaccaccccagcctcccaggtagctgggactacaggcatgtgccgccatgaccagctacttttttgcatttttttgtagggatgtagtttcaccatgtcaccgaggctggtctcaaactcctgggcacaagcgatttcgcccacttcagcctcccaaaatattgggattacaggcgttagccaccacactcggcccatatttggttttgaggataagttgggaacactttggaatcttttcagcagaggaactcatgacctgacatccattagcagagtcatcagagtcatctggctgctgtgttgagaatggaccatgctgggcaaggggagaagcaggaagaccagtgatgagactgcagctatgagagatgttaagctactgtagattggaagcagtggaggt

SEQ ID NO: 39053 - DNA, 1980 bp, Homo sapiens
tagggaattcggctgaggctttgccggcgcggcgaagaaggtggcaggcggcaggctgagctccactggacacagcctagtggcccggggcgcgcccgctgcactcccggcgtccaggtctggcgcaccgcgggaggcaggcgcgctgccactctccgcagccgcttcgtcccctggtctgtctcgcctcggcttcagcgggcaaacccacagctggtctcctgggcgctgatctccctgcaatccttgcttacataaggcgggcgggcgtgctcccgcccccggttaccccccagaggagttgtgctgcgccctctacgcctccttggcgagcgccttcgcgcacccgtgcgccctactctaggatgtgaacctccttggccacccagcagcgacagccgggacatctctccgccggcgtgagaacactgagattggagaccagagcgcctgacggtgcccaagcttcctccctccgttccctcctcctccaactccccccacttcaacccccacccccacccccacccccggtgtctgtgtgtgttcctcacaggcgaggggacccggagagcagtccagacttcggcgtgcggcggagctgcggctgctcctgctgctggggggagcggcggaggtggccgccttgcgcctccctggacttcccaagtgggggcagagcagtcgctcgcgggagacgtcagttagaaggcattgggaaagagggaccttcaaactcctcctcggcgtctcctctcctcccccttttggcccctgcctttggagaaagtggagtgtggcgcttggttgtcgttatttcttcggactgcttcgcggtgcacggattcagcttctgcccagtggggctttcagctgtttgcgcgtctctctgtccccctcccctccccccggcacacctctgtctacgatgaggaaaggtctgcgggcgacagcggcccgctgcggactgggactgggatacttgctgcaaatgctcgtgctacctgccctggccctgctcagcgccagcggcactggctccgccgcccaagatgatgacttttttcatgaactcccagaaacttttccttctgatccacctgagcctctgccacatttccttattgagcctgaagaagcttatattgtgaagaataagcctgtgaacctgtactgtaaagcaagccctgccacccagatctatttcaagtgtaatagtgaatgggttcatcagaaggaccacatagtagatgaaagagtagatgaaacttccggtctcattgtccgggaagtgagcattgagatttcgcgccagcaagtggaagaactctttggacctgaagattactggtgccagtgtgtggcctggagctccgcgggtaccacaaagagccggaaggcgtatgtgcgcattgcataggaactcatgacctgacatccattagcagagtcatcagagtcatctggctgctgtgttgagaatggaccatgctgggcaaggggagaagcaggaagaccagtgatgagactgcagctatgagagatgttaagctactgtagattggaagcagtggaggtggtgaggccaggatttcagatatatttaaaagtagagataacagcttttgttgagaccttggatgtgtgatgtgagagaaagaagagaaaggatgatttgaaagggctaagccttatcaaggatttctttcaaatgtctttagtgaagccattcctgcctcacagagggaggaggctgggcattcctttctcaatactttcagagcagtttgtccatacccctaatatagtgcttgtctcatttcaattatattcactcgtaaaatttgtgtttcatgccagtgagttccatgagatcaagaattctattgtacttaattttatatctctcctgcttagcacaatacctagagtatcacagatgtttaacaattttcttgaattaaaactgttataaagaat

SEQ ID NO: 39054 - DNA, 2375 bp, Homo sapiens
acagtcacttactctacaggcagtggggcccgacacagacagcgccgcccccgccagccagcctcgcacgccctcggaagcgcaggctcccggcgctgcgctggagggttccccggcaccccagcctcccgtccccagcccgctgcacctccgggccccccttacccttgagaggcaccgggagttgtcgcgggggggcctcgggaaattccccggacccctgtgccaggaggtgcccggttcgcccgctcttcaccccccgccccccccgagggcggtgcccgggggtgctgccccatggagcggggaggcgggcgccgtctgctccgggagccctgacccgagtcggagctgtgtgtcgcagccgccccgaccccccgccgatcatgcgccggcgcccctggctctccagtcccactgggctgtgagccccccactcccagcccgtcagggcctgcgcgccatgggcagcgcccaccctcgcccctggctgcggctccgaccccagccccagccgcggccagcgctctgggtgctcctgttcttcctactgctgctggctgctgccatgcccaggtcagcacccaatgacattctggacctccgcctccccccggggcccgtgctcaatgccaacacagtgtgcctaacattgccaggcctgagccggcggcagatggaggtgtgtgtgcgtcaccctgatgtggctgcctcagccatacagggcatccagatcgccatccacgaatgccaacaccaattcagggaccagcgctggaactgctcaagcctggagactcgcaacaagatcccctatgagagtcccatcttcagcagaggtttccgagagagcgcttttgcctacgccatcgcagcagctggcgtggtgcacgccgtgtccaatgcgtgtgccctgggcaaactgaaggcctgtggctgtgatgcgtcccggcgaggggacgaggaggccttccgtaggaagctgcaccgcttacaactggatgcactgcagcgtggtaagggcctgagccatggggtcccggaacacccagccctgcccacagccagcccaggcctgcaggactcctgggagtggggcggctgcagccccgacatgggcttcggggagcgcttttctaaggactttctggactcccgggagcctcacagagacatccacgcgagaatgaggcttcacaacaaccgagttgggaggcaggcagtgatggagaacatgcggcggaagtgcaagtgccacggcacgtcaggcagctgccagctcaagacgtgctggcaggtgacgcccgagttccgcaccgtgggggcgctgctgcgcagccgcttccaccgcgccacgctcatccggccgcacaaccgcaacggcggccagctggagccgggcccagcgggggcaccctcgccggctccgggcgctcccgggccgcgccgacgggccagccccgccgacctggtctacttcgaaaagtctcccgacttctgcgagcgcgagccgcgcctggactcggcgggcaccgtgggccgcctgtgcaacaagagcagcgccggctcggatggctgcggcagcatgtgctgcggccgcggccacaacatcctgcgccagacgcgcagcgagcgctgccactgccgcttccactggtgctgtttcgtggtctgcgaagagtgccgcatcaccgagtgggtcagcgtctgcaagtgagcggcccggggtcccctgggccctgatcgaggtcccctcctggagcctggccctctgaggcttacggtcttggcaaggcagcatcgccttggctcttgggaagaggagattggaccacatgatcttataggaacccctcagctctgaggtctgtgatcgccggacagtccaggcctgtctgaaccccaccactcacttctgtgggctctaggactgactgggttcttcctccctccccgaagcccagacagttcagttgggctgggggttgctccacaccctaaaacaagcctcagccaggcaacccgtcagtctgtctccatcctttcaccccttccctggagatgggaggtggggaatgaatggaagctgacgggcagagagaggaggattaaaaaaaagaaatagacataactgagctgaagtaattccataaagggcccagacagcctcctccaccattcccttcatcattcatttaacaaatatttattttgcactctctttgcggcactctgggggcggtggggtgcgtgggggtggcaatgcaaggcactgaggccacagatgtgagtaagcgagacacaacacttgtcctcttggaggttacattcttgctggggggaggcatgggcaataaacaagtaaatatacaaac

SEQ ID NO: 39055 - DNA, 2110 bp, Homo sapiens
acagtcacttactctacaggcagtggggcccgacacagacagcgccgcccccgccagccagcctcgcacgccctcggaagcgcaggctcccggcgctgcgctggagggttccccggcaccccagcctcccgtccccagcccgctgcacctccgggccccccttacccttgagaggcaccgggagttgtcgcgggggggcctcgggaaattccccggacccctgtgccaggaggtgcccggttcgcccgctcttcaccccccgccccccccgagggcggtgcccgggggtgctgccccatggagcggggaggcgggcgccgtctgctccgggagccctgacccgagtcggagctgtgtgtcgcagccgccccgaccccccgccgatcatgcgccggcgcccctggctctccagtcccactgggctgtgagccccccactcccagcccgtcagggcctgcgcgccatgggcagcgcccaccctcgcccctggctgcggctccgaccccagccccagccgcggccagcgctctgggtgctcctgttcttcctactgctgctggctgctgccatgcccaggtcagcacccaatgacattctggacctccgcctccccccggggcccgtgctcaatgccaacacagtgtgcctaacattgccaggcctgagccggcggcagatggaggtgtgtgtgcgtcaccctgatgtggctgcctcagccatacagggcatccagatcgccatccacgaatgccaacaccaattcagggaccagcgctggaactgctcaagcctggagactcgcaacaagatcccctatgagagtcccatcttcagcagaggtttccgagagagcgcttttgcctacgccatcgcagcagctggcgtggtgcacgccgtgtccaatgcgtgtgccctgggcaaactgaaggcctgtggctgtgatgcgtcccggcgaggggacgaggaggccttccgtaggaagctgcaccgcttacaactggatgcactgcagcgtggtaagggcctgagccatggggtcccggaacacccagccctgcccacagccagcccaggcctgcaggactcctgggagtggggcggctgcagccccgacatgggcttcggggagcgcttttctaaggactttctggactcccgggagcctcacagagacatccacgcgagaatgaggcttcacaacaaccgagttgggaggcaggcagtgatggagaacatgcggcggaagtgcaagtgccacggcacgtcaggcagctgccagctcaagacgtgctggcaggtgacgcccgagttccgcaccgtgggggcgctgctgcgcagccgcttccaccgcgccacgctcatccggccgcacaaccgcaacggcggccagctggagccgggcccagcgggggcaccctcgccggctccgggcgctcccgggccgcgccgacgggccagccccgccgacctggtctacttcgaaaagtctcccgacttctgcgagcgcgagccgcgcctggactcggcgggcaccgtgggccgcctgtgcaacaagagcagcgccggctcggatggctgcggcagcatgtgctgcggccgcggccacaacatcctgcgccagacgcgcagcgagcgctgccactgccgcttccactggtgctgtttcgtggtctgcgaagagtgccgcatcaccgagtgggtcagcgtctgcaagtgagcggcccggggtcccctgggccctgatcgaggtcccctcctggagcctggccctctgaggcttacggtcttggcaaggcagcatcgccttggctcttgggaagaggagattggaccacatgatcttataggaacccctcagctctgaggtctgtgatcgccggacagtccaggcctgtctgaaccccaccactcacttctgtgggctctaggactgactgggttcttcctccctccccgaagcccagacagttcagttgggctgggggttgctccacaccctaaaacaagcctcagccaggcaacccgtcagtctgtctccatcctttcaccccttccctggagatgggaggtggggaatgaatggaagctgacgggcagagagaggaggatt

SEQ ID NO: 39056 - DNA, 2108 bp, Homo sapiens
caaccacccacagcctaattattagcccccatggagcggggaggcgggcgccgtctgctccgggagccctgacccgagtcggagctgtgtgtcgcagccgccccgaccccccgccgatcatgcgccggcgcccctggctctccagtcccactgggctgtgagccccccactcccagcccgtcagggcctgcgcgccatgggcagcgcccaccctcgcccctggctgcggctccgaccccagccccagccgcggccagcgctctgggtgctcctgttcttcctactgctgctggctgctgccatgcccaggtcagcacccaatgacattctggacctccgcctccccccggggcccgtgctcaatgccaacacagtgtgcctaacattgccaggcctgagccggcggcagatggaggtgtgtgtgcgtcaccctgatgtggctgcctcagccatacagggcatccagatcgccatccacgaatgccaacaccaattcagggaccagcgctggaactgctcaagcctggagactcgcaacaagatcccctatgagagtcccatcttcagcagaggtttccgagagagcgcttttgcctacgccatcgcagcagctggcgtggtgcacgccgtgtccaatgcgtgtgccctgggcaaactgaaggcctgtggctgtgatgcgtcccggcgaggggacgaggaggccttccgtaggaagctgcaccgcttacaactggatgcactgcagcgtggtaagggcctgagccatggggtcccggaacacccagccctgcccacagccagcccaggcctgcaggactcctgggagtggggcggctgcagccccgacatgggcttcggggagcgcttttctaaggactttctggactcccgggagcctcacagagacatccacgcgagaatgaggcttcacaacaaccgagttgggaggcaggcagtgatggagaacatgcggcggaagtgcaagtgccacggcacgtcaggcagctgccagctcaagacgtgctggcaggtgacgcccgagttccgcaccgtgggggcgctgctgcgcagccgcttccaccgcgccacgctcatccggccgcacaaccgcaacggcggccagctggagccgggcccagcgggggcaccctcgccggctccgggcgctcccgggccgcgccgacgggccagccccgccgacctggtctacttcgaaaagtctcccgacttctgcgagcgcgagccgcgcctggactcggcgggcaccgtgggccgcctgtgcaacaagagcagcgccggctcggatggctgcggcagcatgtgctgcggccgcggccacaacatcctgcgccagacgcgcagcgagcgctgccactgccgcttccactggtgctgtttcgtggtctgcgaagagtgccgcatcaccgagtgggtcagcgtctgcaagtgagcggcccggggtcccctgggccctgatcgaggtcccctcctggagcctggccctctgaggcttacggtcttggcaaggcagcatcgccttggctcttgggaagaggagattggaccacatgatcttataggaacccctcagctctgaggtctgtgatcgccggacagtccaggcctgtctgaaccccaccactcacttctgtgggctctaggactgactgggttcttcctccctccccgaagcccagacagttcagttgggctgggggttgctccacaccctaaaacaagcctcagccaggcaacccgtcagtctgtctccatcctttcaccccttccctggagatgggaggtggggaatgaatggaagctgacgggcagagagaggaggattaaaaaaaagaaatagacataactgagctgaagtaattccataaagggcccagacagcctcctccaccattcccttcatcattcatttaacaaatatttattttgcactctctttgcggcactctgggggcggtggggtgcgtgggggtggcaatgcaaggcactgaggccacagatgtgagtaagcgagacacaacacttgtcctcttggaggttacattcttgctggggggaggcatgggcaataaacaagtaaatatacaaac

SEQ ID NO: 39057 - DNA, 2104 bp, Homo sapiens
acagtcacttactctacaggcagtggggcccgacacagacagcgccgcccccgccagccagcctcgcacgccctcggaagcgcaggctcccggcgctgcgctggagggttccccggcaccccagcctcccgtccccagcccgctgcacctccgggccccccttacccttgagaggcaccgggagttgtcgcgggggggcctcgggaaattccccggacccctgtgccaggaggtgcccggttcgcccgctcttcaccccccgccccccccgagggcggtgcccgggggtgctgccccatggagcggggaggcgggcgccgtctgctccgggagccctgacccgagtcggagctgtgtgtcgcagccgccccgaccccccgccgatcatgcgccggcgcccctggctctccagtcccactgggctgtgagccccccactcccagcccgtcagggcctgcgcgccatgggcagcgcccaccctcgcccctggctgcggctccgaccccagccccagccgcggccagcgctctgggtgctcctgttcttcctactgctgctggctgctgccatgcccaggtcagcacccaatgacattctggacctccgcctccccccggggcccgtgctcaatgccaacacagtgtgcctaacattgccaggcctgagccggcggcagatggaggtgtgtgtgcgtcaccctgatgtggctgcctcagccatacagggcatccagatcgccatccacgaatgccaacaccaattcagggaccagcgctggaactgctcaagcctggagactcgcaacaagatcccctatgagagtcccatcttcagcagaggtttccgagagagcgcttttgcctacgccatcgcagcagctggcgtggtgcacgccgtgtccaatgcgtgtgccctgggcaaactgaaggcctgtggctgtgatgcgtcccggcgaggggacgaggaggccttccgtaggaagctgcaccgcttacaactggatgcactgcagcgtggtaagggcctgagccatggggtcccggaacacccagccctgcccacagccagcccaggcctgcaggactcctgggagtggggcggctgcagccccgacatgggcttcggggagcgcttttctaaggactttctggactcccgggagcctcacagagacatccacgcgagaatgaggcttcacaacaaccgagttgggaggcaggcagtgatggagaacatgcggcggaagtgcaagtgccacggcacgtcaggcagctgccagctcaagacgtgctggcaggtgacgcccgagttccgcaccgtgggggcgctgctgcgcagccgcttccaccgcgccacgctcatccggccgcacaaccgcaacggcggccagctggagccgggcccagcgggggcaccctcgccggctccgggcgctcccgggccgcgccgacgggccagccccgccgacctggtctacttcgaaaagtctcccgacttctgcgagcgcgagccgcgcctggactcggcgggcaccgtgggccgcctgtgcaacaagagcagcgccggctcggatggctgcggcagcatgtgctgcggccgcggccacaacatcctgcgccagacgcgcagcgagcgctgccactgccgcttccactggtgctgtttcgtggtctgcgaagagtgccgcatcaccgagtgggtcagcgtctgcaaggtctcgccctgccgcccaggctggagtgcagtggtgcaatcaaggcttgctgcagcctcgacatccagagctcaagcgattctcccacctcagcctcccgagtagttgggactacaggactacaggcgcatgccaccacgaccgtctttttttttcttttagaggcggagtctcgctttgtattttaagctggtctctgaactcctgggctcaagttatcctcccgcctccaattcccaaagtgttggggttacagagactgagccactgcccctggccagaatacactaaattttttaaaagatcccgtttaaaactaggaattgggggacctggcctcctgacaagagctaatataattatgtcattgtgattttctttttaaaactg

SEQ ID NO: 39058 - DNA, 383 bp, Homo sapiens
tgtataaagaatgctttaagttgtcttctccgactgccccttattcacttaaagacagactcatatgactggggcagtgacttgtagagcttctggtcctttgcaaataccatgctgtcctgtcttaaaagagctgactaaattaaaaaaaaatccacctcaaaaagaagtgaatggctgttatgatcacctcagaagtatctcaggacaaatatacacacacaccccttcatctgacacctgtggcttttaaaaagaaagccagataacggatagccatttaatcagtttgtatccacacaagcacttctccgatttccctcatgcattaggtaatgacactctcccctgagattgatatgtatattataattaataactag

SEQ ID NO: 39059 - DNA, 420 bp, Homo sapiens
aaactgtataactccataaaatattccaggtgacctcaccccttgtaaaaaggatttcaagtcctcctgcctctagtgaagcaagatccatgtgaacacctaatccttgacccagcgaaatgtaaatgaaacctaatgtgtattagttcctagctgaagtttttatgctctctgttcctctgcccaagatgacccaacagtgttcccagaaaaaaaactgccattgattttagctgagaccctcagaggcctgtgtagtgtgaggagaaataaatctttgttgttgtaagccactgatttcggggatcattgttactgtagcataacccagcccatactaactgatattatgtggattctgtcaccatctgtgcagagtaggccattgagatacatcaggcaatgatggattagaatgaa

SEQ ID NO: 39060 - DNA, 2304 bp, Homo sapiens
  misc_feature (1091)..(1091): n is a, c, g, or t
  misc_feature (1624)..(1624): n is a, c, g, or t
  misc_feature (1719)..(1719): n is a, c, g, or t
cggggtgcaagtgccatgcaggtggcttcggccagcccagccccagcatgagctccttcgacctgccggcgccctccccacctcgctgcagcccccagttccccagcatcggccaggagccccccgagatgaacctctactatgagaacttcttccacccacagggcgtgcccagccctcagcggccctccttcgaggggggcggcgagtatggggccacccccaacccctacctctggttcaacgggcccaccatgaccccgccaccctacctgcccggccccaacgccagccccttcctgccccaggcctatggagtgcagaggccgctgctgcccagcgtgtcggggcttggggggagcgacctgggctggctgcccatcccctcgcaggaggagctgatgaagctggtgcggccaccctattcctactcggctctcatcgccatggccatccacggggcacccgacaagcgcctcactctcagccagatctaccagtacgtggccgacaacttccccttctacaacaagagcaaggccggctggcagaactccatccgccacaacctgtcgctcaacgactgcttcaagaaggtgccccgcgacgaggacgacccgggcaaagggaattactggaccctggaccccaactgtgagaaaatgttcgacaatggaaatttccgcaggaaaaggaagagaaaatcagatgtttcctctagcacagcctccttggccttagagaagacagagagcagtctcccggtggacagccccaagaccacggagcctcaggacatcttggatggagcctcaccagggggcaccaccagctccccagagaagcggccctcccctcccccatcaggcgccccttgccttaacagcttcctttcctctatgacagcctatgtgagcggggggagccccacgagccaccccttggtcacaccaggactgagccctgagcccagtgacaagacggggcagaactcactgaccttcaactccttctccccgctcaccaacctcagcaaccacagcggtgggggtgactgggcgaaccccatgcccaccaacatgctcagctanggaggatctgtgctcagccaattcagccctcacttctacaacagtgtcaacaccagtggtgtcctctaccccagggagggcaccgaggtctaggtacagaacagctcctgagccaggtggacatgccagagagaaaagcagtagaggtcctccatgccagccccacggtggtccatgactgcggaactgcccagacataagcaggagcctccgaggaatccaccctctttctagaacactggttaaggcttctgtttatcacacataggcccacacacagactcaccaactttgcaatagaaatactggtgcctgcagagcagcactaacagtggcaggtgctgtactaggctctgtactggccacacttactattgacagtcaccccgtaaggttcacaaaccaccccattgaacagatgaggaactgaggctcaaggaggttaagtaacatttccagggttatataaactagtaaatggcagagctaagagtcaaatccaggtctatgtgatcctcagagattggaggccnggatggagaattggttgagtagccaaggaaggtcagtgtgaaaagcttgctatggcaaatatagcgaaatctctccactgccttctgtccaccancatttagtgccagcctaggcacaacttgtcctggtccaagtccttattctgcttgccccaacttacctgcagacactccttttgctaccactcaaggaaggaagtcaccagtggccttagtgcaggaaactcagccctggtggccctgcagaacaatgcatctgacatgtgcgatgcatccccatggagagacagcattgctccccagccctccagaaaccttgagcagatccagggatcagtgagaggagtggtgtgtacccctaaatcctcccaccccagcactgcccatctgtaaaatcttgtaaagcccagtttcctgtgtgcatgtcatggaccagtgagctggagatggctgaatcttccaagagaaacaaggttggataagcgcttccttttttttagcccaggagaggtggatgtttgtctgagaaaacaatggcctcaagggaggggccttgggcccaccctcacagggggtctctgtgtgatctcttgggatttctccttgtttttgtgagtacctgggaagtgttgtttgttttcttattttctttttaattaaaaaacaaacaaacaagtggt

SEQ ID NO: 39061 - DNA, 360 bp, Homo sapiens
agcctttttaactcctcagctctgtcatcttagcctgaaagcaggcataaacacaaatcaatgcatggctgtgttccagtaaaactttatttgcaaaaacagtccgtggtctggtttcagcctgccggctagggtttgctgaccacagatatagagcatccataggaaaacgttatttaaacattggaaccgttggctgaaatgctctgctgttggaggtttttttgtttttgtttttgtttgagacggagtcttgctctgtcccccaggctggagtgcagtggcgctatctcgactcactgcaacctccgcctcccgggttcacgccattctcctgcctcagcctcccgagtagctggg

SEQ ID NO: 39062 - DNA, 3172 bp, Homo sapiens
  misc_feature (3171)..(3171): n is a, c, g, or t
cacgaggccccacgcctcaggcaactggttgttaccgaggaagatggcggcgccagacccgaggcgctagggaagatcgcaccgcggacgcccgctgagcttggcgcacgggccgaccaggagctggtgactgccctcatgtgtgatttgcggcggccagcggcaggtgggatgatggacttggcctacgtctgtgagtgggagaaatggtccaagagcacccactgcccatcggtgcccctggcctgcgcctggtcctgccgaaatctcatcaccttcaccatggacctgcgcagcgatgaccaggacctgacccgcatgatccacatcctggacacggagcacccctgggacctgcactcgatcccctcagagcaccacgaggccatcacctgcctggagtgggaccagtcaggctcccggctcctgtcagcagatgccgacgggcagatcaagtgctggagcatggcggaccacctggctaatagctgggagagctcagtgggcagcctagtggagggggaccccattgtggccctgtcctggctgcacaatggtgtgaaactggccctgcacgtggagaagtcgggcgcctccagcttcggggagaagttctcccgagtcaagttctcaccgtcgctcacgctgttcggcggcaagcccatggagggctggatcgcggtgacggtcagcggcctggtcaccgtgtccctgctgaagcccagcgggcaggtgctgacgtccaccgagagcctgtgccggctgcgcggccgcgtggccctggccgacatcgccttcaccggcggcggcaacatcgtggtggccacggcggacggcagcagcgcgtcgcccgtgcagttctacaaggtgtgcgtgagcgtggtgagcgagaagtgccgtatcgacacggagatcctgccctccctgttcatgcgctgcaccaccgacctcaaccgcaaggacaagttccccgccatcacccacctcaagttcctggcccgggacatgtcggagcaggtgcttttgtgcgcgtccagccagaccagcagcatcgtggagtgctggtccctgcgcaaggagggactccccgtgaacaacatcttccagcagatctcccccgtggttggcgacaaacagcccacaattctcaaatggcggatcctatcggccaccaacgatctggaccgtgtgtcggccgtggcgctgcccaagctgcccatctcgctcaccaacaccgacctcaaggtggccagcgacacacagttctaccctggcctcgggctggccctggccttccacgacggcagcgtccacatcgtgcaccggctctcactgcagaccatggccgtcttctacagctccgcggccccgaggcctgtggatgagccggccatgaagcgcccccgcaccgcgggccccgccgtccacttaaaggctatgcagctatcgtggacgtcactggccctggtggggattgacagccacgggaagctgagcgtgctccgcctctcaccttccatgggccacccgctggaggtggggctggcgctgcggcacctgctcttcctgctggagtactgcatggtgaccggctacgactggtgggacatcctgctgcacgtgcagcccagtatggtacagagcctggtggagaagctgcacgaggagtacacgcgccagaccgctgccctgcagcaggtcctctccacccggatcctggccatgaaggcctcgctctgcaagctgtcgccctgcacggtgacccgcgtgtgcgactaccacaccaagctcttcctcatcgccatcagctccaccctgaagtcgctgctgcgcccccactttctcaacacgcctgacaagagccccggcgaccggctgaccgagatctgcaccaagatcaccgacgtcgacattgacaaggtcatgatcaacctcaagacggaggaatttgtgctggacatgaacacactgcaggcgctgcagcagctcttgcagtgggtgggcgacttcgtgctgtacctgctggccagcctacccaaccagccctgccccacctcggagccctgccccacctcggagccctcccccacctcggagccctcccccacctcggagccctcctctccatgaagcctctgctggttccctgctgaggccgggccacagctttctgcgggacggcacctcgctgggcatgcttcgggaattgatggtggtcatccgcatctggggccttctgaagcccagctgcctgcccgtgtatacggccacctcggatacccaggacagcatgtccctgctcttccgcctgctcaccaagctctggatctgctgtcgcgatgagggcccagcgagcgagccggacgaggcgctggtggatgaatgctgcctgctgcccagccagctgcttatccccagcctggactggctgccagccagcgacggcctggttagccgcctgcagcccaagcagccccttcgtctgcagtttggccgggcgcccacgctgcctggcagtgctgccaccctgcagctcgacggcctcgccagggccccaggccagcccaagatcgaccacctgcggaggctgcaccttggcgcttgccccacggaggaatgcaaggcctgcaccaggtgcggctgtgtcaccatgctcaagtcgcccaacagaaccacggcggtgaagcagtgggagcagcgctggatcaagaactgcctgtgcggtgggctctggtggcgggtgcccctcagctacccctgagcccagctgcccctcagctactcctcagctacccctcagctgcccctgagcccggctgctgcaagagccaccgctcgccctggactctcctcggcgcggttaacctcagcccgccctgcagggctgttgaaggccgtgggccggacgcctgcgtgaccagcagagcttctgaggaagcccctgcctttgtccagctgggcccgcagtccacacaccactctcccaggacccccagatccctggaccatctgcatccagaggaccgtccgtgacggccgggggtccaggcggaccttgtggtgacccggctcgggcgtctcctcggtttccttgcctcacccgcggagagcgctgaacctggacaagcagcggctgggaaggacaggtccaataaacgccctctgcgcccng

SEQ ID NO: 39063 - DNA, 2882 bp, Homo sapiens
  misc_feature (2881)..(2881): n is a, c, g, or t
cacgaggccccacgcctcaggcaactggttgttaccgaggaagatggcggcgccagacccgaggcgctagggaagatcgcaccgcggacgcccgctgagcttggcgcacgggccgaccaggagctggtgactgccctcatgtgtgatttgcggcggccagcggcaggtgggatgatggacttggcctacgtctgtgagtgggagaaatggtccaagagcacccactgcccatcggtgcccctggcctgcgcctggtcctgccgaaatctcatcaccttcaccatggacctgcgcagcgatgaccaggacctgacccgcatgatccacatcctggacacggagcacccctgggacctgcactcgatcccctcagagcaccacgaggccatcacctgcctggagtgggaccagtcaggctcccggctcctgtcagcagatgccgacgggcagatcaagtgctggagcatggcggaccacctggctaatagctgggagagctcagtgggcagcctagtggagggggaccccattgtggccctgtcctggctgcacaatggtgtgaaactggccctgcacgtggagaagtcgggcgcctccagcttcggggagaagttctcccgagtcaagttctcaccgtcgctcacgctgttcggcggcaagcccatggagggctggatcgcggtgacggtcagcggcctggtcaccgtgtccctgctgaagcccagcgggcaggtgctgacgtccaccgagagcctgtgccggctgcgcggccgcgtggccctggccgacatcgccttcaccggcggcggcaacatcgtggtggccacggcggacggcagcagcgcgtcgcccgtgcagttctacaaggtgtgcgtgagcgtggtgagcgagaagtgccgtatcgacacggagatcctgccctccctgttcatgcgctgcaccaccgacctcaaccgcaaggacaagttccccgccatcacccacctcaagttcctggcccgggacatgtcggagcaggtgcttttgtgcgcgtccagccagaccagcagcatcgtggagtgctggtccctgcgcaaggagggactccccgtgaacaacatcttccagcagatctcccccgtggttggcgacaaacagcccacaattctcaaatggcggatcctatcggccaccaacgatctggaccgtgtgtcggccgtggcgctgcccaagctgcccatctcgctcaccaacaccgacctcaaggtggccagcgacacacagttctaccctggcctcgggctggccctggccttccacgacggcagcgtccacatcgtgcaccggctctcactgcagaccatggccgtcttctacagctccgcggccccgaggcctgtggatgagccggccatgaagcgcccccgcaccgcgggccccgccgtccacttaaaggctatgcagctatcgtggacgtcactggccctggtggggattgacagccacgggaagctgagcgtgctccgcctctcaccttccatgggccacccgctggaggtggggctggcgctgcggcacctgctcttcctgctggagtactgcatggtgaccggctacgactggtgggacatcctgctgcacgtgcagcccagtatggtacagagcctggtggagaagctgcacgaggagtacacgcgccagaccgctgccctgcagcaggtcctctccacccggatcctggccatgaaggcctcgctctgcaagctgtcgccctgcacggtgacccgcgtgtgcgactaccacaccaagctcttcctcatcgccatcagctccaccctgaagtcgctgctgcgcccccactttctcaacacgcctgacaagagccccggcgaccggctgaccgagatctgcaccaagatcaccgacgtcgacattgacaaggtcatgatcaacctcaagacggaggaatttgtgctggacatgaacacactgcaggcgctgcagcagctcttgcagtgggtgggcgacttcgtgctgtacctgctggccagcctacccaaccaggtcgcgatgagggcccagcgagcgagccggacgaggcgctggtggatgaatgctgcctgctgcccagccagctgcttatccccagcctggactggctgccagccagcgacggcctggttagccgcctgcagcccaagcagccccttcgtctgcagtttggccgggcgcccacgctgcctggcagtgctgccaccctgcagctcgacggcctcgccagggccccaggccagcccaagatcgaccacctgcggaggctgcaccttggcgcttgccccacggaggaatgcaaggcctgcaccaggtgcggctgtgtcaccatgctcaagtcgcccaacagaaccacggcggtgaagcagtgggagcagcgctggatcaagaactgcctgtgcggtgggctctggtggcgggtgcccctcagctacccctgagcccagctgcccctcagctactcctcagctacccctcagctgcccctgagcccggctgctgcaagagccaccgctcgccctggactctcctcggcgcggttaacctcagcccgccctgcagggctgttgaaggccgtgggccggacgcctgcgtgaccagcagagcttctgaggaagcccctgcctttgtccagctgggcccgcagtccacacaccactctcccaggacccccagatccctggaccatctgcatccagaggaccgtccgtgacggccgggggtccaggcggaccttgtggtgacccggctcgggcgtctcctcggtttccttgcctcacccgcggagagcgctgaacctggacaagcagcggctgggaaggacaggtccaataaacgccctctgcgcccng

SEQ ID NO: 39064 - DNA, 2911 bp, Homo sapiens
  misc_feature (2910)..(2910): n is a, c, g, or t
cacgaggccccacgcctcaggcaactggttgttaccgaggaagatggcggcgccagacccgaggcgctagggaagatcgcaccgcggacgcccgctgagcttggcgcacgggccgaccaggagctggtgactgccctcatgtgtgatttgcggcggccagcggcaggtgggatgatggacttggcctacgtctgtgagtgggagaaatggtccaagagcacccactgcccatcggtgcccctggcctgcgcctggtcctgccgaaatctcatcaccttcaccatggacctgcgcagcgatgaccaggacctgacccgcatgatccacatcctggacacggagcacccctgggacctgcactcgatcccctcagagcaccacgaggccatcacctgcctggagtgggaccagtcaggctcccggctcctgtcagcagatgccgacgggcagatcaagtgctggagcatggcggaccacctggctaatagctgggagagctcagtgggcagcctagtggagggggaccccattgtggccctgtcctggctgcacaatggtgtgaaactggccctgcacgtggagaagtcgggcgcctccagcttcggggagaagttctcccgagtcaagttctcaccgtcgctcacgctgttcggcggcaagcccatggagggctggatcgcggtgacggtcagcggcctggtcaccgtgtccctgctgaagcccagcgggcaggtgctgacgtccaccgagagcctgtgccggctgcgcggccgcgtggccctggccgacatcgccttcaccggcggcggcaacatcgtggtggccacggcggacggcagcagcgcgtcgcccgtgcagttctacaaggtgtgcgtgagcgtggtgagcgagaagtgccgtatcgacacggagatcctgccctccctgttcatgcgctgcaccaccgacctcaaccgcaaggacaagttccccgccatcacccacctcaagttcctggcccgggacatgtcggagcaggtgcttttgtgcgcgtccagccagaccagcagcatcgtggagtgctggtccctgcgcaaggagggactccccgtgaacaacatcttccagcagatctcccccgtggttggcgacaaacagcccacaattctcaaatggcggatcctatcggccaccaacgatctggaccgtgtgtcggccgtggcgctgcccaagctgcccatctcgctcaccaacaccgacctcaaggtggccagcgacacacagttctaccctggcctcgggctggccctggccttccacgacggcagcgtccacatcgtgcaccggctctcactgcagaccatggccgtcttctacagctccgcggccccgaggcctgtggatgagccggccatgaagcgcccccgcaccgcgggccccgccgtccacttaaaggctatgcagctatcgtggacgtcactggccctggtggggattgacagccacgggaagctgagcgtgctccgcctctcaccttccatgggccacccgctggaggtggggctggcgctgcggcacctgctcttcctgctggagtactgcatggtgaccggctacgactggtgggacatcctgctgcacgtgcagcccagtatggtacagagcctggtggagaagctgcacgaggagtacacgcgccagaccgctgccctgcagcaggtcctctccacccggatcctggccatgaaggcctcgctctgcaagctgtcgccctgcacggtgacccgcgtgtgcgactaccacaccaagctcttcctcatcgccatcagctccaccctgaagtcgctgctgcgcccccactttctcaacacgcctgacaagagccccggcgaccggctgaccgagatctgcaccaagatcaccgacgtcgacattgacaaggtcatgatcaacctcaagacggaggaatttgtgctggacatgaacacactgcaggcgctgcagcagctcttgcagtgggtgggcgacttcgtgctgtacctgctggccagcctacccaaccagggttccctgctgaggccgggccacagctttctgcgggacggcacctcgctgggcatgcttcgggaattgatggtggtcatccgcatctggggccttctgaagcccagctgcctgcccgtgtatacggccacctcggatacccaggacagcatgtccctgctcttccgcctgctcaccaagctctggatctgctgtcgcgatgagggcccagcgagcgagccggacgaggcgctggtggatgaatgctgcctgctgcccagccagctgcttatccccagcctggactggctgccagccagcgacggcctggttagccgcctgcagcccaagcagccccttcgtctgcagtttggccgggcgcccacgctgcctggcagtgctgccaccctgcagctcgacggcctcgccagggccccaggccagcccaagatcgaccacctgcggaggctgcaccttggcgcttgccccacggaggaatgcaaggcctgcaccaggtgcggctgtgtcaccatgctcaagtcgcccaacagaaccacggcggtgaagcagtgggagcagcgctggatcaagaactgcctggctgttgaaggccgtgggccggacgcctgcgtgaccagcagagcttctgaggaagcccctgcctttgtccagctgggcccgcagtccacacaccactctcccaggacccccagatccctggaccatctgcatccagaggaccgtccgtgacggccgggggtccaggcggaccttgtggtgacccggctcgggcgtctcctcggtttccttgcctcacccgcggagagcgctgaacctggacaagcagcggctgggaaggacaggtccaataaacgccctctgcgcccng

SEQ ID NO: 39065 - DNA, 3075 bp, Homo sapiens
  misc_feature (3074)..(3074): n is a, c, g, or t
cacgaggccccacgcctcaggcaactggttgttaccgaggaagatggcggcgccagacccgaggcgctagggaagatcgcaccgcggacgcccgctgagcttggcgcacgggccgaccaggagctggtgactgccctcatgtgtgatttgcggcggccagcggcaggtgggatgatggacttggcctacgtctgtgagtgggagaaatggtccaagagcacccactgcccatcggtgcccctggcctgcgcctggtcctgccgaaatctcatcaccttcaccatggacctgcgcagcgatgaccaggacctgacccgcatgatccacatcctggacacggagcacccctgggacctgcactcgatcccctcagagcaccacgaggccatcacctgcctggagtgggaccagtcaggctcccggctcctgtcagcagatgccgacgggcagatcaagtgctggagcatggcggaccacctggctaatagctgggagagctcagtgggcagcctagtggagggggaccccattgtggccctgtcctggctgcacaatggtgtgaaactggccctgcacgtggagaagtcgggcgcctccagcttcggggagaagttctcccgagtcaagttctcaccgtcgctcacgctgttcggcggcaagcccatggagggctggatcgcggtgacggtcagcggcctggtcaccgtgtccctgctgaagcccagcgggcaggtgctgacgtccaccgagagcctgtgccggctgcgcggccgcgtggccctggccgacatcgccttcaccggcggcggcaacatcgtggtggccacggcggacggcagcagcgcgtcgcccgtgcagttctacaaggtgtgcgtgagcgtggtgagcgagaagtgccgtatcgacacggagatcctgccctccctgttcatgcgctgcaccaccgacctcaaccgcaaggacaagttccccgccatcacccacctcaagttcctggcccgggacatgtcggagcaggtgcttttgtgcgcgtccagccagaccagcagcatcgtggagtgctggtccctgcgcaaggagggactccccgtgaacaacatcttccagcagatctcccccgtggttggcgacaaacagcccacaattctcaaatggcggatcctatcggccaccaacgatctggaccgtgtgtcggccgtggcgctgcccaagctgcccatctcgctcaccaacaccgacctcaaggtggccagcgacacacagttctaccctggcctcgggctggccctggccttccacgacggcagcgtccacatcgtgcaccggctctcactgcagaccatggccgtcttctacagctccgcggccccgaggcctgtggatgagccggccatgaagcgcccccgcaccgcgggccccgccgtccacttaaaggctatgcagctatcgtggacgtcactggccctggtggggattgacagccacgggaagctgagcgtgctccgcctctcaccttccatgggccacccgctggaggtggggctggcgctgcggcacctgctcttcctgctggagtactgcatggtgaccggctacgactggtgggacatcctgctgcacgtgcagcccagtatggtacagagcctggtggagaagctgcacgaggagtacacgcgccagaccgctgccctgcagcaggtcctctccacccggatcctggccatgaaggcctcgctctgcaagctgtcgccctgcacggtgacccgcgtgtgcgactaccacaccaagctcttcctcatcgccatcagctccaccctgaagtcgctgctgcgcccccactttctcaacacgcctgacaagagccccggcgaccggctgaccgagatctgcaccaagatcaccgacgtcgacattgacaaggtcatgatcaacctcaagacggaggaatttgtgctggacatgaacacactgcaggcgctgcagcagctcttgcagtgggtgggcgacttcgtgctgtacctgctggccagcctacccaaccagggttccctgctgaggccgggccacagctttctgcgggacggcacctcgctgggcatgcttcgggaattgatggtggtcatccgcatctggggccttctgaagcccagctgcctgcccgtgtatacggccacctcggatacccaggacagcatgtccctgctcttccgcctgctcaccaagctctggatctgctgtcgcgatgagggcccagcgagcgagccggacgaggcgctggtggatgaatgctgcctgctgcccagccagctgcttatccccagcctggactggctgccagccagcgacggcctggttagccgcctgcagcccaagcagccccttcgtctgcagtttggccgggcgcccacgctgcctggcagtgctgccaccctgcagctcgacggcctcgccagggccccaggccagcccaagatcgaccacctgcggaggctgcaccttggcgcttgccccacggaggaatgcaaggcctgcaccaggtgcggctgtgtcaccatgctcaagtcgcccaacagaaccacggcggtgaagcagtgggagcagcgctggatcaagaactgcctgtgcggtgggctctggtggcgggtgcccctcagctacccctgagcccagctgcccctcagctactcctcagctacccctcagctgcccctgagcccggctgctgcaagagccaccgctcgccctggactctcctcggcgcggttaacctcagcccgccctgcagggctgttgaaggccgtgggccggacgcctgcgtgaccagcagagcttctgaggaagcccctgcctttgtccagctgggcccgcagtccacacaccactctcccaggacccccagatccctggaccatctgcatccagaggaccgtccgtgacggccgggggtccaggcggaccttgtggtgacccggctcgggcgtctcctcggtttccttgcctcacccgcggagagcgctgaacctggacaagcagcggctgggaaggacaggtccaataaacgccctctgcgcccng

SEQ ID NO: 39066 - DNA, 218 bp, Homo sapiens
aacaacagcaaaattttattccaaaatcgaatgccaattgatcgtggtgaattaagtgttctagtaataagctgctggctcagaagttaggagcctgtcacattagaatgatccttttcctggtgggaattccatgtttctctttattgagaactcagaacaattgtaaaccccttcaaccaatactctactccttctacctcttcaggatttcaatg

SEQ ID NO: 39067 - DNA, 167 bp, Homo sapiens
gttcccacagtggcctgtgctactgctcccatggcttttgacaattgcattacactgtccatttgcatttgtcatatggccccatctaactaccactagactctaaggcccatgaggacaaatagttgtgtctctccactccccaccccctgttttttgccctagct

SEQ ID NO: 39068 - DNA, 513 bp, Homo sapiens
gggtggtcttctctccagtctacacctttctgaggcactgcaatcggggataccccagttaccacctcttttggtgaccccaaggtttcagctttgcctgagctctccaggctccagctctgggccaaggtgattttggtggagtcatcccagcggggagctaggaggaagaggggattaggaactcccgctcaggcttccttgctgcacgtacacatgtcacatcaaatgatggtgtttcactctggggacatagttgcttttgataaaatgacttttctgcagtttggttaagctgaatgaaacatatttgagctcctatttttgcttcagaggctattgaatagcagtacctgaagatgaaagtgtataagaacagaatcagtccgggcgcgatggctcatgcctgtaattccagcactttgggaggccgaggcgggtggatcacctgaggtcaggagttcaagaccagcctggccaacatggcaaaaccctgtctctactaaaaaaata

SEQ ID NO: 39069 - DNA, 601 bp, Homo sapiens
gcatggataaaaattggatgggaactggctaaagcttcaggcatggataaaaactggatggcaactggctaaagcctcaggcatgggtaggcatccttaaggtagggaggtcatcagcaagggagtggctactgcccaagggaagccctcagcacatagccccaggaatgattctgaccatgtgcttgctcttatggtctgtagatgctgaacccacccccaagggcctcctgagcattcaagaaatggtcgtcactaaaaatgctccttcatttttaatctgtttgattcctttcagatctgactcttccaacctaggcctcactgatttctctctttccttcaatccagaggagactttctagcctgggaggtgggtttggatgggtaggattggaggaggaactttgctgtcattattttatttaatcatttcatctgctagaagacttcttgcttttcccgagtaccttaaaagacagaaaaacttattttttctttttttctgacccatacttgtctttcatttgaagcaataaacacaaaatggcttagctacttgcagggcagatggtaaatacacagtaaagaaagaagcaga

SEQ ID NO: 39070 - DNA, 356 bp, Homo sapiens
ggaatttggaataaaggaactgtatcatttattctctccttcccacttttttattgctttgaaaaagcagacacttttccttgtcttactgatgtacaaaccttgcttcgttgcaaaatattctgaaaagtcctttcagatctccaaaatcttattacctatttaatgctttaatttgaagtgagatatatatgatgggttttttcatagtgtgaacattagttttatttcgaataactatattttcttgtctatagctatgcataacttgtgattcaaaaaacatcacttaataactttactatttaaaatgtctgtattaaatcattggctagggaaattgggtgctcttttat

SEQ ID NO: 39071 - DNA, 439 bp, Homo sapiens
tctcttgcccaagctggagtacagtggcgcaatctcggctcactgaaacctccacctcctgggttcaagcgatcctcctgcctcagcctcctgagtagttgggattacaggcgcccgccaccacggccggctaatttttgtatttttagtagagacagggtttctccaagttggccagggtggtcttgaactcctggcctcaggtgatctgcctgcctcagcctcccaaagtgctgggattacagacgtgagcgactgcgcccagcctctccaactttaaaataaagaaaatgtcagctggaccacaaacctaaaatattcttaaagcacagacgtccttaaatgaaaacccccttcccactccccagccctgaaaaattacaggtttagcgttacaatacatgaaagcttctaccaaccaggtgcttaggagcaacca

SEQ ID NO: 39072 - DNA, 804 bp, Homo sapiens
ggatagagtcaagacatagatttaactatatgtgcaaacataataaataggtgatgaagcaagcttgctaaagcacaggaaaaggaagcttcacctaaactgctgcttgcaaactgggcagccttttccctctgcaagaacaaccttcaactgtctgccctctagctttataggaagtatcacaagggttctcaaatatcggtatgcgtgagaatctctttgggagtttgtttaaaattccagtcctaggttccctctccagtgatcttagctcagtagagctagggtggggacagagaaactcttagcaagcataccagatcctgaagaggatggtgtgggaatgcactttgagaaatgcctatctaacctttggaaacttaaagtgttcccagtccccattatactttttaaaaccacaatagtcacataaggaaataatctagcagctcatccctttgcatccaatgtttgaactatttttagaaagtgctcttgttctgtcaaagaaccttcaacacagaaaaatacaaaaatgagggaaatgtataattcctgcaagagagaagtgttgttaacatgtcaataaatgttcttagaaagttgtttctatgtctttgaatatatatgtgtgagcctgggcaacatagtgggaccctgtctctaaaaaaattttttttagttaaccgggtgtggtgataccacacctgtagtgccagcaacttgggaggctgaggcaggaggatcacttggatccaggaggttgaggctgcagtgagctatgatcacaccactgcactccag

SEQ ID NO: 39073 - DNA, 422 bp, Homo sapiens
gtgacaggtcagatgcctcctctgtgaagtcctccctcacctcccagcatctgtgctctgactgtgacaactctcacttgaggcctgtcacaaagtatgtgagtggccagggtggagacctcatctgtccggctctatgctccattgctcctgcctggccccatcagtccgacgctcatgtaaccatacatgtactgaagcttaactccatcttatctctgtgatgtgactgccagcgactcaagtgcagggaggttgtccacgtctcctccacgaccacgtgctaaaccccagcaacagtgcctatggaattgtgcagtgcacagcctgtccaccatgatatcaagtttaaccctgggtacaccacagctagcttgcccgcatttgcttaataactgtaatcgtcacagatgctattacct

SEQ ID NO: 39074 - DNA, 512 bp, Homo sapiens
tgaatcctctggttcttggttcggcatgattgtagctgctggtggttgtcatggaaaccagcagaggcgttagatcttagctctgacactcaggagaagctgaacttattctgttatgagctttttttttctctctttttttcttttttttttttttaaatagaaattgtcttgaacctggataaacaggcctcaaagtttttcctccgcctggcttggatatgtttctgtttctgctttctggctacacagaatctaacgacgcatcaagaattggccctggtgctctgtaagatgttttgttgggtctcttttcagttgccagagacagagacctaaatcacgtgtgtatatagacggcagctccatttgttgttccttctagggggtccatacttgtatcagtctgagtccagtccggagagagaaatcacgtagtaatttgaacagagaaaattcaatataaagaattatttactagagcaagggattacagccatgaggggctggct

SEQ ID NO: 39075 - DNA, 416 bp, Homo sapiens
tataaatcactgagtcctaatccaagctgaatgacttgcctaaggtcacaaaatgactcactggctgagctaaaactgaaatactggccttcactgttaattgacttctaactctgcactgttccaacgtggtacacagacaagttgagaagagtgaagttcaggaagaagaagagttctattttcacctcgtgggtaaagtgtttattatttttaaaattccactcttgagctcatgccttctttagatgacaggtgaaatctttccctaacactaggaaaaattggaaaaaaatgggaaacatgaggctttattctgtaccaggccctgtctttcttttggagccatttcaggttataaatatgcattcttcatatgtaatttttttccattggctgtagggttccagtggcct

SEQ ID NO: 39076 - DNA, 407 bp, Homo sapiens
atctataaccaaaaaaaaatcttgagtcagtcttgttagatattgttatacattaagttatttttgtatttctttattggttcattttcttgacgtgtacattttgttcacttattcatgtattcggcaaatgtttagttaacgctcactgtgtcatgcattgttgtaggtgtgtaatacagtaataaataaactctattccctaaggagctatcagtataattatacacatgccgtcacacccacacccacacacatatgtaaaaatatatacacacctacatattatgtattatgtaaatgtagttatagaatactatagtaattcttctttttgatttaaattatatgaattgtaatatttatttaggccttcatattccgatatagagctctccagaaagctc

SEQ ID NO: 39077 - DNA, 418 bp, Homo sapiens
agagtctaaaagatttctactggatcacttgtcaagaagcgccctctctggggagaagggaacgtgaccggattccctcactgttgtatcttgaataaacgctgctgcttcatcctgtgggggccgtggccctgtccctgtgtgggtggggcctcttccatttccctgacttagaaaccacagtccacttagaacagggtttgagaggcttggtcagcactgggtagcgttttgactccattcttggctttcttctttttcttcccagaaggatttttgtgcagaaatgggtcttttgttgccgtgttagtcctccttggaaggcagctcagaaggcccgtgaaatgtcgggggacaggacccccagggagggaatcccaggatacgcactttagggttcgttctccagggagagcga

SEQ ID NO: 39078 - DNA, 563 bp, Homo sapiens
cagagacacagtatgtctctcctttactttcaatcttctttctttagcttgaaccagatgaaattaccaatattcaactttgttgacatcattcaaacagcaatttcatctggttcaaaccttagaaaagttgttttcttcaaagggaaattatgctctctctaaacaaacaaaaaaatagtttctcttaaaaaatctggggagaagtagggtaggaaagaagtatgatatactgtaagtgttttattcattttttaaaaatccctggtccctaagaatttctcactgccaggggcatctctccagcactttcagccacttcatgcctagttcaaggcttcgccagcttagcttcctccccatagtgggccagtccaaaacaaccagggccttgagcctcaaggggtagggctagtccgtgaaaaagggtttcaggccaggtgcggtggctcacatctgtaatcccagcactttgggaagccgaggcgggtggatcacctgaggtcaggagttcaagaccaacctgaccaacatgatgaaaccccatctctactgaaaataca

SEQ ID NO: 39079 - DNA, 323 bp, Homo sapiens
ccctccttggctaaaatgagaaatgaccttctcagattaaacaactgactctcttgttgataaacactcataaaatgttaactcttgtcatttcactagacagagttaacataccaacttcctgaaagactgaaatcatactctgctttttcataccaaaatgttaactctatggaccaaatgcaaattatatcaacacttgtgtgtttacagtcgttttaaaacctgaggtaaactgggcacggtggtctacacctgtaatcccaacactttgggaggccaaggtaggaggcttgcttgtagagacccagtctctataaaaa

SEQ ID NO: 39080 - DNA, 630 bp, Homo sapiens
atatatatgtatatgtatatatgtacacacacacacgtccttcattttaagaaaataagaaaaaattcaaaggtggagcttaatcaaattggtatttattgtgattctgtgattaatcataatttatagaaataattcatatctgtaattctaagtatgtgattaacagatataatgaaattaatattatgaattataaaatagatatgatatgaatataatttatattatgaatgtaaaataggtatcatatgaatatgatttacattatgaatgtaaaataggtatcatatgtcccaaattgcaaagctacaactcacaagtttgcatggccatcttagtatacattgctaaatcctcgaatatttggatgattgtgtatagatgtgataagatttgtgtaattccagtgagttcaaccatttactcatcctctcttgcaatatccaactgacaagtatgtgggatcacacttaggcaatttttttctgcttttcctgcatgataccacagttttctctgaataaatgtcttctttttttaggaaaatgcaaatgtattgattacagtttaaaagctaccatttttaaaagcatgtatcaataaatctaacatttaaatcaaaaaaaa

SEQ ID NO: 39081 - DNA, 1395 bp, Homo sapiens
gtataattttcctactgaagcagtaggagcttgaggccatggctcctaaagctttgaaacccatgcagcaactgaaatagagctcagcattcattattcattcactcactcactcaatagttattgagcacctccaacatgcgaagaccgtgctaggtgctggggatttggcagtgaaccagagatgaattctacattgaagccacttagtaaatatttgttaaacagatagacgagtggatggagacatggatgcattagtagtgagtggataatgtctctatctgtggcatcccttctgctctatgttacctcagagaaaaatctcacttctttactctccgtgatcccacaactgttctggatgggggaagtcccaggaagtttagtctcaagtggagagtagggagagaggaaactaaattcagaggggtagtacccacttaaaggcatccatatgatgagtgctggggccagaagagactggaaccaatgagtcatagggtctcagggtcttcagacatcatatggggctgctacagggatcttttcagagcatccccttcaacagatgttcctcagcctccatgctaactctcaatgatggggcacctgagacaggcattccactgcttgcccctggtgatttccctcattctcacctctaagtaacatccaaaataaaaccagcccagccttgggccatgatatcctaacccacagcatgtgcacatgtacccacatctgcatatctgctctacctccagatcaaaatagcaaccagggagattggcagagcctggagtaccaggctgtcttcccagtttgggactggctgaggcactgtgacttcagtgagagtctgggcccatcctcagtctagaaaaagcttatgcaaggatgagggtagcctagagaaagtccagaaaaccacacaaatgaccacctgttgattccaaggcggagacagagcactttctccttttaaaaacagtatcctctcctctcactcaagcttagcctgctcaactgaacagccaggaaaagctgctggtgtttggtgatttgaagggaagggggtctgaacctcagaagcttgtcacttactggggaccctgatgagtttctctctgttgtcctgccttatccctaatctagctccctgatcatttgaatgtaaccctaattggacaagaattttctccctttcagtatggacaaaatcaacaaccatgaatcagagacttttagaggatgggtagtgaagtgggggaagaacagaacattgtagagtgaggggcagagaggcaggcagtgggcatgggtaggttctggttttgtgattagtaatattatctctttaattgaaaaaaataaactcatttcagattcgta

SEQ ID NO: 39082 - DNA, 433 bp, Homo sapiens
tgagaagaaaagaaagatgcaaaatctaactggcaaaggaataaaatcaaatcagacaccaacataaccagcttcttccgccttcccttagatgatagtcctgaagctgctatgctgaacatctgatgggaagtaaaaggcattaacactctgtaaaacatggcaaggaatatattctataacagttcccctgcagatgaaaatttgccctgaggtatagttcctcagagaaaatgagtttttttctctttagtaaattttttaaagcctttttgtttgtttgtttgacagcctgtgctgcagttctaggttctaagcatatacaccttatattcctgttaatggaatttcagactcaatgtttgcctcaccttttgtgtatagttcctcaatggcctatattggatacaaagtcttacacagttttcaccca

SEQ ID NO: 39083 - DNA, 497 bp, Homo sapiens
tcccaacacaaacaaatgtttgaggtgatggatatcctaattaccctgatttgattattacacattttgttcatgtatcaaatatatataccccataaatatgtataatgattatatatcaaaaataaattttaaaagcaattaacattgataaatttgctttatcacatatttgcccatctttctgtccatctgtctgtccgatttactgcattgcatttcaaagtaagttgaagacagcaatacattttacccttaaatattttagccgcatgcttgattctagaattcacattcaaaaattaaactaatatcatttattagacttaaattaattgcaagtaaggtttaaaaggctgagtgtgactacaaagaagtttggaattttctaaggttaaaaaatattctcttgttcagaatattggctgggtgcggcagatcacttgaggtcaggagtttgagactagcttggtgaaactccatctctactaaaaata

SEQ ID NO: 39084 - DNA, 1332 bp, Homo sapiens
gccgggcatggtggcggctgcctgtagtcccagctactctggaggctgaggcaggagaatggcgtgaacccaggaggcagagcttacagtgagccaagatcacgccactgcactccagcctgggtaacagtgcaagactctgtctcaaaataaataaataaataaataaataaataaataaataaataaaagctataaaacaaagaagttttaaacaggcacttcacaaaagagaaaaataaacatgaaaaggtgtttgatcccatttgtaataaaaaagcacaaattaaaaccacaatgagacaccactggacaagcatcagaatggctaaaattaaaagtggccatgaggatgtggagaacctcaaacactggcatgaatgtgaactgctccctctttagaaaagtctggcatttatccagtaaaaatcaaagacactcacacctcgggacacagcagtgatgccttttctaggctatgcaatgccaaaaatgaaagttcattttgagggaaactaatcaaatgagatgaacaaagtctctcactgcatcttaccgcatttttcatttcccttcatttttcaggggctttgaattccttcgaaagttggaagaatgtgcacacctgtatgcaaagtttccagtctttttttcttttttgaagaagacagggtctcactatgttgcccaggcttgccttgaactcctgagttcaagtgatcctccttgctcagccttcccagtagctgggaccacaggcacaaagtttagagggttccctgatgttctgacggctacctctggatcctggtatccagggattcctatattacaggtacagagctactggagctaaagcagtgcactcaaactattcgacaggtcctggcggaactggtaaggaaggttaccccgcttccagaatgaatacatttatccattttatactctcctgcaggtgcagcctagggtcaccctgaacacacgatccatctacagatgccccttatcctcagtgactagcattagaggcctcccaaacagatctgctcagaggcagaattccaaactcaagtatatgtctcagtgtaaattcataaactggcacttggacttattaaaatcaaaaataagtagagaatgattagcaagagctatcaagtccaaagcagttattttgtggctgacaacactgaggacagtgtgagataaatccactgatcaaactgaccagtagatctgagagaccagaacctaggactcctgcttcccaagccaggagcgtctcccttttacctatcagctctccctctggccacccatccactttcc

SEQ ID NO: 39085 - DNA, 616 bp, Homo sapiens
cactgcactccagcctgggtgagacagtgagaccccgtctcaaaaaaaaaagattaatagggatggggtctcaccatgttcctcagactagattccaactcctagtctcaagcaatcctctcaccttggcctcccaaagtactggaattacagggctgatgagccaccatgctcagtccattttttatttctgacctgtaaaactataataaatgtgtgtcgggcagaggcagtggctcatgtctataatcccaacattttgggaggctaaggtgggaggatcacttgaccccaggagtactagaccagccatggcaacatatcaagaccctgtctctcaaaaaaaaatttaaaatttagctgggcatgatggcatgcacttttagtcccagccacttgggaggctgaggtgggaggatctctgagtctgggagcttgaggctgcagtgactatgatcatagaaccgcactccaccctaggtgaaaaagcaagacgtgtctcagaaaaaaatataaataaataaaacaaatgcatgttgttttcagacactgagttggtggtcaattgttacaacagccataggcccctcaagcatcacctacaattgaccctttc

SEQ ID NO: 39086 - DNA, 351 bp, Homo sapiens
taaacgcatcctcattccttaacagcaaccaacaaaggatgaagacatcagctcaacccgcgattagagcagacaagagtactaacgcgatcctgagttgggtttccttgtctaactctactccagaagatgagaagtatggcccatgcgcagccccagcttcacatgtgataccagatgaccatgtactggtcccacaggtcttgcaagtttttcctgttgttccatgtgcccccacaggatctagatccttctacgacacacaggaggcactcaagccagaaggctgggtgttcctccaccttcttcctcagtgctcctaagagttctgcaagcgccacctcccgccac

SEQ ID NO: 39087 - DNA, 1137 bp, Homo sapiens
atccaagagatgaaagatggttggtttaagctaatcttgataatcctattttcattcgcacatacttaagtttttagtctttcttaaaactagaggtggaaatgtgaaatttatcacatgagaaatttatcattgtcatttatagtggccatcagaaaagataatgaaataagacttttgattcttacttatataatccaatgtcagtaaatataagcactaatgaatgctgacttgaatgctcagggttttcttgaaaattctaaattctgtgataaataattgaccactgtgacaacagaatgtaagtcattaaagtgcattccattacagtaagttggcaggagttcaaacagttctctgtaaatttgtttaactgcgtagattaaatggcaatatattttctataatgaaacttgttgaaatgagagggaatcagctatttacaatcatggcataactacctaggcctttctgtatagagcccacaaacatcgtgaatgtgaatcatgtcattcagagggttagtgaccatgcctctgccatgaacaagagaattcattactacagccggctcaccactcctgcagacaaggcactgattgccccagaccatgtagttccagctccagaagagtgctatgtgtatagtccattgggctctgcttataaacttcaaagttacactgaaggatacggtaaaaacaccagtttagtaaccatttttatgatttggaataccatgatgggaacatctatactaagcattccttggggcataaaacaggctggatttactactggaatgtgtgtcatcatactgatgggccttttaacactttattgctgctacagagtagtgaaatcacggactatgatgttttcgttggataccactagctgggaatatccagatgtctgcagacattatttcggctcctttgggcagtggtcgagtctccttttctccttggtgtctctcattggagcaatgatagtttattgggtgcttatgtcaaattttctttttaatactggaaagtttatttttaattttattcatcacattaatgacacagacactatactgagtaccaataatagcaaccctggtaagtagtttgggatgttgtttgt

SEQ ID NO: 39088 - DNA, 667 bp, Homo sapiens
caagaaactttccgcaatgttgttatctgaatatgccaaatattaagtaatattttctggcccttactgatgcatttgtctaaccttagtttatcacttgcttttatgaattataaaatgttatgatactataatctgtttctcaggttatctgtactattttatctacatttcttttatttttctataatgttttaattttattatcttataatatattctaatgtctagcgatagaatacccataatctttcgccaaatattttgagtttatttggggaacacaaattatgaatatggaatatatgttcaacatttagttttattctttctcttattttatctagtttcgttggataccactagctgggaatatccagatgtctgcagacattatttcggctcctttgggcagtggtcgagtctccttttctccttggtgtctctcattggagcaatgatagtttattgggtgcttatgtcaaattttctttttaatactggaaagtttatttttagtaagtatctatatcatatgcttttaacacagtactttcaaatactattaccactgtaatgttagttctagccttaaattctaggacttgggataaataaaataagaagtaacatatataattttggaaaatatattttattcagttgg

SEQ ID NO: 39089 - DNA, 382 bp, Homo sapiens
attcgcggccgcgtcgaccgaggttgaaggctcggctgctcaggactaacttcttcagtgcttagagtgtgagaaaaatggcaaatatgaatagtgattctaggcatcttggcacctctgaggtagatcatgaaagagatcctggacctatgaatatccagtttgagccatcggatctaagatccaaaaggcctttctgtatagagcccacaaacatcgtgaatgtgaatcatgtcattcagagggttagtgaccatgcctctgccatgaacaagagaattcattactacagccggctcaccactcctgcagacaaggcactgattgccccagagttgacgcggccgtgaatttatattagtagcccgggaattctggaccg

SEQ ID NO: 39090 - DNA, 335 bp, Homo sapiens
tgccgcttcctgtttggactaggagccccgcggtcgcaaattgcgagaatttgggaagggaatctttatcttctcgtctagttctccgaggttgaaggctcggcctgctcagagaaggaaactgaggtccaccgagttggagaaacctactcaacaccagagtttcctgaataagtttttcccaagttctgtgttattctttttgatgaaaggatactggcttccctacaatcatcttttcaacttctaaaatgtttaattttttaaattgaggtaatgctttaaaaatcaataaagctataatacaattctaaatagaacttctctacaatatg

SEQ ID NO: 39091 - DNA, 1201 bp, Homo sapiens
atccaagagatgaaagatggttggtttaagctaatcttgataatcctattttcattcgcacatacttaagtttttagtctttcttaaaactagaggtggaaatgtgaaatttatcacatgagaaatttatcattgtcatttatagtggccatcagaaaagataatgaaataagacttttgattcttacttatataatccaatgtcagtaaatataagcactaatgaatgctgacttgaatgctcagggttttcttgaaaattctaaattctgtgataaataattgaccactgtgacaacagaatgtaagtcattaaagtgcattccattacagtaagttggcaggagttcaaacagttctctgtaaatttgtttaactgcgtagattaaatggcaatatattttctataatgaaacttgttgaaatgagagggaatcagctatttacaatcatggcataactacctaggcctttctgtatagagcccacaaacatcgtgaatgtgaatcatgtcattcagagggttagtgaccatgcctctgccatgaacaagagaattcattactacagccggctcaccactcctgcagacaaggcactgattgccccagaccatgtagttccagctccagaagagtgctatgtgtatagtccattgggctctgcttataaacttcaaagttacactgaaggatacggtaaaaacaccagtttagtaaccatttttatgatttggaataccatgatgggaacatctatactaagcattccttggggcataaaacaggctggatttactactggaatgtgtgtcatcatactgatgggccttttaacactttattgctgctacagagtagtgaaatcacggactatgatgttttcgttggataccactagctgggaatatccagatgtctgcagacattatttcggctcctttgggcagtggtcgagtctccttttctccttggtgtctctcattggagcaatgatagtttattgggtgcttatgtcaaattttctttttaatactggaaagtttatttttagtaagtatctatatcatatgcttttaacacagtactttcaaatactattaccactgtaatgttagttctagccttaaattctaggacttgggataaataaaataagaagtaacatatataattttggaaaatatattttattcagttgg

SEQ ID NO: 39092 - DNA, 1286 bp, Homo sapiens
atccaagagatgaaagatggttggtttaagctaatcttgataatcctattttcattcgcacatacttaagtttttagtctttcttaaaactagaggtggaaatgtgaaatttatcacatgagaaatttatcattgtcatttatagtggccatcagaaaagataatgaaataagacttttgattcttacttatataatccaatgtcagtaaatataagcactaatgaatgctgacttgaatgctcagggttttcttgaaaattctaaattctgtgataaataattgaccactgtgacaacagaatgtaagtcattaaagtgcattccattacagtaagttggcaggagttcaaacagttctctgtaaatttgtttaactgcgtagattaaatggcaatatattttctataatgaaacttgttgaaatgagagggaatcagctatttacaatcatggcataactacctaggcactcagcatctcgatgaaaactgttggaaaagaaaaactttcagagtcattctgccctcagagtagtcaagccaactaaactggcctttctgtatagagcccacaaacatcgtgaatgtgaatcatgtcattcagagggttagtgaccatgcctctgccatgaacaagagaattcattactacagccggctcaccactcctgcagacaaggcactgattgccccagaccatgtagttccagctccagaagagtgctatgtgtatagtccattgggctctgcttataaacttcaaagttacactgaaggatacggtaaaaacaccagtttagtaaccatttttatgatttggaataccatgatgggaacatctatactaagcattccttggggcataaaacaggctggatttactactggaatgtgtgtcatcatactgatgggccttttaacactttattgctgctacagagtagtgaaatcacggactatgatgttttcgttggataccactagctgggaatatccagatgtctgcagacattatttcggctcctttgggcagtggtcgagtctccttttctccttggtgtctctcattggagcaatgatagtttattgggtgcttatgtcaaattttctttttaatactggaaagtttatttttagtaagtatctatatcatatgcttttaacacagtactttcaaatactattaccactgtaatgttagttctagccttaaattctaggacttgggataaataaaataagaagtaacatatataattttggaaaatatattttattcagttgg

SEQ ID NO: 39093 - DNA, 1040 bp, Homo sapiens
tgccgcttcctgtttggactaggagccccgcggtcgcaaattgcgagaatttgggaagggaatctttatcttctcgtctagttctccgaggttgaaggctcggcctgctcagagaaggaaactgaggtccaccgagttggagaaacctactcaacaccaggactaacttcttcagtgcttagagtgtgagaaaaatggcaaatatgaatagtgattctaggcatcttggcacctctgaggtagatcatgaaagagatcctggacctatgaatatccagtttgagccatcggatctaagatccaaaaggcctttctgtatagagcccacaaacatcgtgaatgtgaatcatgtcattcagagggttagtgaccatgcctctgccatgaacaagagaattcattactacagccggctcaccactcctgcagacaaggcactgattgccccagaccatgtagttccagctccagaagagtgctatgtgtatagtccattgggctctgcttataaacttcaaagttacactgaaggatacggtaaaaacaccagtttagtaaccatttttatgatttggaataccatgatgggaacatctatactaagcattccttggggcataaaacaggctggatttactactggaatgtgtgtcatcatactgatgggccttttaacactttattgctgctacagagtagtgaaatcacggactatgatgttttcgttggataccactagctgggaatatccagatgtctgcagacattatttcggctcctttgggcagtggtcgagtctccttttctccttggtgtctctcattggagcaatgatagtttattgggtgcttatgtcaaattttctttttaatactggaaagtttatttttagtaagtatctatatcatatgcttttaacacagtactttcaaatactattaccactgtaatgttagttctagccttaaattctaggacttgggataaataaaataagaagtaacatatataattttggaaaatatattttattcagttgg

SEQ ID NO: 39094 - DNA, 1413 bp, Homo sapiens
atccaagagatgaaagatggttggtttaagctaatcttgataatcctattttcattcgcacatacttaagtttttagtctttcttaaaactagaggtggaaatgtgaaatttatcacatgagaaatttatcattgtcatttatagtggccatcagaaaagataatgaaataagacttttgattcttacttatataatccaatgtcagtaaatataagcactaatgaatgctgacttgaatgctcagggttttcttgaaaattctaaattctgtgataaataattgaccactgtgacaacagaatgtaagtcattaaagtgcattccattacagtaagttggcaggagttcaaacagttctctgtaaatttgtttaactgcgtagattaaatggcaatatattttctataatgaaacttgttgaaatgagagggaatcagctatttacaatcatggcataactacctaggcactcagcatctcgatgaaaactgttggaaaagaaaaactttcagagtcattctgccctcagagtagtcaagccaactaaactgtgagaagtcaatgccttgcctttgtgcatcccattactaatggaggataagaagttattttcttcaaaggctgacttccagaatttttggctgaacactttttgtcaagtgtatattccctttgtaggcctttctgtatagagcccacaaacatcgtgaatgtgaatcatgtcattcagagggttagtgaccatgcctctgccatgaacaagagaattcattactacagccggctcaccactcctgcagacaaggcactgattgccccagaccatgtagttccagctccagaagagtgctatgtgtatagtccattgggctctgcttataaacttcaaagttacactgaaggatacggtaaaaacaccagtttagtaaccatttttatgatttggaataccatgatgggaacatctatactaagcattccttggggcataaaacaggctggatttactactggaatgtgtgtcatcatactgatgggccttttaacactttattgctgctacagagtagtgaaatcacggactatgatgttttcgttggataccactagctgggaatatccagatgtctgcagacattatttcggctcctttgggcagtggtcgagtctccttttctccttggtgtctctcattggagcaatgatagtttattgggtgcttatgtcaaattttctttttaatactggaaagtttatttttagtaagtatctatatcatatgcttttaacacagtactttcaaatactattaccactgtaatgttagttctagccttaaattctaggacttgggataaataaaataagaagtaacatatataattttggaaaatatattttattcagttgg

SEQ ID NO: 39095 - DNA, 389 bp, Homo sapiens
tttttttttttgagacgagtctcgctctgtcgccaggctggagtgcaattgtgcaatctcggctcactgcaacctccacctcccgggtccgagcgattctcctgcctcagcgccccgagtagctggcgccaggccccaggcttccagctcagcttttcccgggacctgtcctagctgttgctttcggccaggctgggcttcacaagagaggtggggtggagttctggcccagggaacagtgaaacggcttcagaaaccaaggtgtggctaatctgatccaggaacatctgccccgcccatgcccattaaccttttttggcaccagggtagctttagcctactcagcctcttctccaccactctaatagaggtaaagtttggggagtaca

SEQ ID NO: 39096 - DNA, 207 bp, Homo sapiens
cttatttttttcacttactactaaagcttattcaactaatttttcctcctattcattcaatgtcagctgagcccatgcaccttctgagaagcattgtttacacttttgcatttcacatttacaacaccataaggcaggtactactatcattccaagtttatagattaaaaaacaaataggttgaggtacttgcctagcaccacatta

SEQ ID NO: 39097 - DNA, 255 bp, Homo sapiens
ccggattcctccacgtgtccccctgtccctgggatggagatgctggtatcactcggcccgtgggcttcagtgcaatgccattcagtaactgtggattgagcacctactgtatgccaggaaccacttggggtggggacctggggataagtctgagagatgctgttattctcttctctgagcttccagacctgtggaagagcatgtagttgtcaaagaatccctcaaataaatacagatgtcccccaatgactaaga

SEQ ID NO: 39098 - DNA, 359 bp, Homo sapiens
acaaaatctcagtttgtattaatgctgcaacttgccctgccaacttcctgagttaaaaatgtaaagcttgccaggtgcggtggctcaagcctgtaatcccagtactttgggaggcagaggcaggtggatcacttgaggtcaggagtttgagaccagcctggctaacatggcgaaaccccatctcttctaaaaatacaaaaattagccaggcttggtggtgcatgcctgtaataccagctacttgggaggctgagacaggagagttgcttgaacccaggaggcggaggttgcagtgagatgagatcatgccactgcactctagcctggccaatagagcaagactaagtctcagaaaaaag

SEQ ID NO: 39099 - DNA, 770 bp, Homo sapiens
gtgggcacaagtttcagattatgctgtggacggaggggatggtggaattgttcactgttgccatgatggtttttcgtacatttttcctccaaagctcctagagttaatttccttggaaaatttacttctgaatatattttataaatctggggagtatcaccatgtgttagaatgagctgagtggtaaattcagttgccaatttgagtacgtatttcagaaagctgctattgacccctaagggggcactgaataatgactgtgcttggagaagagaggttgattagccatcaaatgaatttgactagatgacttgcctgtttacttcatatatgtgaaatacagagaagcatttaatcgtaaatgtttcatttattttatgatcctgagaacattgcagctggatttattgcttttccatacttttattttctttcactcttccctgtttccctcactgctattttcacctactgctgtttaaccttcaattaaaaaaaaaaagctgttctgatacaccatcaggtttgtttgaaaagagcaccttggtgtagaggcttcaaattcaaaccagaaaaacattctgcaggatctgccagggagagctgcctcctgtcaaaacccagcggccttgcagcgttggccagagtcgctctgtccctcttgactctgacttgtctcttcctgcttcagagtcacttgtatcctcatggattagctgccttcactgaggcggcccaaggacagggagagggactctcgcttgttcact

SEQ ID NO: 39100 - DNA, 315 bp, Homo sapiens
gactcaccctaggtgaatgaaattacgtgaaactcacagagaagaaatatatattatggtaaatggggtcttactgaacaaaggtccagggatgaaaataaatcaagagaaatttatcgtgaacagtggtcagcttcttagaagaacatatagattcgtcacaattgcctttggtatttcctgtttccctacacttcttaccaaatgtgctaatacagatggttgtgggctcagcactgattagaaacaagaggtgggaagtcatgaccagagccatcttcaccaacatatattcacagtgactctttaaatatt

SEQ ID NO: 39101 - DNA, 204 bp, Homo sapiens
ggcactcagggaaacagaggaagatattggcagtgtgaagcgaaaccaacaggtaattttcaaatggaccaagtggaagtaacagcgtaaaaaaattgaataacttaggagcaaagaagaaaggatacattgccagctgggtctgatggctcatgcctggaatctcagcactttgggaggccaaggccagagggttgcttgagc

SEQ ID NO: 39102 - DNA, 433 bp, Homo sapiens
tgaggagtttctctctggttgcccaggctagagtgcaatggtgcaatctcggctcacttggcaaatttcgcctcccaggttcaagtgattctcctgcctcagcctcctgagtagcttacaggcatgcaccaccacgccacgccccactaatttcgtatttttagtagagacagggtttcaccatattggtcaggctggtctcgaactcctgacctcaggtgattcacctgccttggcctcccaaagtgctgggattacaggtgtaagccaccacacctggcccttagcagtaaatttgatgcacctgtggaacatgcaagttgtggtaattgtgcaggtgaatctgaagttcaagaagaggtttgttgaatctgaaaattctgcaggacaagaaatagctgtatgcatatcccacagtcactttctcatgata

SEQ ID NO: 39103 - DNA, 378 bp, Homo sapiens
ctcaatcagacgccaattgcggaataccagctgatattctaccctcaactcatgctaaaagctttctagtctttctcaaggaaacctgtccaaagggatatgtgatcccaggaattattattgtataagtaatacttggatgtttttactaatagttcacacatttcacagccctttggtggagagcctttttcgttaatgttctgttcaagaataattgcatagtatttataatcctctcagggattaagtatagatgtaatacacaactcaaagatgcttgttgatgttcactttgtaaaaattcatcaagttgtatacttgatatttgtgcactttctgtgttacatattttttaattaaatacttatagaaact

SEQ ID NO: 39104 - DNA, 283 bp, Homo sapiens
caggggctacataacatagtggtttacagcaaggatttgggatccagactggccagatttgaactccagcactattccttgatacctctgaaacttgggacaagtaacttagtcactatgtatgaaaagagataataatactagtaccttcctcatactacaagactacaagatgtggtcaagaccagaaatatataagcactgtaaaaacaatgtaaaaccaaatgaaaattcttcatttgtatcttccaaaaataaaaaaatagctatttgggattcttgt

SEQ ID NO: 39105 - DNA, 1095 bp, Homo sapiens
cagataattcatagagactaatttcagtcacttcaacgttggcattgacttatcaaataagcaataactaggcagtgtcagtaacatctgttgactcatcaagagccaaggaaaaccactcagggtcatttgccttgttttttattgactgttgatgttgttcccagtgttctcaattctttaagcaaccattcttgccaaaaggctaatttaatagtcttaagtttactttggacacagtccttcagccgatagaatcaaacacaatttagttatcgttagtaaaatgttttccttgcttggttaacatctgagtcactttggctgcaactttattttcatttttgagtttgtttttttttttttttgagactgagtctcattcttttgcccaggctggagtgcagtggcacaatctcagttcactgcaacctccaccctgcaggttcaagcgagtctcctgcctcagcctcccaagtagctgagattacaggcacatgccaccacacctaactaatttttatgtttttagtagaaatggggttttaccatgttgtccaggctggtcttgaactcctgacctcaagtgatccacccacttcagcctcccaaaatgcttggattacaggcatgaaccactgcatctgacctccctatagtattctttaagaacagctataatgacattgcatattaaacatcatactctgacatctaatctgatttttaaaaattcatatactaatgtgccttaaaaatgtcacttcaagtctacttttctttttttctcttgttttgatgttatgggtaagcactagtaataaaaaatttaaaaatattgtggtatgacaacatatgtggcactcaaaatgctggtaactgcattactgcagtttttagtgtgccaagtagcagtgcaaaatgatgacagcaccacataagtctcctttgcatttgttcaactctgccattctaatgtgaaagcaatcatagacagtacctaaacgaatgagtgtggccatgttccaataaaatttcatgagcactgaaagttgaattttacataattttgatgtgttacaaaatactactgtg

SEQ ID NO: 39106 - DNA, 397 bp, Homo sapiens
gcctcatttttataaagatctctatctactctgtttctcaaacaactcaaaataaaaatcctcttattcttattatgattagttaaactctaaagaaatttttaaaatgaggaatatatgaatacaggtactaatacaggctttatgtttgggtaattacttattgctttaagttgtctcattacgatcttttcccacctcagaacaaagagtcagaggagccttctgataatcatctttcttactaaacatgctgattagccaatgataaagtaaagagctgctcatattttttatcccagaactcatgaaatctatttttggcttcaactgtaggcaaggtagcaatgctatcatgataagaataagataatagaaaataagcattttacattat

SEQ ID NO: 39107 - DNA, 294 bp, Homo sapiens
tagctacaaggacaaagataagcctgggctgataagacccttgctaacaggatgggggctaagctgactaaaaccagctaagtccgacgtgacattggatttgacccacgtcctaccccagacataattatacactcattactctcctaagtcactcacccactagtgccatgacagatccgatcatgcccatatttagtagaaaaatgggtggcactccaattctaagagatctccacctttttcctagaagccctcatcattccatcttttaattagaagagctcattaaat

SEQ ID NO: 39108 - DNA, 500 bp, Homo sapiens
aacagtgaaacatgttagttggctagttctttctcattcagtcttaatacatttctttcagtttggcagcaaaattgttttccttaacttgcatgcccttccctgttaaaaatatggaaatttagaaatatacattccttacagtgtttcaggaaggtatgtcatattattttggcttagttttaaaaatcacattaacctctaagctatatgcttcttgaagaagtgactgacttatcatctgctctataataaagctgtagagtggtaataaacaggtttctcctttttttttatctttctcatacgtgggaaccatactgtattttaatctttaaaataatatatatcctcaatatagttttgcttaaagaaaagatacaaaagattcatatcatacaattgcccagaaccaacttctttatacatctctcttctcaaggtttctactcacaatagctgctagaaatgttcccaatccctcacccaatcccagtgcc

SEQ ID NO: 39109 - DNA, 482 bp, Homo sapiens
gtcccgcagatggcaaaggcaggaggaggtatagggaggaagaaaagtaagtgaaagagcatttgttgtttttgtttgtttgttttttaagacagaaagcaaacacagaaaccaagcacgtgatttgttggtttttttcgtttagttttttcctcttttgcagctgcaaggaattttagccaaattagagaggctttgttacccataatttggaattctcacttggatttgaccaagtcaggtagagttggtcaaatctgatgagagaaagaccagaaaaaacaacaacaacagaagtcaaatgatatgaacacagactgctctaatgggaagaagaaattcagaccagctggttgttaaccttcagccaagacaaaacctcagttcagctacttacctagggatgggtctcaggctgaagactgctctctaccatccttgaagcaggaaaaaaactcgaacttgtcttccctgctgggagc

SEQ ID NO: 39110 - DNA, 1103 bp, Homo sapiens
ggattgacagtcggtaattgggtaactggaggcggcttctccggccgggcggccccgccaccgcgacgccgagcccctgacgtcacccgattcgccagggaatgaactttttaataatccgaggagggaggaaggccctcggtcccctcggctccgggggcgcccggctgggcccagctccgcgggcgcgcccccgtcaccccctcccaggccagttcagggcagcgccaaggggccgcgggctcaggctgaggcctcctcctgcctaggcgtctggcgtccgtttgtctgtccgaggcctcagcgcaggtaaagcgcggggctggggggcgcagagctccattgggctgggaaccagcgcgtctcgtgcccttgggggacccgcctgcccgagccgcctgctaagcctcccgctcccctccacgctggagcgcgcggagcccggtctgctcggaactccactctgcgggagcggaggccggcgccagcccgggaagccgcgcagggggcgggaggccgagcgcgaggcccttggcgccgggcctccgcggccaggccgggcagcttacgattcttcatcaactcgtaaaatgagatcgccgcggagctcgagcctatttggcgtctccggagactagcaagaccctctgaaagacaccgcgtccccagggataatcccccgtgtccggcaaagctgccccgctcgagcgcgaaccctgggacccagcgcgggaggcagaccagcagctggccgctgggctgtgaacgccaggaccgagcggaagcttcccgcccggccgcgatcggtgccgcggctctcagggaagtggctacgcgcgtccctcgggaaagcaggtcgtggacagatgatttgaacagcacttcataaaagaagatgtatgaatgccagtaagaacatgacaagatactcaacatcacttgtctttaaggaactgcaaattaaaggcactatatactcacaaaaaatggctaagttaaaaagactgacataacaagcgttgaagaccatgtggagcaactgtaactttcatacactgtgggaatgcaaactggtatagctactttggaaaacagtatggcag

SEQ ID NO: 39111 - DNA, 989 bp, Homo sapiens
  misc_feature (620)..(620): n is a, c, g, or t
  misc_feature (741)..(741): n is a, c, g, or t
  misc_feature (746)..(746): n is a, c, g, or t
  misc_feature (798)..(798): n is a, c, g, or t
  misc_feature (807)..(807): n is a, c, g, or t
  misc_feature (817)..(818): n is a, c, g, or t
  misc_feature (843)..(843): n is a, c, g, or t
  misc_feature (988)..(988): n is a, c, g, or t
ggattgacagtcggtaattgggtaactggaggcggcttctccggccgggcggccccgccaccgcgacgccgagcccctgacgtcacccgattcgccagggaatgaactttttaataatccgaggagggaggaaggccctcggtcccctcggctccgggggcgcccggctgggcccagctccgcgggcgcgcccccgtcaccccctcccaggccagttcagggcagcgccaaggggccgcgggctcaggctgaggcctcctcctgcctaggcgtctggcgtccgtttgtctgtccgaggcctcagcgcagcttacgattcttcatcaactcgtaaaatgagatcgccgcggagctcgagcctatttggcgtctccggagactagcaagaccctctgaaagacaccgcgtccccagggataatcccccgtgtccggcaaagctgccccgctcgagcgcgaaccctgggacccagcgcgggaggcagaccagcagctggccgctgggctgtgaacgccaggaccgagcggaagcttcccgcccggccgcgatcggtgccgcggctctcagggaagtggctacgcgcgtccctcgggaaagcaggtcgggcaaatctgaagatnggaatgccacacggcccagccattccttttccaggcatatgagaagccctcacacatgagcaagaaagagatgtggcaaagacattcatggagccctgtttgttaaaacagagaaaaaganattangaaatacccagctgggcaacatagggagaccctgttctactaaaaataaaantttatactngggaggctanngcaggaggatcacttgagctcagangatcgaagcttgcaatcagctgtgatcgtgtcactgcatgccagctgggtgacagagagtgagaccctgtatcaataaaaaaagaaagaaagaaaagaaacagaaataaacttaggacacagcagacggccccatcctgagggtnc

SEQ ID NO: 39112 - DNA, 1211 bp, Homo sapiens
ggattgacagtcggtaattgggtaactggaggcggcttctccggccgggcggccccgccaccgcgacgccgagcccctgacgtcacccgattcgccagggaatgaactttttaataatccgaggagggaggaaggccctcggtcccctcggctccgggggcgcccggctgggcccagctccgcgggcgcgcccccgtcaccccctcccaggccagttcagggcagcgccaaggggccgcgggctcaggctgaggcctcctcctgcctaggcgtctggcgtccgtttgtctgtccgaggcctcagcgcaggtaaagcgcggggctggggggcgcagagctccattgggctgggaaccagcgcgtctcgtgcccttgggggacccgcctgcccgagccgcctgctaagcctcccgctcccctccacgctggagcgcgcggagcccggtctgctcggaactccactctgcgggagcggaggccggcgccagcccgggaagccgcgcagggggcgggaggccgagcgcgaggcccttggcgccgggcctccgcggccaggccgggcaggtgagcagtctccgtgcctcccggttggcgttcccctcaacgcgtgcggtcccgccggggcccactgtctctccgtccgtctgtctctcaacttttcccatcctttagcttacgattcttcatcaactcgtaaaatgagatcgccgcggagctcgagcctatttggcgtctccggagactagcaagaccctctgaaagacaccgcgtccccagggataatcccccgtgtccggcaaagctgccccgctcgagcgcgaaccctgggacccagcgcgggaggcagaccagcagctggccgctgggctgtgaacgccaggaccgagcggaagcttcccgcccggccgcgatcggtgccgcggctctcagggaagtggctacgcgcgtccctcgggaaagcaggtcgtggacagatgatttgaacagcacttcataaaagaagatgtatgaatgccagtaagaacatgacaagatactcaacatcacttgtctttaaggaactgcaaattaaaggcactatatactcacaaaaaatggctaagttaaaaagactgacataacaagcgttgaagaccatgtggagcaactgtaactttcatacactgtgggaatgcaaactggtatagctactttggaaaacagtatggcag

SEQ ID NO: 39113 - DNA, 1244 bp, Homo sapiens
  misc_feature (875)..(875): n is a, c, g, or t
  misc_feature (996)..(996): n is a, c, g, or t
  misc_feature (1001)..(1001): n is a, c, g, or t
  misc_feature (1053)..(1053): n is a, c, g, or t
  misc_feature (1062)..(1062): n is a, c, g, or t
  misc_feature (1072)..(1073): n is a, c, g, or t
  misc_feature (1098)..(1098): n is a, c, g, or t
  misc_feature (1243)..(1243): n is a, c, g, or t
ggattgacagtcggtaattgggtaactggaggcggcttctccggccgggcggccccgccaccgcgacgccgagcccctgacgtcacccgattcgccagggaatgaactttttaataatccgaggagggaggaaggccctcggtcccctcggctccgggggcgcccggctgggcccagctccgcgggcgcgcccccgtcaccccctcccaggccagttcagggcagcgccaaggggccgcgggctcaggctgaggcctcctcctgcctaggcgtctggcgtccgtttgtctgtccgaggcctcagcgcaggtaaagcgcggggctggggggcgcagagctccattgggctgggaaccagcgcgtctcgtgcccttgggggacccgcctgcccgagccgcctgctaagcctcccgctcccctccacgctggagcgcgcggagcccggtctgctcggaactccactctgcgggagcggaggccggcgccagcccgggaagccgcgcagggggcgggaggccgagcgcgaggcccttggcgccgggcctccgcggccaggccgggcagcttacgattcttcatcaactcgtaaaatgagatcgccgcggagctcgagcctatttggcgtctccggagactagcaagaccctctgaaagacaccgcgtccccagggataatcccccgtgtccggcaaagctgccccgctcgagcgcgaaccctgggacccagcgcgggaggcagaccagcagctggccgctgggctgtgaacgccaggaccgagcggaagcttcccgcccggccgcgatcggtgccgcggctctcagggaagtggctacgcgcgtccctcgggaaagcaggtcgggcaaatctgaagatnggaatgccacacggcccagccattccttttccaggcatatgagaagccctcacacatgagcaagaaagagatgtggcaaagacattcatggagccctgtttgttaaaacagagaaaaaganattangaaatacccagctgggcaacatagggagaccctgttctactaaaaataaaantttatactngggaggctanngcaggaggatcacttgagctcagangatcgaagcttgcaatcagctgtgatcgtgtcactgcatgccagctgggtgacagagagtgagaccctgtatcaataaaaaaagaaagaaagaaaagaaacagaaataaacttaggacacagcagacggccccatcctgagggtnc

SEQ ID NO: 39114 - DNA, 314 bp, Homo sapiens
aatttaaaaaccaaacaacttgagctaagtacatgctatctattagaaacttcaagtacagcaatactgatgaactgaaaggtcaaaagaaaaaggatggtgaaagacagaccatgcaaacacaaatcaaaagaatgctgggttgcctgttttaatttctgacaaaatagacttcagagcaaagaaattaccagggttaaaaagagactttatttatttacttatttagttagttagtttttgagatggagtcttgctctgcactccagcccgggcaacagtgcaaggctccgtctcaaccaaaaaaaaaaaaa

SEQ ID NO: 39115 - DNA, 379 bp, Homo sapiens
gatacaaagttaaacattatactatttgagtatctctcaggcataggttgaaagtgtgcttttaagaaagtcttctaaagttgttggtgctctcagaatttactgctggacctcaactggtcagattgtctgaatatgcagaaaacatttcacttcaatttactctgaaaaagcttgacataatgtcctactattcaatatgagtggatatgctttaatttcttaaatttattttactcccattatgcaaaataccaaaaataaactcttgcatttgtcatatagaaatatctagttaaagtcataagttaaatacaagatttatttaaaagcccatgtaaatatacaaattggagaaaggactaattcttttatagtt

SEQ ID NO: 39116 - DNA, 300 bp, Homo sapiens
acagtggctcacatttaacagggtcttttgtgtgctaaacacaatgccaaagtttatataagtgtcttccaattttcacaatgacgctgaaaacagaagaaatgtggagaatttaaacaccatgcctaaagccatgcaggtgaatagtagtcaacacactgcctgttttacctcacaaaatatctccataacatagctgctgttcctaagttcagaatcataaccttaaatgacttggaaaaccattttaggtaaatgtcctatcagctggaacagtcaaataaaatttaaagagagaca

SEQ ID NO: 39117 - DNA, 411 bp, Homo sapiens
tgagacagagtctcactctgttgcccaggctgcaatacagtggctattcacaggtaccatcccagatgtgctgggattacaggcgtgagccaccgtgcccggcctatatttcttcttttatgtgtttttgttttgttttgttttgttttttccttatagacaaggttgtgttctgttgcccatgctggagtgcagtgggttgataatagttcacagcagcctcaatctcctgggctaaagtggtcttcccacctcggcctctcaagtacctgggattacaggcaccagccactgtaccctgctcctatcttgttatatttcttataataggattaatgcaggcctgctgggggcaaagaaagaaacagtccctaaggagcccttaaagaagaatctccaaattacccataa

SEQ ID NO: 39118 - DNA, 369 bp, Homo sapiens
gttaacatttaatgaaactgttctgtaaaatttactgaaggaaacagtacctccaactattgcatttagacgaaactgttaaaaggaagagcctctgtcagatccaaatggtttgggtcctgtactgtgttacttgtaccagatgcttatgtatctgttaaatgtggaagtcgattttgatgatattcttagaagctgctttaattttcctgagactttgtgtgttggcttttgtctcaaaatagcaggattcacattgcttttgggatgcgatcacttgtttgaatgagcttccttatgtccaaaggttttcatgatcattggattatctttaatgaaacttaaaaagaacaatttctagttaaagta

SEQ ID NO: 39119 - DNA, 405 bp, Homo sapiens
gtgctctgctcctgccttgatgaagcccatgtcctgccttgatgaagcctgtgctacctgcaagtgcccgccctgcccctgtcccaacacccaccgaagagccctgagctcaggctgagcccagccacctcccaaggactttccagtgaggaaatggcaacacgtggaagtgaagtccctgttctcagctctgtcatctgcggggcttctgggtggctcctgccaccgacctcactggcatgctagcctgtggcaggcctaggacctcagcggggaggaggagctgccgcaaggccctatctcagcaggagagggaggcttcctgactgacacaggctagccccatcttggtcctgtcaccctggccccaactattaaagtgccatttcctgtcaaaaaaaaaaa

SEQ ID NO: 39120 - DNA, 409 bp, Homo sapiens
gtgctctgctcctgccttgatgaagcccatgtcctgccttgatgaagcctgtgctacctgcaagtgcccgccctgcccctgtcccaacacccaccgaagagccctgagctcaggctgagcccagccacctcccaaggactttccagtgaggaaatggcaacacgtggaagtgaagtccctgttctcagctctgtcatctgcggggcttctgggtggctcctgccaccgacctcactggcatgctagcctgtggcaggcctaggacctcagcggggaggaggagctgccgcaaggccctatctcagcaggagagggaggcttcctgactgacacaggctagccccatcttggtcctgtcaccctggcactttaatagttgggggtcgacgcggccgccaaatttatcgta

SEQ ID NO: 39121 - DNA, 362 bp, Homo sapiens
tgagtagctaagactcgaggcacataccaccatacctggctaatttttaaatttttttttgtagagacaggctatcactatgttgccttggctggtctcaaactgctggcctcccaaagcactgggattacaggtgtaagccacagtgcatggcctgtagctccttcttcttctaatattgagttactaagtttatgttcagatatttttggtattgtatgcatttgtaaatcctattaatttagaatacatgactctccatattcagtgtaaaagatttgttatttataataagacaaatccttttagcactaataaatttcagaggttaattcttagaaatctagggattacagcaaatt

SEQ ID NO: 39122 - DNA, 236 bp, Homo sapiens
gcagtcgagggagtgtccaagaccttacacagaaaatcatgttcagagaggaagcttgttgctcattccttttttgtgcccagctgcctgggttcccttctccaccattttatttggtagtaagctatctagagaacttgctccctacgctgagccaataagcgaaatgtgtgagctttgaaggatacagtttcatttcgaggaatggagaatatctgtgcaaagttggggcagtt

SEQ ID NO: 39123 - DNA, 556 bp, Homo sapiens
agaaacaacagaaattttacttcttacagttctgaaggctgggaagtccagcatcaaggcaccagcagattcaatgtctgataagggcttgcctcaaagatggtaccttaggctgggtgtggtggctcatacctgtaatcccagcactttgggaggccaaggtcgggggatcccttgagcccaggagttcgacaccagcctgggcaacacagggagacctcatcttaaaaaaagatggcaccttattgcagtgtcctcacgtggcaaaagggcactcatctcattcatgacacaagagccctcgtgacttcacttcctaaaggcccaacctcttaataccatcacactgggtatttaggttcccatatatgaattgtggggggatattaacatttagaccatagcacctactcatgaaagaacattaataattaacacctctagtgagtatttgtgagtctaggatttacagaacataaggatattgtacaaattttaaaagccaaaatgagttttagtattactaaacaacaactgttcagcaggaaaaaaaaga

SEQ ID NO: 39124 - DNA, 214 bp, Homo sapiens
ccaggctggtcttgaacttctgacctcgtgatccacccacctcagcctcccaaagggctggaattataggcgtgagccaccgcacccagccaccgtgaacaattttttaacatttcacacaaagaatatgttccaagtccttactgtgtattctcaccctctcccatctctctctctgtctctctcataaacacacacacacacgtacacaatc

SEQ ID NO: 39125 - DNA, 115 bp, Homo sapiens
gaaagggtccgctaaaatgaaaaagtctgggaaagggaggatcacagataaaaatttgttttcgaaaagtccttgcaagacttctgtaggaaaagcctattaaaatcacttttcc

SEQ ID NO: 39126 - DNA, 576 bp, Homo sapiens
acaaatgacagagtccagcatttctctgtgcagaaaatgttaaaagctcaacttagaaaaaacagccttatttggccagtagtaccatcagggtgtgttgccagtctctgtaccaagaggctgcacgaggtgatgtttgttaactttgtgaatgtaccatggcccagaggttcagctgctgagaacagcttcacctttcagtggtgaactaatatagcccaggctctccaggccagtgtagaaaccaaacagcatgtggatttatttctagtggaaaatctaacagtaacatggaatggaatacagttgtcccgaagtatccatgggggattaattccatctggtaccctcctccactgaagataccaaaatccatacatgttcaagtcccttatataaaatggtgtagtatttacatataacctacacacttcctcccagatactttaaatcatgtctagattacttacaaaacctaatgaaatgtaagtgctatgtaaatagttgttgtattgtttagagaataatgacccctcaaaaaagtctgtacatgtctagcacaggcacaaacatctt

SEQ ID NO: 39127 - DNA, 381 bp, Homo sapiens
gtccccagcatcctcccacctcacagatcctgcaattctggtgcattctggactccaaataaccctgtatatatagagagagatagagattgcctctatctatatacattcgtaagcttccccaaaatgatcttggtatcaataaagggagaattcaggtacatttcaccatcagcctcacagcatggcagccattgatttgtcctgtggcttccttaccagggaaccaatctgcctttatgagaaaaagacaaagatataatagaaaggttggtgggtgactgtctgccaaattggtatcagggttcagtgaacttttatgatatgactatggagttcacccagaggagtgaactttactggacatgattcagagatacc

SEQ ID NO: 39128 - DNA, 436 bp, Homo sapiens
taaacctaggcttttaattttggctatccagataaaagaacttagtatttcattgtcagtttaaaaaaaaaaaaaaactccaattaatccttgcacttgttgtgatcttcctctttgattcctcttaagatacagcctaagccttcttcactgttataagtcttcatttgatcctgctcaacttattctcatagatgacctactcattgtgaaaatggaggtcatcagttatgaaacctcttacctttgcccatccccacatcagtatcctctgtaccactccactgtcttcccagaacatttgtaatcctgtttgtctgtgcctatgattccactctctgaatggcacttctcctatccctttatgcagatgtcctcttatcctttaagcttcaactgtgctatcacctattctaaaaaaaaattctatgaaaaa

SEQ ID NO: 39129 - DNA, 481 bp, Homo sapiens
gatagaccaagaattgatgtagtttgaaatggttttaaaattttgcatgccaattgcacatgcacattagagtcatttttgagtttttacttaatctgtttcaagtaactgtggcccaaaataaaataatatagtcctaatttcaatgtgtggacaattttcgtgctacagtacaaattgcagtaatattcttcactgttataagtcttcatttgatcctgctcaacttattctcatagatgacctactcattgtgaaaatggaggtcatcagttatgaaacctcttacctttgcccatccccacatcagtatcctctgtaccactccactgtcttcccagaacatttgtaatcctgtttgtctgtgcctatgattccactctctgaatggcacttctcctatccctttatgcagatgtcctcttatcctttaagcttcaactgtgctatcacctattctaaaaaaaaattctatgaaaaa

SEQ ID NO: 39130 - DNA, 317 bp, Homo sapiens
actacaggcatgacccaccatgcccagccatcctgtgacctttatcagcatgaatgacactgcatgtcattcccctgctcaaaaccttctactagttccagcttcccttggggtaaagtgtgaattcctgagcttggcattcaaggctctacccaacccaggccctgccaacctccccctctcattcattgctctgccagggcttagccaacattgtggagcagctgcctctcggccaggggggcacatggtgctgtgagctccatgagcttctagttttggaaacccacttggtgtggtttacctggagtgttccc

SEQ ID NO: 39131 - DNA, 370 bp, Homo sapiens
cctcaaggagttcagcctctagggaaagagacaggcaagtgaacagagaattacagtgccagggtgtaagagcctacaacagatgcaagcacctaattcctacacatagaactgaggaacatttttttgagactggagactggagttaaggaaggcctgcccacagtgggatgactggatcttaaagaatgtgttgaatggagccaggcaatgaaggtgatgaaacatctacccaggcaggcaatacagcctgtgcaaatgcagggacccacgtgtggtggtggtggtggtgatgcaggagtgtgagtggggtgcaaatggggtgggattgcaagtggcccagtaaggagagaggcagggatcatgggga

SEQ ID NO: 39132 - DNA, 612 bp, Homo sapiens
tgctgaattgcctttggatgtaccacacattaggcttgactcaccaccttcatttgacaataccacctacaccagcctacctcttgattccccatcaggaaaaccttcactcccagctccatcctcattgccccctctacctcctaaggtcctggtctgctccaagcctgtgacatatgccacagtaatcttcccgggagggaacaagggtggagggacctcgtgtgggccagcccagaatccacctaacaatcagactccatccagctaagctgctcatcacactttaaactcatgaggaccatccctaggggttctgtgcatccatccagccagctcatgccctaggatccttaggatatctgagcaaccagggactttaagatctaatccaatgtcctaactttactagggaaagtgacgctcagacatgactgagatgtcttggggaagacctccctgcacccaactcccccactggttcttctaccattacacactgggctaaataaaccctaataatgatgtgcaaactcttaatggctgaatgggaaaggaaactgcccaagtttgactaattgcttggcctgtgaatggaaaagactctggtct

SEQ ID NO: 39133 - DNA, 837 bp, Homo sapiens
ctgttaaattattaatgatatttattaatgtttcatcatgcctatttcgctgttctgggcactttaagattaaacctggtattaagtgcagcatactcaactagatgtagacttcacttcatagaattttaaatctgatggcaactatatgcaatacgcatttatttttgtgtgtgtttgtaggaaaatttgtagatgtaacaagcaaaacaaagatttttctgaatttccaactctaccataacagaatttcaggcattttccaagaaatggcatgatagcagctgggttgcatgttgtacttagaacactgttgatggagtatatctgttgtgagcctggtttctgtgtatgtgtccaattcagtgataggagaagaaagcctgtaattacatttgcataaagtggttggctgctaaagagatgtaattccattattccaaacttttaattcatattttaaaatataaaaactagtatatatatcaaggaatattttaggaaatcttgtagttacctgtaagtgtctaactgtgtattcaatcagtaaccaatatggaaattgcagagtttcttcatcagaagatatgagtttaaattttatatttggcatgcacagcaatatattaaatgctgtgcttaactagaaagtattgtgcagtgtgatggccttttaacctccacaatatacattttatttttattccctagacttgcacatgaagtgcatatgttcatatttacccgtttggagatgggtaagatacaaccagcatagctccatctccatggccatctttgatttcatgcaactttcctttttcctgtccccctccc

SEQ ID NO: 39134 - DNA, 516 bp, Homo sapiens
cctgtttttgccctaacttagggaagggctttggattctccgccattcagaatgagtcactgtgagactgcggagcggattttactcatcccccaggaatggacccttggaaggctccagaatgactagcctcaagtgttctgtctcaggcacggggcattttcccccactccacgtctgcagtcacttcctctctggacacatcctgtttctgggagcaggcggcatgccaagcagattgcagcctctgagcagacgggcggagacatccttcctcttatttctagtacctaatcccatcttccttcccagtcagagatatcgatcagcatctctgcttttcccaggtccctgcacgccagggagggagagtagagaaggaacatgtttctattggcaactccaacttattggaagtgcttagaaacctctgctgatttcttaccagcttctgaagcacaggtaatcaagagaagatctagggcaaggagccatctattcattcactcagtaaat

SEQ ID NO: 39135 - DNA, 318 bp, Homo sapiens
tggaataatagtgagacacacatattagacacatgattgtgagaagacagttttccaccccacagcacatgaccccatacgtttaagtccctgcctatacaaatagtacagacaaagtaacagcaactttagagggaaacatgactatttccatcatatggtgattctacagagcagaatcagaaacctgggtaaagagaaaagtcctactcagtttcattcttgttaaaagacttaatgactggagttcaaactggcggagtcattggcagcattaaagaagtggggttgaagctgggcaacatttccacaacaggg

SEQ ID NO: 39136 - DNA, 309 bp, Homo sapiens
cctgggcaacctgctcccttgcagtgaacttgactctgtactctgaagggagtgggtaggtgatccaagactgacagtttatattcatctgactaggtaagtgtattgagtccaggtatacacagcagtccccacagagggcacctaaggtctagatttcaggaagacatatgggagcctactagcgttcaagtcaaaaccctactaaatctaaagaaatgatgtagttcagatatgctgggcatctgcctagtctgttaacaggctgatccatttatcctgctccataagagaaaaactcgaaagcaa

SEQ ID NO: 39137 - DNA, 342 bp, Homo sapiens
ccctgcccagaacccaagaatcggaaagctaatgctcaaaggaaggtttcgaggttgtcttattcaatctccccattcctcaaacttgttcacaaatgagaaaacaggcccagcaagttgatatggtgagtatcttaagaggaactattaatagaattaaatctccaggacctccatggtggcctcaggagctcagagctcctttctgcaaccagcctcccgggagcagggcatgcctttgggcacagtggtcctctgcagcctagcccaatgttcctgaatcgaatttctgtgacccacatgggcagtctagctcactcaagttccttgttagggtctggg

SEQ ID NO: 39138 - DNA, 704 bp, Homo sapiens
attttttgcaatggagtcttgctcttgttgcccaggctgagatcgcaccaatgtattccagccggggcgacagagcgaaactccgtctcaaaaaaaaagaaagaaaaagaaactgtgtgtttaagcgttttgatatagggggaaggatggacccgatcctttttgctgaagtctgcagatttcataggccaaggtggaggcctagttgaaaagggggctcagggaagcctggctagagcttggtcaaggaggggatcttcatcagtcgtacgtatgtacatggcacgtggacctgcatagacacgtgtttggtggaggctgtcttatacggattctgcacaactcaagtcccctaatgggaacagacttggggaggtcactcttgaggctttttgtggtattgtggctactgggagacctgaggagggttctggtcactagcagactcatttcattcaccccttggaatctgcccaggacttggacttctgtgtaatagtaacttcacgccccaatgatcctccacgttccttgctgatgctgtgattgctcctccaagttctccacctatgtccatctgagcacttggtatttctactctagtgtcaaaaggtcctgttcccaagtctcctcccaaacatttattccaatttatcatccagatgcccgtcctttgccatccctctctgttccagcaaaggaca

SEQ ID NO: 39139 - DNA, 120 bp, Homo sapiens
tgagcgtggaggagatagtgctctctacgcagggcctctgatcacagagcgtgaagactcccttttaagcccttagaggtgaaacataagaaaagcaaaagggcctgccaagttcatgca

SEQ ID NO: 39140 - DNA, 351 bp, Homo sapiens
agggaaggactcagtcctggcaggaattatcatctgccaactaaaaagcccttgggccttgaataaacatcagtggttgctaggcagtactgaacaggcattgggccatgctgacttcaggtgtgattcagcacatcccaagctgcggtgccacagggagagattcctcctgcttacggaaaaaagagggaagagtgggaagtatactctcttgcagcttgggtgccagctcagccacagtagaatagagcatcaagtagattcctaaggtcctcaattccaggccatagcttctggatggcatctctggatctgcccagggtaggaggaacttgccacaatgaagtaaag

SEQ ID NO: 39141 - DNA, 503 bp, Homo sapiens
tcagcagcttgcttctgccatagaagcttcatgtgccactggtaaaattgtttcagtctctaaatagaccctattctttgcaaacatgagtttatttcccaaatctgaattaatgtatagtgtatctaaattctccttaatatttctctgtctagggctaataggactgcttggctctacctcttggttttcagggcaaggcacatcagattcccgttatgtgctgtctctcttcccctgccaaccaggctggggggcaggggcctataaaatattaaattgaagccagcatgttgtggtttgtggcctgtagatttgtagactgcagtggaaagccaggcctatccctttcagttctggtctggcctggctagaaaatgtcaggatagcactgaggcagaacttgagggtgagagaggactctgtaagcctgataaagagcctcttttgacctgatacagtaatgggctgaaggcagggtgaattgtggatgtgctgagtag

SEQ ID NO: 39142 - DNA, 1206 bp, Homo sapiens
aagtcacagattccttaggtgacttcacagggtagtgatgacctcacaagcttccaaagtttccatggcagcgtgactacacacctgcgtcctagagaagcctccctaccatttctctgtaagataccaatctgtttggttggctgagagagaatgactgaccggatcctctatattgtctctaacatgtcctctgtcccctgggagggcagcgcagagctgcagtgcctgccacttctcctcccacacctgggcactaccatgttctctaccgagggtgtggagaaactcaggtaggctggcatggggagacgtactgcctggttggtggctaccgggtccatggggatgctcctttggccaccccaacaaaggctgaagcagagaagccagcccccaggcgtgctcccaagagacgtcaagctacgatagagtcagataaagacctgggttgctctagccccaaaattcggcgcttggagcatcgtggcaggagactgaccccacagaagcttgctggctgagccatttgggagaaaggacaaatgtttagctgtctaagacagctaatgcctcttctgcggtgacctcccctgcccaccactgcagatagagcctgagtcattctgcctatgccttcctcatccagaagcccccttccatgctaactacccatggccaaggagcctcagaaactgtggtttaaaatgagaggttgctttgaacatcccaaggctgaagacggcctggaagaaaacctgatgttcctctactcatctctccagagtccctttttgggcagaagatagaaatagtctgcactctgctagccgaggagtcaagtgcagagagggagtgcagcatagcccagtaagggcttgatctaccagatgggtctttgctttgagtcactgccagcaactaccagcacaaaccaggagggccaggacttgctgaaactggaagcagcagcccatggctagtcacagcaggagaaagcctcctgcttggcatctcaggaggtagaagaaagagacctggggagacctgccacctacagcaagaacaataaggaggaagttgagcaacatccccctgaagctcacatgttactttatttcctgcccattatggccccagtgaggtccctactgctcaatttaaaaaaaaattaaaaaaattatttttccataacagtatttgact

SEQ ID NO: 39143 - DNA, 486 bp, Homo sapiens
atgtgaggacacgcagaggctcgaatatgctctcaaccctatcagttgcctgctttaattcatcccatggaattgttttgtcttttcgacccctcggctatgttatttgtattgtgatataggggatattcggagtcctctgagacgggacaaggacactggacggtctattgtgccatgcttatatattttctgtatacaatgctttctgtataaaaccagtaatacctgagaaacaacagtaacttgacaaaattactattgatcacttaactttatgtatcacgtaagttaaactttatttatttacatgtgtctccctcattagatgctaagttccttgatattttatacatttgtgaattcctggtaattcacatgaagcttgatgcattgtaagtattctgacctggtgaaataaatatacgaatgggcaaaaaaatatatactaaaatgatcaaataaaggttgtgttcagaaacctct

SEQ ID NO: 39144 - DNA, 763 bp, Homo sapiens
aggtggtgagttacttggctcggagcgggcgaggggacgcgtgggcggagcggggctggccagcctcggcccccatgacccgctgtcctgtgccctttcccagcgatgggcgtgcagccccccaacttctcctgggtgcttccgggccggctggcgggactggcgctgccgcggctccccgcccactaccagttcctgttggacctgggcgtgcggcacctggtgtccctgacggagcgcgggccccctcacagcgacagctgccccggcctcaccctgcaccgcctgcgcatccccgacttctgcccgccggcccccgaccagatcgaccgcttcgtgcagatcgtggacgaggccaacgcacggggagaggctgtgggagtgcactgtgctctgggctttggccgcactggcaccatgctggcctgttacctggtgaaggagcggggcttggctgcaggagatgccattgctgaaatccgacgactacgacccggctccatcgagacctatgagcaggagaaagcagtcttccagttctaccagcgaacgaaataaggggccttagtacccttctaccaggccctcactccccttccccatgttgtcgatggggccagagatgaagggaagtggactaaagtattaaaccctctagctcccattggctgaagacactgaagtagcccacccctgcaggcaggtcctgattgaaggggaggcttgtactgctttgttgaataaatgagttttacgaaccagg

SEQ ID NO: 39145 - DNA, 765 bp, Homo sapiens
tgcagaccacgtggcccgggaggcgccgaggccagcgatgggcgtgcagccccccaacttctcctgggtgcttccgggccggctggcgggactggcgctgccgcggctccccgcccactaccagttcctgttggacctgggcgtgcggcacctggtgtccctgacggagcgcgggccccctcacagcgacagctgccccggcctcaccctgcaccgcctgcgcatccccgacttctgcccgccggcccccgaccagatcgaccgcttcgtgcagatcgtggacgaggccaacgcacggggagaggctgtgggagtgcactgtgctctgggctttggccgcactggcaccatgctggcctgttacctggtgaaggagcggggcttggctgcaggagatgccattgctgaaatccgacgactacgacccggctccatcgagacctatgagcaggagaaagcagtcttccagttctaccagcgaacgaaataaggggccttagtacccttctaccaggccctcactccccttccccatgttgtcgatggggccagagatgaagggaagtggactaaagtattaaaccctctagctcccattggctgaagacactgaagtagcccacccctgcaggcaggtcctgattgaaggggaggcttgtactgctttgttgaataaatgagttttacgaaccaggaaaaaaaaaacaacaacaacaacaaccaaacacaaaaaaaacgaggggaacaaaacgggggccgcaaaag

SEQ ID NO: 39146 - DNA, 695 bp, Homo sapiens
tgcagaccacgtggcccgggaggcgccgaggccagcgatgggcgtgcagccccccaacttctcctgggtgcttccgggccggctggcgggactggcgctgccgcggctccccgcccactaccagttcctgttggacctgggcgtgcggcacctggtgtccctgacggagcgcgggccccctcacagcgacagctgccccggcctcaccctgcaccgcctgcgcatccccgacttctgcccgccggcccccgaccagatcgaccgcttcgtgcagatcgtggacgaggccaacgcacggggagaggctgtgggagtgcactgtgctctgggctttggccgcactggcaccatgctggcctgttacctggtgaaggagcggggcttggctgcaggagatgccattgctgaaatccgacgactacgacccggctccatcgagacctatgagcaggagaaagcagtcttccagttctaccagcgaacgaaataaggggccttagtacccttctaccaggccctcactccccttccccatgttgtcgatggggccagagatgaagggaagtggactaaagtattaaaccctctagctcccattggctgaagacactgaagtagcccacccctgcaggcaggtcctgattgaaggggaggcttgtactgctttgttgaataaatgagttttacgaaccagg

SEQ ID NO: 39147 - DNA, 833 bp, Homo sapiens
aggtggtgagttacttggctcggagcgggcgaggggacgcgtgggcggagcggggctggccagcctcggcccccatgacccgctgtcctgtgccctttcccagcgatgggcgtgcagccccccaacttctcctgggtgcttccgggccggctggcgggactggcgctgccgcggctccccgcccactaccagttcctgttggacctgggcgtgcggcacctggtgtccctgacggagcgcgggccccctcacagcgacagctgccccggcctcaccctgcaccgcctgcgcatccccgacttctgcccgccggcccccgaccagatcgaccgcttcgtgcagatcgtggacgaggccaacgcacggggagaggctgtgggagtgcactgtgctctgggctttggccgcactggcaccatgctggcctgttacctggtgaaggagcggggcttggctgcaggagatgccattgctgaaatccgacgactacgacccggctccatcgagacctatgagcaggagaaagcagtcttccagttctaccagcgaacgaaataaggggccttagtacccttctaccaggccctcactccccttccccatgttgtcgatggggccagagatgaagggaagtggactaaagtattaaaccctctagctcccattggctgaagacactgaagtagcccacccctgcaggcaggtcctgattgaaggggaggcttgtactgctttgttgaataaatgagttttacgaaccaggaaaaaaaaaacaacaacaacaacaaccaaacacaaaaaaaacgaggggaacaaaacgggggccgcaaaag

SEQ ID NO: 39148 - DNA, 143 bp, Homo sapiens
gagtaggggcctggtaaaggggtactaagggccccttatttcgttcgctggtagacactgaagtagcccacccctgcaggcaggtcctgattgaaggggaggcttgtactgctttgttgaataaatgagttttacgaaccagg

SEQ ID NO: 39149 - DNA, 296 bp, Homo sapiens
ccggctccatcgagacctatgagcaggagaaagcagtcttccagttctaccagcgaacgaaataaggggccttagtacccttctaccaggccctcactccccttccccatgttgtcgatggggccagagatgaagggaagtggactaaagtattaaaccctctagctcccattggctgaagacactgaagtagcccacccctgcaggcaggtcctgattgaaggggaggcttgtactgctttgttgaataaatgagttttacgaaccagggcacgttgcatggtactttataaagc

SEQ ID NO: 39150 - DNA, 329 bp, Homo sapiens
gcggccgcctactactactactactgctcgaattcaagcttctaacgatgtacggggaagtcccctcccatcccccacgcagctccaccccagtcccaagccaccagctgtctgctcctggtgggaggtggcctcctcagcccctcctctctgacctttaacctcactctcaccttgcaccgtgcaccaacccttcacccctcctggaaagcaggcctgatggcttcccactggcctccaccacctgaccagagtgttctcttcagaggactggctcctttcccagtgtccttaaaataaagaaatgaaaatgcttgttggcacattca

SEQ ID NO: 39151 - DNA, 1696 bp, Homo sapiens
  misc_feature (19)..(19): n is a, c, g, or t
tgatctagaggatccctanaggctgaatggagagtacaagatgccaactccaccactacccctcctaagagaggcagaacggaagctgggggcccgaggagaggaagacacacatgcctttccagaaggggatgccctttgacctctgcttcctggtgcagagctcagatttcaaggtgatggtgaacgggatcctcttcgtgcagtacttccaccgcgtgcccttccaccgtgtggacaccatctccgtcaatggctctgtgcagctgtcctacatcagcttccagaacccccgcacagtccctgttcagcctgccttctccacggtgccgttctcccagcctgtctgtttcccacccaggcccagggggcgcagacaaaaacctcccggcgtgtggcctgccaacccggctcccattacccagacagtcatccacacagtgcagagcgcccctggacagatgttctctactcccgccatcccacctatgatgtacccccaccccgcctatccgatgcctttcatcaccaccattctgggagggctgtacccatccaagtccatcctcctgtcaggcactgtcctgcccagtgctcagaggttccacatcaacctgtgctctgggaaccacatcgccttccacctgaacccccgttttgatgagaatgctgtggtccgcaacacccagatcgacaactcctgggggtctgaggagcgaagtctgccccgaaaaatgcccttcgtccgtggccagagcttctcagtaaggcaccgcagtctggagcttggagaggctcccatgggtgcacagggggagggggtaaaggaggtttgaggtaccttgaacagtatgggggctgattcctctgggatgaaggcccaaaagaagagaaggtggccaacaaattattattattattactgtcccgcatgaaggaagtgctgggatctgctttttcagatgaggaaacaaactcacaagtgcaggttacttgcttgtggtcacacagtcagtaagtgtcaaatcagacccaagaaggaggtgttattcatttcttcatttactcaacaaccattttcttgtcgcctgctttgcgcaggaagcaccccacatgctgggggcacagtcatgaagcacacagacagggtcctgcctccagggagtttataatttaggtggggaaagaacaaggaaagtaaagcatggacagattgtcacagataacgacagtgccacgcacaaagcaaaacagagcgatgagatagagcgagcctgggaggggcagctagggccaacgtgcagaggcacgggtgtggcctgtccaggaacagcaggcaggcgtgctccaccctgactacatattcaaatcacccagagagcttacaaaggaaatatcagtgctgggaccccagcccaggccaatgaggcagtcagctgggcattcgtattttaaaaatatgccttaagtgattatactctgcagtcagagttgaaaatgactgatgtagggctttgcagccatggaaaggagcttggattttaacacagtgaaaagcctcaggagtgtttcaagccagggagcaacatactttgatttgtagacagctgtgtgacctcggacaagtgacttaattattctgtgcttcagtttcctcatctacaaaatggagctaataatcatgaatttcctagag

SEQ ID NO: 39152 - DNA, 455 bp, Homo sapiens
catggaggaggcagggccaggcattgggcctctcccattgggagtggggagggcacagaccagacccttgaccatctgcccggcctggtgaggttgggggttggatgtgggggttggatgaaacaacctgagttgccaccccgtgggcagccacggaagaccatgccccacattcacttctgtcacctgcaaagggaggctaggctgagagacgtttccccgagaggaaagatgggccagagccaccagcgtccccatctgtcttctccagggttctaacctttgcccctcgctcatccccttgagagaagagacacctgggcccaccctctgtggggtctgtggggccattgggcttgttacgccccctggagggtgcctgccgtgtggcgccctctggtgggagctggtggttttcacacgtgagagcctgggtgagacctggtttctttctt

SEQ ID NO: 39153 - DNA, 1618 bp, Homo sapiens
cagccaagttgctttggtttctttttctttgttaagtcgttccctctacaaaggacttcctagtgggtgtgaaaggcagcggtggccacagaggcggcggagagatggccttcagcggttcccaggctccctacctgagtccagctgtccccttttctgggactattcaaggaggtctccaggacggacttcagatcactgtcaatgggaccgttctcagctccagtggaaccaggtttgctgtgaactttcagactggcttcagtggaaatgacattgccttccacttcaaccctcggtttgaagatggagggtacgtggtgtgcaacacgaggcagaacggaagctgggggcccgaggagaggaagacacacatgcctttccagaaggggatgccctttgacctctgcttcctggtgcagagctcagatttcaaggtgatggtgaacgggatcctcttcgtgcagtacttccaccgcgtgcccttccaccgtgtggacaccatctccgtcaatggctctgtgcagctgtcctacatcagcttccagacccagacagtcatccacacagtgcagagcgcccctggacagatgttctctactcccgccatcccacctatgatgtacccccaccccgcctatccgatgcctttcatcaccaccattctgggagggctgtacccatccaagtccatcctcctgtcaggcactgtcctgcccagtgctcagaggttccacatcaacctgtgctctgggaaccacatcgccttccacctgaacccccgttttgatgagaatgctgtggtccgcaacacccagatcgacaactcctgggggtctgaggagcgaagtctgccccgaaaaatgcccttcgtccgtggccagagcttctcagtgtggatcttgtgtgaagctcactgcctcaaggtggccgtggatggtcagcacctgtttgaatactaccatcgcctgaggaacctgcccaccatcaacagactggaagtggggggcgacatccagctgacccatgtgcagacataggcggcttcctggccctggggccgggggctggggtgtggggcagtctgggtcctctcatcatccccacttcccaggcccagcctttccaaccctgcctgggatctgggctttaatgcagaggccatgtccttgtctggtcctgcttctggctacagccaccctggaacggagaaggcagctgacggggattgccttcctcagccgcagcagcacctggggctccagctgctggaatcctaccatcccaggaggcaggcacagccagggagaggggaggagtgggcagtgaagatgaagccccatgctcagtcccctcccatcccccacgcagctccaccccagtcccaagccaccagctgtctgctcctggtgggaggtggcctcctcagcccctcctctctgacctttaacctcactctcaccttgcaccgtgcaccaacccttcacccctcctggaaagcaggcctgatggcttcccactggcctccaccacctgaccagagtgttctcttcagaggactggctcctttcccagtgtccttaaaataaagaaatgaaaatgcttgttggcacattca

SEQ ID NO: 39154 - DNA, 1583 bp, Homo sapiens
cagccaagttgctttggtttctttttctttgttaagtcgttccctctacaaaggacttcctagtgggtgtgaaaggcagcggtggccacagaggcggcggagagatggccttcagcggttcccaggctccctacctgagtccagctgtccccttttctgggactattcaaggaggtctccaggacggacttcagatcactgtcaatgggaccgttctcagctccagtggaaccagatggagggtacgtggtgtgcaacacgaggcagaacggaagctgggggcccgaggagaggaagacacacatgcctttccagaaggggatgccctttgacctctgcttcctggtgcagagctcagatttcaaggtgatggtgaacgggatcctcttcgtgcagtacttccaccgcgtgcccttccaccgtgtggacaccatctccgtcaatggctctgtgcagctgtcctacatcagcttccagcctcccggcgtgtggcctgccaacccggctcccattacccagacagtcatccacacagtgcagagcgcccctggacagatgttctctactcccgccatcccacctatgatgtacccccaccccgcctatccgatgcctttcatcaccaccattctgggagggctgtacccatccaagtccatcctcctgtcaggcactgtcctgcccagtgctcagaggttccacatcaacctgtgctctgggaaccacatcgccttccacctgaacccccgttttgatgagaatgctgtggtccgcaacacccagatcgacaactcctgggggtctgaggagcgaagtctgccccgaaaaatgcccttcgtccgtggccagagcttctcagtgtggatcttgtgtgaagctcactgcctcaaggtggccgtggatggtcagcacctgtttgaatactaccatcgcctgaggaacctgcccaccatcaacagactggaagtggggggcgacatccagctgacccatgtgcagacataggcggcttcctggccctggggccgggggctggggtgtggggcagtctgggtcctctcatcatccccacttcccaggcccagcctttccaaccctgcctgggatctgggctttaatgcagaggccatgtccttgtctggtcctgcttctggctacagccaccctggaacggagaaggcagctgacggggattgccttcctcagccgcagcagcacctggggctccagctgctggaatcctaccatcccaggaggcaggcacagccagggagaggggaggagtgggcagtgaagatgaagccccatgctcagtcccctcccatcccccacgcagctccaccccagtcccaagccaccagctgtctgctcctggtgggaggtggcctcctcagcccctcctctctgacctttaacctcactctcaccttgcaccgtgcaccaacccttcacccctcctggaaagcaggcctgatggcttcccactggcctccaccacctgaccagagtgttctcttcagaggactggctcctttcccagtgtccttaaaataaagaaatgaaaatgcttgttggcacattca

SEQ ID NO: 39155 - DNA, 1679 bp, Homo sapiens
cagccaagttgctttggtttctttttctttgttaagtcgttccctctacaaaggacttcctagtgggtgtgaaaggcagcggtggccacagaggcggcggagagatggccttcagcggttcccaggctccctacctgagtccagctgtccccttttctgggactattcaaggaggtctccaggacggacttcagatcactgtcaatgggaccgttctcagctccagtggaaccagatggagggtacgtggtgtgcaacacgaggcagaacggaagctgggggcccgaggagaggaagacacacatgcctttccagaaggggatgccctttgacctctgcttcctggtgcagagctcagatttcaaggtgatggtgaacgggatcctcttcgtgcagtacttccaccgcgtgcccttccaccgtgtggacaccatctccgtcaatggctctgtgcagctgtcctacatcagcttccagaacccccgcacagtccctgttcagcctgccttctccacggtgccgttctcccagcctgtctgtttcccacccaggcccagggggcgcagacaaaaacctcccggcgtgtggcctgccaacccggctcccattacccagacagtcatccacacagtgcagagcgcccctggacagatgttctctactcccgccatcccacctatgatgtacccccaccccgcctatccgatgcctttcatcaccaccattctgggagggctgtacccatccaagtccatcctcctgtcaggcactgtcctgcccagtgctcagaggttccacatcaacctgtgctctgggaaccacatcgccttccacctgaacccccgttttgatgagaatgctgtggtccgcaacacccagatcgacaactcctgggggtctgaggagcgaagtctgccccgaaaaatgcccttcgtccgtggccagagcttctcagtgtggatcttgtgtgaagctcactgcctcaaggtggccgtggatggtcagcacctgtttgaatactaccatcgcctgaggaacctgcccaccatcaacagactggaagtggggggcgacatccagctgacccatgtgcagacataggcggcttcctggccctggggccgggggctggggtgtggggcagtctgggtcctctcatcatccccacttcccaggcccagcctttccaaccctgcctgggatctgggctttaatgcagaggccatgtccttgtctggtcctgcttctggctacagccaccctggaacggagaaggcagctgacggggattgccttcctcagccgcagcagcacctggggctccagctgctggaatcctaccatcccaggaggcaggcacagccagggagaggggaggagtgggcagtgaagatgaagccccatgctcagtcccctcccatcccccacgcagctccaccccagtcccaagccaccagctgtctgctcctggtgggaggtggcctcctcagcccctcctctctgacctttaacctcactctcaccttgcaccgtgcaccaacccttcacccctcctggaaagcaggcctgatggcttcccactggcctccaccacctgaccagagtgttctcttcagaggactggctcctttcccagtgtccttaaaataaagaaatgaaaatgcttgttggcacattca

SEQ ID NO: 39156 - DNA, 1455 bp, Homo sapiens
cagccaagttgctttggtttctttttctttgttaagtcgttccctctacaaaggacttcctagtgggtgtgaaaggcagcggtggccacagaggcggcggagagatggccttcagcggttcccaggctccctacctgagtccagctgtccccttttctgggactattcaaggaggtctccaggacggacttcagatcactgtcaatgggaccgttctcagctccagtggaaccaggtttgctgtgaactttcagactggcttcagtggaaatgacattgccttccacttcaaccctcggtttgaagatggagggtacgtggtgtgcaacacgaggcagaacggaagctgggggcccgaggagaggaagacacacatgcctttccagaaggggatgccctttgacctctgcttcctggtgcagagctcagatttcaaggtgatggtgaacgggatcctcttcgtgcagtacttccaccgcgtgcccttccaccgtgtggacaccatctccgtcaatggctctgtgcagctgtcctacatcagcttccagacccagacagtcatccacacagtgcagagcgcccctggacagatgttctctactcccgccatcccacctatgatgtacccccaccccgcctatccgatgcctttcatcaccaccattctgggagggctgtacccatccaagtccatcctcctgtcaggcactgtcctgcccagtgctcagaggtgtggatcttgtgtgaagctcactgcctcaaggtggccgtggatggtcagcacctgtttgaatactaccatcgcctgaggaacctgcccaccatcaacagactggaagtggggggcgacatccagctgacccatgtgcagacataggcggcttcctggccctggggccgggggctggggtgtggggcagtctgggtcctctcatcatccccacttcccaggcccagcctttccaaccctgcctgggatctgggctttaatgcagaggccatgtccttgtctggtcctgcttctggctacagccaccctggaacggagaaggcagctgacggggattgccttcctcagccgcagcagcacctggggctccagctgctggaatcctaccatcccaggaggcaggcacagccagggagaggggaggagtgggcagtgaagatgaagccccatgctcagtcccctcccatcccccacgcagctccaccccagtcccaagccaccagctgtctgctcctggtgggaggtggcctcctcagcccctcctctctgacctttaacctcactctcaccttgcaccgtgcaccaacccttcacccctcctggaaagcaggcctgatggcttcccactggcctccaccacctgaccagagtgttctcttcagaggactggctcctttcccagtgtccttaaaataaagaaatgaaaatgcttgttggcacattca

SEQ ID NO: 39157 - DNA, 1673 bp, Homo sapiens
ataataaaataaaataaataaaactaaataaggtcaggagataccaataccatgtgaaaaatgggaagattagggtatgctgggcccacattcccacagggcaccagcagctgggtgggagctgctgttacccttttggcattcgaggctgctccctgagatcagcgaagcacacagtaggccctcagcaaatctgggcttctcgccctttggtcctcatctctcattccctccttccctgactctctcccctgcgggtggtaggggagggaagagctggagggagaccgcacccctgcactgctcaccagagcctggctctttcccatcccatcttggcagggccctaacccccttgcctcatcgccctgcctgcctggtctctccctcttgcccctgcctctgcctttcggcttctccttggctctattaatgcttctcctcactgcccggtgccttttgttttaacagaacccccgcacagtccctgttcagcctgccttctccacggtgccgttctcccagcctgtctgtttcccacccaggcccagggggcgcagacaaaaacctcccggcgtgtggcctgccaacccggctcccattacccagacagtcatccacacagtgcagagcgcccctggacagatgttctctactcccgccatcccacctatgatgtacccccaccccgcctatccgatgcctttcatcaccaccattctgggagggctgtacccatccaagtccatcctcctgtcaggcactgtcctgcccagtgctcagaggttccacatcaacctgtgctctgggaaccacatcgccttccacctgaacccccgttttgatgagaatgctgtggtccgcaacacccagatcgacaactcctgggggtctgaggagcgaagtctgccccgaaaaatgcccttcgtccgtggccagagcttctcagtgtggatcttgtgtgaagctcactgcctcaaggtggccgtggatggtcagcacctgtttgaatactaccatcgcctgaggaacctgcccaccatcaacagactggaagtggggggcgacatccagctgacccatgtgcagacataggcggcttcctggccctggggccgggggctggggtgtggggcagtctgggtcctctcatcatccccacttcccaggcccagcctttccaaccctgcctgggatctgggctttaatgcagaggccatgtccttgtctggtcctgcttctggctacagccaccctggaacggagaaggcagctgacggggattgccttcctcagccgcagcagcacctggggctccagctgctggaatcctaccatcccaggaggcaggcacagccagggagaggggaggagtgggcagtgaagatgaagccccatgctcagtcccctcccatcccccacgcagctccaccccagtcccaagccaccagctgtctgctcctggtgggaggtggcctcctcagcccctcctctctgacctttaacctcactctcaccttgcaccgtgcaccaacccttcacccctcctggaaagcaggcctgatggcttcccactggcctccaccacctgaccagagtgttctcttcagaggactggctcctttcccagtgtccttaaaataaagaaatgaaaatgcttgttggcacattca

SEQ ID NO: 39158 - DNA, 1211 bp, Homo sapiens
cagccaagttgctttggtttctttttctttgttaagtcgttccctctacaaaggacttcctagtgggtgtgaaaggcagcggtggccacagaggcggcggagagatggccttcagcggttcccaggctccctacctgagtccagctgtccccttttctgggactattcaaggaggtctccaggacggacttcagatcactgtcaatgggaccgttctcagctccagtggaaccaggtttgctgtgaactttcagactggcttcagtggaaatgacattgccttccacttcaaccctcggtttgaagatggagggtacgtggtgtgcaacacgaggcagaacggaagctgggggcccgaggagaggaagacacacatgcctttccagaaggggatgccctttgacctctgcttcctggtgcagagctcagatttcaaggtgatggtgaacgggatcctcttcgtgcagtacttccaccgcgtgcccttccaccgtgtggacaccatctccgtcaatggctctgtgcagctgtcctacatcagcttccagcctcccggcgtgtggcctgccaacccggctcccattacccagacagtcatccacacagtgcagagcgcccctggacagatgttctctactcccgccatcccacctatgatgtacccccaccccgcctatccgatgcctttcatcaccaccattctgggagggctgtacccatccaagtccatcctcctgtcaggcactgtcctgcccagtgctcagaggttccacatcaacctgtgctctgggaaccacatcgccttccacctgaacccccgttttgatgagaatgctgtggtccgcaacacccagatcgacaactcctgggggtctgaggagcgaagtctgccccgaaaaatgcccttcgtccgtggccagagcttctcagtgtggatcttgtgtgaagctcactgcctcaaggtggccgtggatggtcagcacctgtttgaatactaccatcgcctgaggtggcctcctcagcccctcctctctgacctttaacctcactctcaccttgcaccgtgcaccaacccttcacccctcctggaaagcaggcctgatggcttcccactggcctccaccacctgaccagagtgttctcttcagaggactggctcctttcccagtgtccttaaaataaagaaatgaaaatgcttgttggcacattca

SEQ ID NO: 39159 - DNA, 769 bp, Homo sapiens
cagccaagttgctttggtttctttttctttgttaagtcgttccctctacaaaggacttcctagtgggtgtgaaaggcagcggtggccacagaggcggcggagagatggccttcagcggttcccaggctccctacctgagtccagctgtccccttttctgggactattcaaggaggtctccaggacggacttcagatcactgtcaatgggaccgttctcagctccagtggaaccaggtttgctgtgaactttcagactggcttcagtggaaatgacattgccttccacttcaaccctcggtttgaagatggagggtacgtggtgtgcaacacgaggcagaacggaagctgggggcccgaggagaggaagacacacatgcctttccagaaggggatgccctttgacctctgcttcctggtgcagagctcagatttcaaggtgatggtgaacgggatcctcttcgtgcagtacttccaccgcgtgcccttccaccgtgtggacaccatctccgtcaatggctctgtgcagctgtcctacatcagcttccagaacccccgcacagtccctgttcagcctgccttctccacggtgccgttctcccagcctgtctgtttcccacccaggcccagggggcgcagacaaaaacctcccggcgtgtggcctgccaacccggctcccattacccagacagtcatccacacagtgcagagcgcccctggacagatgttctctactcccccgtcccaaagcacagagatccgctagagtca

SEQ ID NO: 39160 - DNA, 912 bp, Homo sapiens
cagccaagttgctttggtttctttttctttgttaagtcgttccctctacaaaggacttcctagtgggtgtgaaaggcagcggtggccacagaggcggcggagagatggccttcagcggttcccaggctccctacctgagtccagctgtccccttttctgggactattcaaggaggtctccaggacggacttcagatcactgtcaatgggaccgttctcagctccagtggaaccaggtttgctgtgaactttcagactggcttcagtggaaatgacattgccttccacttcaaccctcggtttgaagatggagggtacgtggtgtgcaacacgaggcagaacggaagctgggggcccgaggagaggaagacacacatgcctttccagaaggggatgccctttgacctctgcttcctggtgcagagctcagatttcaaggtgatggtgaacgggatcctcttcgtgcagtacttccaccgcgtgcccttccaccgtgtggacaccatctccgtcaatggctctgtgcagctgtcctacatcagcttccaggtcagactgtccacctggcaccggtcccaggggctgggatgcagggcccagcgtagctgtgtctaagccctgctgggtgggcccaagccaatctcctacccaggtcactctggggacaacctctgcttccctgtcccagtacctgcccgccccttctcctctgtcactctgcccctccttctgtgttactgtctctgtccggaacacctgccttggtctcccagactcctcagctgcccctttctcttcatccctcagtttccatcctggtaaggagggcatattgttctagaaagagcccaggctcaagaaccaaactgaatccagttcaaattcccagctctgccattcatcatctgtggga

SEQ ID NO: 39161 - DNA, 318 bp, Homo sapiens
acgggctcaggaaggcttgcttgggagcaagagggaggtgggtgtgtccggggaggcatttctgagcacaagagcctccctggagttttgccaccatctcctcccattctgtggtgcccgcgataaccaccattctgactctcctcacccctccagcctcccggcgtgtggcctgccaacccggctcccattgtaagtctcttgctttctttttggatcgtcctcattttggcttttctgggctcatggaggaggcagggccaggcattgggcctctcccattgggagtggggagggcacagaccagacccttgacca

SEQ ID NO: 39162 - DNA, 1654 bp, Homo sapiens
cagccaagttgctttggtttctttttctttgttaagtcgttccctctacaaaggacttcctagtgggtgtgaaaggcagcggtggccacagaggcggcggagagatggccttcagcggttcccaggctccctacctgagtccagctgtccccttttctgggactattcaaggaggtctccaggacggacttcagatcactgtcaatgggaccgttctcagctccagtggaaccaggtttgctgtgaactttcagactggcttcagtggaaatgacattgccttccacttcaaccctcggtttgaagatggagggtacgtggtgtgcaacacgaggcagaacggaagctgggggcccgaggagaggaagacacacatgcctttccagaaggggatgccctttgacctctgcttcctggtgcagagctcagatttcaaggtgatggtgaacgggatcctcttcgtgcagtacttccaccgcgtgcccttccaccgtgtggacaccatctccgtcaatggctctgtgcagctgtcctacatcagcttccagcctcccggcgtgtggcctgccaacccggctcccattacccagacagtcatccacacagtgcagagcgcccctggacagatgttctctactcccgccatcccacctatgatgtacccccaccccgcctatccgatgcctttcatcaccaccattctgggagggctgtacccatccaagtccatcctcctgtcaggcactgtcctgcccagtgctcagaggttccacatcaacctgtgctctgggaaccacatcgccttccacctgaacccccgttttgatgagaatgctgtggtccgcaacacccagatcgacaactcctgggggtctgaggagcgaagtctgccccgaaaaatgcccttcgtccgtggccagagcttctcagtgtggatcttgtgtgaagctcactgcctcaaggtggccgtggatggtcagcacctgtttgaatactaccatcgcctgaggaacctgcccaccatcaacagactggaagtggggggcgacatccagctgacccatgtgcagacataggcggcttcctggccctggggccgggggctggggtgtggggcagtctgggtcctctcatcatccccacttcccaggcccagcctttccaaccctgcctgggatctgggctttaatgcagaggccatgtccttgtctggtcctgcttctggctacagccaccctggaacggagaaggcagctgacggggattgccttcctcagccgcagcagcacctggggctccagctgctggaatcctaccatcccaggaggcaggcacagccagggagaggggaggagtgggcagtgaagatgaagccccatgctcagtcccctcccatcccccacgcagctccaccccagtcccaagccaccagctgtctgctcctggtgggaggtggcctcctcagcccctcctctctgacctttaacctcactctcaccttgcaccgtgcaccaacccttcacccctcctggaaagcaggcctgatggcttcccactggcctccaccacctgaccagagtgttctcttcagaggactggctcctttcccagtgtccttaaaataaagaaatgaaaatgcttgttggcacattca

SEQ ID NO: 39163 - DNA, 1750 bp, Homo sapiens
cagccaagttgctttggtttctttttctttgttaagtcgttccctctacaaaggacttcctagtgggtgtgaaaggcagcggtggccacagaggcggcggagagatggccttcagcggttcccaggctccctacctgagtccagctgtccccttttctgggactattcaaggaggtctccaggacggacttcagatcactgtcaatgggaccgttctcagctccagtggaaccaggtttgctgtgaactttcagactggcttcagtggaaatgacattgccttccacttcaaccctcggtttgaagatggagggtacgtggtgtgcaacacgaggcagaacggaagctgggggcccgaggagaggaagacacacatgcctttccagaaggggatgccctttgacctctgcttcctggtgcagagctcagatttcaaggtgatggtgaacgggatcctcttcgtgcagtacttccaccgcgtgcccttccaccgtgtggacaccatctccgtcaatggctctgtgcagctgtcctacatcagcttccagaacccccgcacagtccctgttcagcctgccttctccacggtgccgttctcccagcctgtctgtttcccacccaggcccagggggcgcagacaaaaacctcccggcgtgtggcctgccaacccggctcccattacccagacagtcatccacacagtgcagagcgcccctggacagatgttctctactcccgccatcccacctatgatgtacccccaccccgcctatccgatgcctttcatcaccaccattctgggagggctgtacccatccaagtccatcctcctgtcaggcactgtcctgcccagtgctcagaggttccacatcaacctgtgctctgggaaccacatcgccttccacctgaacccccgttttgatgagaatgctgtggtccgcaacacccagatcgacaactcctgggggtctgaggagcgaagtctgccccgaaaaatgcccttcgtccgtggccagagcttctcagtgtggatcttgtgtgaagctcactgcctcaaggtggccgtggatggtcagcacctgtttgaatactaccatcgcctgaggaacctgcccaccatcaacagactggaagtggggggcgacatccagctgacccatgtgcagacataggcggcttcctggccctggggccgggggctggggtgtggggcagtctgggtcctctcatcatccccacttcccaggcccagcctttccaaccctgcctgggatctgggctttaatgcagaggccatgtccttgtctggtcctgcttctggctacagccaccctggaacggagaaggcagctgacggggattgccttcctcagccgcagcagcacctggggctccagctgctggaatcctaccatcccaggaggcaggcacagccagggagaggggaggagtgggcagtgaagatgaagccccatgctcagtcccctcccatcccccacgcagctccaccccagtcccaagccaccagctgtctgctcctggtgggaggtggcctcctcagcccctcctctctgacctttaacctcactctcaccttgcaccgtgcaccaacccttcacccctcctggaaagcaggcctgatggcttcccactggcctccaccacctgaccagagtgttctcttcagaggactggctcctttcccagtgtccttaaaataaagaaatgaaaatgcttgttggcacattca

SEQ ID NO: 39164 - DNA, 729 bp, Homo sapiens
cagccaagttgctttggtttctttttctttgttaagtcgttccctctacaaaggacttcctagtgggtgtgaaaggcagcggtggccacagaggcggcggagagatggccttcagcggttcccaggctccctacctgagtccagctgtccccttttctgggactattcaaggaggtctccaggacggacttcagatcactgtcaatgggaccgttctcagctccagtggaaccaggtttgctgtgaactttcagactggcttcagtggaaatgacattgccttccacttcaaccctcggtttgaagatggagggtacgtggtgtgcaacacgaggcagaacggaagctgggggcccgaggagaggaagacacacatgcctttccagaaggggatgccctttgacctctgcttcctggtgcagagctcagatttcaaggtgatggtgaacgggatcctcttcgtgcagtacttccaccgcgtgcccttccaccgtgtggacaccatctccgtcaatggctctgtgcagctgtcctacatcagcttccagaacccccgcacagtccctgttcagcctgccttctccacggtgccgttctcccagcctgtctgtttcccacccaggcccagggggcgcagacaaaaacctcccggcgtgtggcctgccaacccggctcccattacccagacagtcatccacaccgtgcttatctcaatccggggatcctcta

SEQ ID NO: 39165 - DNA, 565 bp, Homo sapiens
ctgcttaccgtgggcgtatattcactcccgccatcccacctatgatgtacccccaccccgcctatccgatgcctttcatcaccaccattctgggagggctgtacccatccaagtccatcctcctgtcaggcactgtcctgcccagtgctcagaggttccacatcaacctgtgctctgggaaccacatcgccttccacctgaacccccgttttgatgagaatgctgtggtccgcaacacccagatcgacaactcctgggggtctgaggagcgaagtctgccccgaaaaatgcccttcgtccgtggccagagcttctcagtgtggatcttgtgtgaagctcactgcctcaaggtggccgtggatggtcagcacctgtttgaatactaccatcgcctaggtacgcatgcttacctgggcgtatgcaggaggagaacatcacacgggctctcatcgtggtgcagcagggaatgacaccctccgccaagcagtccctggtcgacatggccccaagtacatcctggagcagtttctgcagcaggagctgctcatcaacatcacggagcacg

SEQ ID NO: 39166 - DNA, 1669 bp, Homo sapiens
tgaatgtgccaacaagcattttcatttctttattttaaggacactgggaaaggagccagtcctctgaagagaacactctggtcaggtggtggaggccagtgggaagccatcaggcctgctttcctctcctcggttcccaggctccctacctgagtccagctgtccccttttctgggactattcaaggaggtctccaggacggacttcagatcactgtcaatgggaccgttctcagctccagtggaaccaggtttgctgtgaactttcagactggcttcagtggaaatgacattgccttccacttcaaccctcggtttgaagatggagggtacgtggtgtgcaacacgaggcagaacggaagctgggggcccgaggagaggaagacacacatgcctttccagaaggggatgccctttgacctctgcttcctggtgcagagctcagatttcaaggtgatggtgaacgggatcctcttcgtgcagtacttccaccgcgtgcccttccaccgtgtggacaccatctccgtcaatggctctgtgcagctgtcctacatcagcttccagcctcccggcgtgtggcctgccaacccggctcccattacccagacagtcatccacacagtgcagagcgcccctggacagatgttctctactcccgccatcccacctatgatgtacccccaccccgcctatccgatgcctttcatcaccaccattctgggagggctgtacccatccaagtccatcctcctgtcaggcactgtcctgcccagtgctcagaggttccacatcaacctgtgctctgggaaccacatcgccttccacctgaacccccgttttgatgagaatgctgtggtccgcaacacccagatcgacaactcctgggggtctgaggagcgaagtctgccccgaaaaatgcccttcgtccgtggccagagcttctcagtgtggatcttgtgtgaagctcactgcctcaaggtggccgtggatggtcagcacctgtttgaatactaccatcgcctgaggaacctgcccaccatcaacagactggaagtggggggcgacatccagctgacccatgtgcagacataggcggcttcctggccctggggccgggggctggggtgtggggcagtctgggtcctctcatcatccccacttcccaggcccagcctttccaaccctgcctgggatctgggctttaatgcagaggccatgtccttgtctggtcctgcttctggctacagccaccctggaacggagaaggcagctgacggggattgccttcctcagccgcagcagcacctggggctccagctgctggaatcctaccatcccaggaggcaggcacagccagggagaggggaggagtgggcagtgaagatgaagccccatgctcagtcccctcccatcccccacgcagctccaccccagtcccaagccaccagctgtctgctcctggtgggaggtggcctcctcagcccctcctctctgacctttaacctcactctcaccttgcaccgtgcaccaacccttcacccctcctggaaagcaggcctgatggcttcccactggcctccaccacctgaccagagtgttctcttcagaggactggctcctttcccagtgtccttaaaataaagaaatgaaaatgcttgttggcacattca

SEQ ID NO: 39167 - DNA, 1700 bp, Homo sapiens
cagccaagttgctttggtttctttttctttgttaagtcgttccctctacaaaggacttcctagtgggtgtgaaaggcagcggtggccacagaggcggcggagagatggccttcagcggttcccaggctccctacctgagtccagctgtccccttttctgggactattcaaggaggtctccaggacggacttcagatcactgtcaatgggaccgttctcagctccagtggaaccaggtttgctgtgaactttcagactggcttcagtggaaatgacattgccttccacttcaaccctcggtttgaagatggagggtacgtggtgtgcaacacgaggcagaacggaagctgggggcccgaggagaggaagacacacatgcctttccagaaggggatgccctttgacctctgcttcctggtgcagagctcagatttcaaggtgatggtgaacgggatcctcttcgtgcagtacttccaccgcgtgcccttccaccgtgtggacaccatctccgtcaatggctctgtgcagctgtcctacatcagcttccagcctcccggcgtgtggcctgccaacccggctcccattacccagacagtcatccacacagtgcagagcgcccctggacagatgttctctactcccgccatcccacctatgatgtacccccaccccgcctatccgatgcctttcatcaccaccattctgggagggctgtacccatccaagtccatcctcctgtcaggcactgtcctgcccagtgctcagaggttccacatcaacctgtgctctgggaaccacatcgccttccacctgaacccccgttttgatgagaatgctgtggtccgcaacacccagatcgacaactcctgggggtctgaggagcgaagtctgccccgaaaaatgcccttcgtccgtggccagagcttctcagtgtggatcttgtgtgaagctcactgcctcaaggtggccgtggatggtcagcacctgtttgaatactaccatcgcctgaggaacctgcccaccatcaacagactggaagtggggggcgacatccagctgacccatgtgcagacataggcggcttcctggccctggggccgggggctggggtgtggggcagtctgggtcctctcatcatccccacttcccaggcccagcctttccaaccctgcctgggatctgggctttaatgcagaggccatgtccttgtctggtcctgcttctggctacagccaccctggaacggagaaggcagctgacggggattgccttcctcagccgcagcagcacctggggctccagctgctggaatcctaccatcccaggaggcaggcacagccagggagaggggaggagtgggcagtgaagatgaagccccatgctcagtcccctcccatcccccacgcagctccaccccagtcccaagccaccagctgtctgctcctggtgggaggtggcctcctcagcccctcctctctgacctttaacctcactctcaccttgcaccgtgcaccaacccttcacccctcctggaaagcaggcctgatggcttcccactggcctccaccacctgaccagagtgttctcttcagaggactggctcctttcccagtgtccttaaaataaagaaatgaaaatgcttgttggcacattcaaaaaaaaaaacacaaaaaacaaaaaaaaacacaaacaaacaaaaac

SEQ ID NO: 39168 - DNA, 1179 bp, Homo sapiens
cctagagtaaccacctggagctggttttctcctggagcctgccttctccacggtgccgttctcccagcctgtctgtttcccacccaggcccagggggcgcagacaaaaaacccagacagtcatccacacagtgcagagcgcccctggacagatgttctctactcccgccatcccacctatgatgtacccccaccccgcctatccgatgcctttcatcaccaccattctgggagggctgtacccatccaagtccatcctcctgtcaggcactgtcctgcccagtgctcagaggttccacatcaacctgtgctctgggaaccacatcgccttccacctgaacccccgttttgatgagaatgctgtggtccgcaacacccagatcgacaactcctgggggtctgaggagcgaagtctgccccgaaaaatgcccttcgtccgtggccagagcttctcagtgtggatcttgtgtgaagctcactgcctcaaggtggccgtggatggtcagcacctgtttgaatactaccatcgcctgaggaacctgcccaccatcaacagactggaagtggggggcgacatccagctgacccatgtgcagacataggcggcttcctggccctggggccgggggctggggtgtggggcagtctgggtcctctcatcatccccacttcccaggcccagcctttccaaccctgcctgggatctgggctttaatgcagaggccatgtccttgtctggtcctgcttctggctacagccaccctggaacggagaaggcagctgacggggattgccttcctcagccgcagcagcacctggggctccagctgctggaatcctaccatcccaggaggcaggcacagccagggagaggggaggagtgggcagtgaagatgaagccccatgctcagtcccctcccatcccccacgcagctccaccccagtcccaagccaccagctgtctgctcctggtgggaggtggcctcctcagcccctcctctctgacctttaacctcactctcaccttgcaccgtgcaccaacccttcacccctcctggaaagcaggcctgatggcttcccactggcctccaccacctgaccagagtgttctcttcagaggactggctcctttcccagtgtccttaaaataaagaaatgaaaatgcttgttggcacattca

SEQ ID NO: 39169 - DNA, 1589 bp, Homo sapiens
cagccaagttgctttggtttctttttctttgttaagtcgttccctctacaaaggacttcctagtgggtgtgaaaggcagcggtggccacagaggcggcggagagatggccttcagcggttcccaggctccctacctgagtccagctgtccccttttctgggactattcaaggaggtctccaggacggacttcagatcactgtcaatgggaccgttctcagctccagtggaaccaggtttgctgtgaactttcagactggcttcagtggaaatgacattgccttccacttcaaccctcggtttgaagatggagggtacgtggtgtgcaacacgaggcagaacggaagctgggggcccgaggagaggaagacacacatgcctttccagaaggggatgccctttgacctctgcttcctggtgcagagctcagatttcaaggtgatggtgaacgggatcctcttcgtgcagtacttccaccgcgtgcccttccaccgtgtggacaccatctccgtcaatggctctgtgcagctgtcctacatcagcttccagcctcccggcgtgtggcctgccaacccggctcccattacccagacagtcatccacacagtgcagagcgcccctggacagatgttctctactcccgccatcccacctatgatgtacccccaccccgcctatccgatgcctttcatcaccaccattctgggagggctgtacccatccaagtccatcctcctgtcaggcactgtcctgcccagtgctcagaggttccacatcaacctgtgctctgggaaccacatcgccttccacctgaacccccgttttgatgagaatgctgtggtccgcaacacccagatcgacaactcctgggggtctgaggagcgaagtctgccccgaaaaatgcccttcgtccgtggccagagcttctcagtgtggatcttgtgtgaagctcactgcctcaaggtggccgtggatggtcagcacctgtttgaatactaccatcgcctgaggaacctgcccaccatcaacagactggaagtggggggcgacatccagctgacccatgtgcagacataggcggcttcctggccctggggccgggggctggggtgtggggcagtctgggtcctctcatcatccccacttcccaggcccagcctttccaaccctgcctgggatctgggctttaatgcagaggccatgtccttgtctggtcctgcttctggctacagccaccctggaacggagaaggcagctgacggggattgccttcctcagccgcagcagcacctggggctccagctgctggaatcctaccaagtcccctcccatcccccacgcagctccaccccagtcccaagccaccagctgtctgctcctggtgggaggtggcctcctcagcccctcctctctgacctttaacctcactctcaccttgcaccgtgcaccaacccttcacccctcctggaaagcaggcctgatggcttcccactggcctccaccacctgaccagagtgttctcttcagaggactggctcctttcccagtgtccttaaaataaagaaatgaaaatgcttgttggcacattca

SEQ ID NO: 39170 - DNA, 1861 bp, Homo sapiens
cagccaagttgctttggtttctttttctttgttaagtcgttccctctacaaaggacttcctagtgggtgtgaaaggcagcggtggccacagaggcggcggagagatggccttcagcggttcccaggctccctacctgagtccagctgtccccttttctgggactattcaaggaggtctccaggacggacttcagatcactgtcaatgggaccgttctcagctccagtggaaccaggtttgctgtgaactttcagactggcttcagtggaaatgacattgccttccacttcaaccctcggtttgaagatggagggtacgtggtgtgcaacacgaggcagaacggaagctgggggcccgaggagaggaagacacacatgcctttccagaaggggatgccctttgacctctgcttcctggtgcagagctcagatttcaaggtgatggtgaacgggatcctcttcgtgcagtacttccaccgcgtgcccttccaccgtgtggacaccatctccgtcaatggctctgtgcagctgtcctacatcagcttccagcctcccggcgtgtggcctgccaacccggctcccattacccagacagtcatccacacagtgcagagcgcccctggacagatgttctctactcccgccatcccacctatgatgtacccccaccccgcctatccgatgcctttcatcaccaccattctgggagggctgtacccatccaagtccatcctcctgtcaggcactgtcctgcccagtgctcagaggttccacatcaacctgtgctctgggaaccacatcgccttccacctgaacccccgttttgatgagaatgctgtggtccgcaacacccagatcgacaactcctgggggtctgaggagcgaagtctgccccgaaaaatgcccttcgtccgtggccagagcttctcagtaaggcaccgcagtctggagcttggagaggctcccatgggtgcacagggggagggggtaaaggaggtttgaggtaccttgaacagtatgggggctgattcctctgggatgaaggcccaaaagaagagaaggtggccaacaaattattattattattactgtcccgcatgaaggaagtgctgggatctgctttttcagatgaggaaacaaactcacaagtgcaggttacttgcttgtggtcacacagtcagtaagtgtcaaatcagacccaagaaggaggtgttattcatttcttcatttactcaacaaccattttcttgtcgcctgctttgcgcaggaagcaccccacatgctgggggcacagtcatgaagcacacagacagggtcctgcctccagggagtttataatttaggtggggaaagaacaaggaaagtaaagcatggacagattgtcacagataacgacagtgccacgcacaaagcaaaacagagcgatgagatagagcgagcctgggaggggcagctagggccaacgtgcagaggcacgggtgtggcctgtccaggaacagcaggcaggcgtgctccaccctgactacatattcaaatcacccagagagcttacaaaggaaatatcagtgctgggaccccagcccaggccaatgaggcagtcagctgggcattcgtattttaaaaatatgccttaagtgattatactctgcagtcagagttgaaaatgactgatgtagggctttgcagccatggaaaggagcttggattttaacacagtgaaaagcctcaggagtgtttcaagccagggagcaacatactttgatttgtagacagctgtgtgacctcggacaagtgacttaattattctgtgcttcagtttcctcatctacaaaatggagctaataatcatgaatttcctagag

SEQ ID NO: 39171 - DNA, 638 bp, Homo sapiens
tggcttcaggaaggctactgatgatggggaggaaatgggactcagaattcggtggataaaggttcaggtgggctgcccaccccaggttccacatcaacctgtgctctgggaaccacatcgccttccacctgaacccccgttttgatgagaatgctgtggtccgcaacacccagatcgacaactcctgggggtctgaggagcgaagtctgccccgaaaaatgcccttcgtccgtggccagagcttctcagtaaggcaccgcagtctggagcttggagaggctcccatgggtgcacagggggagggggtaaaggaggtttgaggtaccttgaacagtatgggggctgattcctctgggatgaaggcccaaaagaagagaaggtggccaacaaattattattattattactgtcccgcatgaaggaagtgctgggatctgctttttcagatgaggaaacaaactcacaagtgcaggttacttgcttgtggtcacacagtcagtaagtgtcaaatcagacccaagaaggaggtgttattcatttcttcatttactcaacaaccattttcttgtcgcctgctttgcgcaggaagcaccccacatgctgggggcacagtcatgaagcacacagacagggtcctg

SEQ ID NO: 39172 - DNA, 1514 bp, Homo sapiens
ggccattaccaatcgcgaaaccccgcagggggctcccggaccctgactctgcagccgaaccggcacggtttcgtggggacccaggcttgcaaagtgacggtcattttctctttctttctccctcttgagtccttctgagatgatggctctgggcgcagcgggagctacccgggtctttgtcgcgatggtagcggcggctctcggcggccaccctctgctgggagtgagcgccaccttgaactcggttctcaattccaacgctatcaagaacctgcccccaccgctgggcggcgctgcggggcacccaggctctgcagtcagcgccgcgccgggaatcctgtacccgggcgggaataagtaccagaccattgacaactaccagccgtacccgtgcgcagaggacgaggagtgcggcactgatgagtactgcgctagtcccacccgcggaggggacgcgggcgtgcaaatctgtctcgcctgcaggaagcgccgaaaacgctgcatgcgtcacgctatgtgctgccccgggaattactgcaaaaatggaatatgtgtgtcttctgatcaaaatcatttccgaggagaaattgaggaaaccatcactgaaagctttggtaatgatcatagcaccttggatgggtattccagaagaaccaccttgtcttcaaaaatgtatcacaccaaaggacaagaaggttctgtttgtctccggtcatcagactgtgcctcaggattgtgttgtgctagacacttctggtccaagatctgtaaacctgtcctgaaagaaggtcaagtgtgtaccaagcataggagaaaaggctctcatggactagaaatattccagcgttgttactgtggagaaggtctgtcttgccggatacagaaagatcaccatcaagccagtaattcttctaggcttcacacttgtcagagacactaaaccagctatccaaatgcagtgaactccttttatataatagatgctatgaaaaccttttatgaccttcatcaactcaatcctaaggatatacaagttctgtggtttcagttaagcattccaataacaccttccaaaaacctggagtgtaagagctttgtttctttatggaactcccctgtgattgcagtaaattactgtattgtaaattctcagtgtggcacttacctgtaaatgcaatgaaacttttaattatttttctaaaggtgctgcactgcctatttttcctcttgttatgtaaatttttgtacacattgattgttatcttgactgacaaatattctatattgaactgaagtaaatcatttcagcttatagttcttaaaagcataaccctttaccccatttaattctagagtctagaacgcaaggatctcttggaatgacaaatgataggtacctaaaatgtaacatgaaaatactagcttattttctgaaatgtactatcttaatgcttaaattatatttccctttaggctgtgatagtttttgaaataaaatttaacatttaatatca

SEQ ID NO: 39173 - DNA, 1900 bp, Homo sapiens
gcagagctctgtgctccctgcagtcaggactctgggaccgcagggggctcccggaccctgactctgcagccgaaccggcacggtttcgtggggacccaggcttgcaaagtgacggtcattttctctttctttctccctcttgagtccttctgagatgatggctctgggcgcagcgggagctacccgggtctttgtcgcgatggtagcggcggctctcggcggccaccctctgctgggagtgagcgccaccttgaactcggttctcaattccaacgctatcaagaacctgcccccaccgctgggcggcgctgcggggcacccaggctctgcagtcagcgccgcgccgggaatcctgtacccgggcgggaataagtaccagaccattgacaactaccagccgtacccgtgcgcagaggacgaggagtgcggcactgatgagtactgcgctagtcccacccgcggaggggacgcgggcgtgcaaatctgtctcgcctgcaggaagcgccgaaaacgctgcatgcgtcacgctatgtgctgccccgggaattactgcaaaaatggaatatgtgtgtcttctgatcaaaatcatttccgaggagaaattgaggaaaccatcactgaaagctttggtaatgatcatagcaccttggatgggtattccagaagaaccaccttgtcttcaaaaatgtatcacaccaaaggacaagaaggttctgtttgtctccggtcatcagactgtgcctcaggattgtgttgtgctagacacttctggtccaagatctgtaaacctgtcctgaaagaaggtcaagtgtgtaccaagcataggagaaaaggctctcatggactagaaatattccagcgttgttactgtggagaaggtctgtcttgccggatacagaaagatcaccatcaagccagtaattcttctaggcttcacacttgtcagagacactaaaccagctatccaaatgcagtgaactccttttatataatagatgctatgaaaaccttttatgaccttcatcaactcaatcctaaggatatacaagttctgtggtttcagttaagcattccaataacaccttccaaaaacctggagtgtaagagctttgtttctttatggaactcccctgtgattgcagtaaattactgtattgtaaattctcagtgtggcacttacctgtaaatgcaatgaaacttttaattatttttctaaaggtgctgcactgcctatttttcctcttgttatgtaaatttttgtacacattgattgttatcttgactgacaaatattctatattgaactgaagtaaatcatttcagcttatagttcttaaaagcataaccctttaccccatttaattctagagtctagaacgcaaggatctcttggaatgacaaatgataggtacctaaaatgtaacatgaaaatactagcttattttctgaaatgtactatcttaatgcttaaattatatttccctttaggctgtgatagtttttgaaataaaatttaacatttaatatcatgaaatgttataagtagacatacattttgggattgtgatcttagaggtttgtgtgtgtgtacgtatgtgtgtgttctacaagaacggaagtgtgatatgtttaaagatgatcagagaaaagacagtgtctaaatataagacaatattgatcagctctagaataactttaaagaaagacgtgttctgcattgataaactcaaatgatcatggcagaatgagagtgaatcttacattactactttcaaaaatagtttccaataaattaataatacctacctaaatggtcaatatttttcggacaaggaagaaaatcatccacaaaaataatactccaaagtacttggtgattggcaggaacaggatgtgtgcc

SEQ ID NO: 39174 - DNA, 1459 bp, Homo sapiens
cctcttgagtccttctgagagggagaaagaaagagaaaatgacggtcattttctctttctttctccctcttgagtccttctgagatgatggctctgggcgcagcgggagctacccgggtctttgtcgcgatggtagcggcggctctcggcggccaccctctgctgggagtgagcgccaccttgaactcggttctcaattccaacgctatcaagaacctgcccccaccgctgggcggcgctgcggggcacccaggctctgcagtcagcgccgcgccgggaatcctgtacccgggcgggaataagtaccagaccattgacaactaccagccgtacccgtgcgcagaggacgaggagtgcggcactgatgagtactgcgctagtcccacccgcggaggggacgcgggcgtgcaaatctgtctcgcctgcaggaagcgccgaaaacgctgcatgcgtcacgctatgtgctgccccgggaattactgcaaaaatggaatatgtgtgtcttctgatcaaaatcatttccgaggagaaattgaggaaaccatcactgaaagctttggtaatgatcatagcaccttggatgggtattccagaagaaccaccttgtcttcaaaaatgtatcacaccaaaggacaagaaggttctgtttgtctccggtcatcagactgtgcctcaggattgtgttgtgctagacacttctggtccaagatctgtaaacctgtcctgaaagaaggtcaagtgtgtaccaagcataggagaaaaggctctcatggactagaaatattccagcgttgttactgtggagaaggtctgtcttgccggatacagaaagatcaccatcaagccagtaattcttctaggcttcacacttgtcagagacactaaaccagctatccaaatgcagtgaactccttttatataatagatgctatgaaaaccttttatgaccttcatcaactcaatcctaaggatatacaagttctgtggtttcagttaagcattccaataacaccttccaaaaacctggagtgtaagagctttgtttctttatggaactcccctgtgattgcagtaaattactgtattgtaaattctcagtgtggcacttacctgtaaatgcaatgaaacttttaattatttttctaaaggtgctgcactgcctatttttcctcttgttatgtaaatttttgtacacattgattgttatcttgactgacaaatattctatattgaactgaagtaaatcatttcagcttatagttcttaaaagcataaccctttaccccatttaattctagagtctagaacgcaaggatctcttggaatgacaaatgataggtacctaaaatgtaacatgaaaatactagcttattttctgaaatgtactatcttaatgcttaaattatatttccctttaggctgtgatagtttttgaaataaaatttaacatttaatatca

SEQ ID NO: 39175 - DNA, 1369 bp, Homo sapiens
ggtcgggcactcagaggatgctctgaccttgaaagggtcctatctggagacgagggagtagaacgtgctgaatgtgtgcggttcagggagcatttggtaaccctgcatttgggagcagtgggcagtaacaggttttggagaggtggacagataaggactgtgatcagcgcccgggtccaagagggcgggtacctggacgtctgggtgcctcaccctctccccgaacccttcccacagccgtacccgtgcgcagaggacgaggagtgcggcactgatgagtactgcgctagtcccacccgcggaggggacgcgggcgtgcaaatctgtctcgcctgcaggaagcgccgaaaacgctgcatgcgtcacgctatgtgctgccccgggaattactgcaaaaatggaatatgtgtgtcttctgatcaaaatcatttccgaggagaaattgaggaaaccatcactgaaagctttggtaatgatcatagcaccttggatgggtattccagaagaaccaccttgtcttcaaaaatgtatcacaccaaaggacaagaaggttctgtttgtctccggtcatcagactgtgcctcaggattgtgttgtgctagacacttctggtccaagatctgtaaacctgtcctgaaagaaggtcaagtgtgtaccaagcataggagaaaaggctctcatggactagaaatattccagcgttgttactgtggagaaggtctgtcttgccggatacagaaagatcaccatcaagccagtaattcttctaggcttcacacttgtcagagacactaaaccagctatccaaatgcagtgaactccttttatataatagatgctatgaaaaccttttatgaccttcatcaactcaatcctaaggatatacaagttctgtggtttcagttaagcattccaataacaccttccaaaaacctggagtgtaagagctttgtttctttatggaactcccctgtgattgcagtaaattactgtattgtaaattctcagtgtggcacttacctgtaaatgcaatgaaacttttaattatttttctaaaggtgctgcactgcctatttttcctcttgttatgtaaatttttgtacacattgattgttatcttgactgacaaatattctatattgaactgaagtaaatcatttcagcttatagttcttaaaagcataaccctttaccccatttaattctagagtctagaacgcaaggatctcttggaatgacaaatgataggtacctaaaatgtaacatgaaaatactagcttattttctgaaatgtactatcttaatgcttaaattatatttccctttaggctgtgatagtttttgaaataaaatttaacatttaatatca

SEQ ID NO: 39176 - DNA, 1032 bp, Homo sapiens
tcacagctgttagcagtaatgcattacaaccctgaagttaatcactatttcctgcttccttaggaatatgtgtgtcttctgatcaaaatcatttccgaggagaaattgaggaaaccatcactgaaagctttggtaatgatcatagcaccttggatgggtattccagaagaaccaccttgtcttcaaaaatgtatcacaccaaaggacaagaaggttctgtttgtctccggtcatcagactgtgcctcaggattgtgttgtgctagacacttctggtccaagatctgtaaacctgtcctgaaagaaggtcaagtgtgtaccaagcataggagaaaaggctctcatggactagaaatattccagcgttgttactgtggagaaggtctgtcttgccggatacagaaagatcaccatcaagccagtaattcttctaggcttcacacttgtcagagacactaaaccagctatccaaatgcagtgaactccttttatataatagatgctatgaaaaccttttatgaccttcatcaactcaatcctaaggatatacaagttctgtggtttcagttaagcattccaataacaccttccaaaaacctggagtgtaagagctttgtttctttatggaactcccctgtgattgcagtaaattactgtattgtaaattctcagtgtggcacttacctgtaaatgcaatgaaacttttaattatttttctaaaggtgctgcactgcctatttttcctcttgttatgtaaatttttgtacacattgattgttatcttgactgacaaatattctatattgaactgaagtaaatcatttcagcttatagttcttaaaagcataaccctttaccccatttaattctagagtctagaacgcaaggatctcttggaatgacaaatgataggtacctaaaatgtaacatgaaaatactagcttattttctgaaatgtactatcttaatgcttaaattatatttccctttaggctgtgatagtttttgaaataaaatttaacatttaatatca

SEQ ID NO: 39177 - DNA, 770 bp, Homo sapiens
ttaatgcttaaattatatttccctttaggctgtgatagtttttgaaataaagctagtattttcatgttacattttaggtacctatcatttgtcattccagcgttgttactgtggagaaggtctgtcttgccggatacagaaagatcaccatcaagccagtaattcttctaggcttcacacttgtcagagacactaaaccagctatccaaatgcagtgaactccttttatataatagatgctatgaaaaccttttatgaccttcatcaactcaatcctaaggatatacaagttctgtggtttcagttaagcattccaataacaccttccaaaaacctggagtgtaagagctttgtttctttatggaactcccctgtgattgcagtaaattactgtattgtaaattctcagtgtggcacttacctgtaaatgcaatgaaacttttaattatttttctaaaggtgctgcactgcctatttttcctcttgttatgtaaatttttgtacacattgattgttatcttgactgacaaatattctatattgaactgaagtaaatcatttcagcttatagttcttaaaagcataaccctttaccccatttaattctagagtctagaacgcaaggatctcttggaatgacaaatgataggtacctaaaatgtaacatgaaaatactagcttattttctgaaatgtactatcttaatgcttaaattatatttccctttaggctgtgatagtttttgaaataaaatttaacatttaatatca

SEQ ID NO: 39178 - DNA, 996 bp, Homo sapiens
gcagagctctgtgctccctgcagtcaggactctgggaccgcagggggctcccggaccctgactctgcagccgaaccggcacggtttcgtggggacccaggcttgcaaagtgacggtcattttctctttctttctccctcttgagtccttctgagatgatggctctgggcgcagcgggagctacccgggtctttgtcgcgatggtagcggcggctctcggcggccaccctctgctgggagtgagcgccaccttgaactcggttctcaattccaacgctatcaagaacctgcccccaccgctgggcggcgctgcggggcacccaggctctgcagtcagcgccgcgccgggaatcctgtacccgggcgggaataagtaccagaccattgacaactaccagccgtacccgtgcgcagaggacgaggagtgcggcactgatgagtactgcgctagtcccacccgcggaggggacgcgggcgtgcaaatctgtctcgcctgcaggaagcgccgaaaacgctgcatgcgtcacgctatgtgctgccccgggaattactgcaaaaatggaatatgtgtgtcttctgatcaaaatcatttccgaggagaaattgaggaaaccatcactgaaagctttggtaatgatcatagcaccttggatgggtattccagaagaaccaccttgtcttcaaaaatgtatcacaccaaaggacaagaaggttctgtttgtctccggtcatcagactgtgcctcaggattgtgttgtgctagacacttctggtccaagatctgtaaacctgtcctgaaagaaggtcaagtgtgtaccaagcataggagaaaaggctctcatggactagaaatattccagcgttgttactgtggagaaggtgagtttcatatttcaagttttgtttaacctgaaatctattgattggaatgaggatacggatacagtattttaaagaaaacccacaggaataaaatctaaattttctttgcatttgt

SEQ ID NO: 39179 - DNA, 500 bp, Homo sapiens
atgttaagactcattcttagcacatcagaagtgtcttttgaattattttagtgaaacgatgcaggtttaacagtaactatgtacttttttcctactgtcttctccttcgtaggacaagaaggttctgtttgtctccggtcatcagactgtgcctcaggattgtgttgtgctagacacttctggtccaagatctgtaaacctgtcctgaaagaaggtcaagtgtgtaccaagcataggagaaaaggctctcatggactagaaatattccagcgttgttactgtggagaaggtctgtcttgccggatacagaaagatcaccatcaagccagtaattcttctaggcttcacacttgtcagagacactaaaccagctatccaaatgcagtgaactccttttatataatagatgctatgaaaaccttttatgaccttcatcaactcaatcctaaggatatacaagttctgtggtttcagttaagcattccaataacaccttccaa

SEQ ID NO: 39180 - DNA, 1529 bp, Homo sapiens
gcagagctctgtgctccctgcagtcaggactctgggaccgcagggggctcccggaccctgactctgcagccgaaccggcacggtttcgtggggacccaggcttgcaaagtgacggtcattttctctttctttctccctcttgagtccttctgagatgatggctctgggcgcagcgggagctacccgggtctttgtcgcgatggtagcggcggctctcggcggccaccctctgctgggagtgagcgccaccttgaactcggttctcaattccaacgctatcaagaacctgcccccaccgctgggcggcgctgcggggcacccaggctctgcagtcagcgccgcgccgggaatcctgtacccgggcgggaataagtaccagaccattgacaactaccagccgtacccgtgcgcagaggacgaggagtgcggcactgatgagtactgcgctagtcccacccgcggaggggacgcgggcgtgcaaatctgtctcgcctgcaggaagcgccgaaaacgctgcatgcgtcacgctatgtgctgccccgggaattactgcaaaaatggaatatgtgtgtcttctgatcaaaatcatttccgaggagaaattgaggaaaccatcactgaaagctttggtaatgatcatagcaccttggatgggtattccagaagaaccaccttgtcttcaaaaatgtatcacaccaaaggacaagaaggttctgtttgtctccggtcatcagactgtgcctcaggattgtgttgtgctagacacttctggtccaagatctgtaaacctgtcctgaaagaaggtcaagtgtgtaccaagcataggagaaaaggctctcatggactagaaatattccagcgttgttactgtggagaaggtctgtcttgccggatacagaaagatcaccatcaagccagtaattcttctaggcttcacacttgtcagagacactaaaccagctatccaaatgcagtgaactccttttatataatagatgctatgaaaaccttttatgaccttcatcaactcaatcctaaggatatacaagttctgtggtttcagttaagcattccaataacaccttccaaaaacctggagtgtaagagctttgtttctttatggaactcccctgtgattgcagtaaattactgtattgtaaattctcagtgtggcacttacctgtaaatgcaatgaaacttttaattatttttctaaaggtgctgcactgcctatttttcctcttgttatgtaaatttttgtacacattgattgttatcttgactgacaaatattctatattgaactgaagtaaatcatttcagcttatagttcttaaaagcataaccctttaccccatttaattctagagtctagaacgcaaggatctcttggaatgacaaatgataggtacctaaaatgtaacatgaaaatactagcttattttctgaaatgtactatcttaatgcttaaattatatttccctttaggctgtgatagtttttgaaataaaatttaacatttaatatca

SEQ ID NO: 39181 - DNA, 2386 bp, Homo sapiens
gcagagctctgtgctccctgcagtcaggactctgggaccgcagggggctcccggaccctgactctgcagccgaaccggcacggtttcgtggggacccaggcttgcaaagtgacggtcattttctctttctttctccctcttgagtccttctgagatgatggctctgggcgcagcgggagctacccgggtctttgtcgcgatggtagcggcggctctcggcggccaccctctgctgggagtgagcgccaccttgaactcggttctcaattccaacgctatcaagaacctgcccccaccgctgggcggcgctgcggggcacccaggctctgcagtcagcgccgcgccgggaatcctgtacccgggcgggaataagtaccagaccattgacaactaccagccgtacccgtgcgcagaggacgaggagtgcggcactgatgagtactgcgctagtcccacccgcggaggggacgcgggcgtgcaaatctgtctcgcctgcaggaagcgccgaaaacgctgcatgcgtcacgctatgtgctgccccgggaattactgcaaaaatggaatatgtgtgtcttctgatcaaaatcatttccgaggagaaattgaggaaaccatcactgaaagctttggtaatgatcatagcaccttggatgggtattccagaagaaccaccttgtcttcaaaaatgtatcacaccaaaggacaagaaggttctgtttgtctccggtcatcagactgtgcctcaggattgtgttgtgctagacacttctggtccaagatctgtaaacctgtcctgaaagaaggtcaagtgtgtaccaagcataggagaaaaggctctcatggactagaaatattccagcgttgttactgtggagaaggtctgtcttgccggatacagaaagatcaccatcaagccagtaattcttctaggcttcacacttgtcagagacactaaaccagctatccaaatgcagtgaactccttttatataatagatgctatgaaaaccttttatgaccttcatcaactcaatcctaaggatatacaagttctgtggtttcagttaagcattccaataacaccttccaaaaacctggagtgtaagagctttgtttctttatggaactcccctgtgattgcagtaaattactgtattgtaaattctcagtgtggcacttacctgtaaatgcaatgaaacttttaattatttttctaaaggtgctgcactgcctatttttcctcttgttatgtaaatttttgtacacattgattgttatcttgactgacaaatattctatattgaactgaagtaaatcatttcagcttatagttcttaaaagcataaccctttaccccatttaattctagagtctagaacgcaaggatctcttggaatgacaaatgataggtacctaaaatgtaacatgaaaatactagcttattttctgaaatgtactatcttaatgcttaaattatatttccctttaggctgtgatagtttttgaaataaaatttaacatttaatatcaaaaaaaaaaaaaaaaaaaaaaaaaaaaaaaaaaaaaaaaaaaaaaaaaaaaaaaaaaaaaaaaaaaaaaaaaaaaaaaaaaaaggaaaaaaaaaaagaaaagaaggggggggcggcaacacacatacacgggaggggccagaaagaacgaagaccaacgaacggcgacgggaagagcgaggcccacagaggaggcagtaaaagacagccggaggggcaggccaacaacacacggcacacgggaagacaaaagaaccacagagcagagcaagagagagaccaacaaccagcggggcgaagcaccacgagtagcagcaaacgcagcagagaagaaaccgaagcgacaggaacgcagaaacaacccaggaggggaggagaggctcgagcgaaaccaaagccgaagaaaccggggaagggagagcaaacgaagcgccgggggagggggacgacgagacgaaaacccaaaaagggggcgggagacaaacacagcccgacagaaagaagagaaaaagcaacgaagaaagagaggaaagagaggacgaccgggcagaagacgccgaacacaaagagaagcacacaagagaaacagaagcggaggacgaaaccgagaagagagagacgcaaaacgacaagacaggcaccagacgaaacgaagcagcacgcagaacacaaagacagagaggcagagaggagaaggaaagcaggaacaagagcgacgccagacaggagccagaacaagaagaagacgcagagggaggaaacaaacaagagaagaagaacagcaacaccagaagagcgaagaagcgaagcgccacacagaaggagacgcagcgaagagagcggcagtgagacaaagcg

SEQ ID NO: 39182 - DNA, 1011 bp, Homo sapiens
gtgtttaatcgggaagaagagagaagttgggaggtctctgaggaatatgtgtgtcttctgatcaaaatcatttccgaggagaaattgaggaaaccatcactgaaagctttggtaatgatcatagcaccttggatgggtattccagaagaaccaccttgtcttcaaaaatgtatcacaccaaaggacaagaaggttctgtttgtctccggtcatcagactgtgcctcaggattgtgttgtgctagacacttctggtccaagatctgtaaacctgtcctgaaagaaggtcaagtgtgtaccaagcataggagaaaaggctctcatggactagaaatattccagcgttgttactgtggagaaggtctgtcttgccggatacagaaagatcaccatcaagccagtaattcttctaggcttcacacttgtcagagacactaaaccagctatccaaatgcagtgaactccttttatataatagatgctatgaaaaccttttatgaccttcatcaactcaatcctaaggatatacaagttctgtggtttcagttaagcattccaataacaccttccaaaaacctggagtgtaagagctttgtttctttatggaactcccctgtgattgcagtaaattactgtattgtaaattctcagtgtggcacttacctgtaaatgcaatgaaacttttaattatttttctaaaggtgctgcactgcctatttttcctcttgttatgtaaatttttgtacacattgattgttatcttgactgacaaatattctatattgaactgaagtaaatcatttcagcttatagttcttaaaagcataaccctttaccccatttaattctagagtctagaacgcaaggatctcttggaatgacaaatgataggtacctaaaatgtaacatgaaaatactagcttattttctgaaatgtactatcttaatgcttaaattatatttccctttaggctgtgatagtttttgaaataaaatttaacatttaatatca

SEQ ID NO: 39183 - DNA, 395 bp, Homo sapiens
ctatcacttgtggattctttgagtacctataaaggcaattgacctgaggtcaggatactggaattcacttagagtagcccttgaataatccctgcattcacataattagggcttagggttcaccttagccattttcacatgtggggtttcttattcctaaaataaatttttttgccttcaataattgttgtgcacctcaatgtattttgtattttggactttttaaaatgttaccaatccttaataatagttgacacttacatagtactcactgtatggcaggcattgctttaggtaatttatacgtccatattaactgattattcattcatcttcacatacacactataaggcaggtacttcacaaagacaccatgaggtaagtataattgtca

SEQ ID NO: 39184 - DNA, 874 bp, Homo sapiens
aatgcaagttttctttccaggtagaaggacaagaaaaaaatgagccaatgccatagaaacgcaaagggttaaaggttttacttttacttttgttttgggtacgctttctatacttggatcaaatgtatttttctgctcaaaatactttcaaattattgaaagttttcattccaaatcctagatttttaggattgttacccttgagaaactgtttctcacactagagctccccccatagtgctctaaatatagcttagtaaaggcacctactttgctctaagcatacttaaagttaaaacaaaagtatgtatacgaagagtttgatatttttaatagttggagtctgttttgctaattttagtgtgcaagtcagcacaaggggcatagtgagcctgatggaagctttcctcaggtgagtgagtttcacaatcaaaattaggtgcctgtttcttaaaattagattctgctgcaggtttacatactagacttttcagcctgcatgaattagtagggatattctttttttacttgcataattgtaattgatttaaacatgtatgccagaattcacaggcccatactaactgtccttaatttctttcctacagcagtactgctatatgccagtcctgtctgcattcttaagggtgcagttcaacacatcctctctagattatggtgaaaaagtattccaaaggaagtcttatcagagctagtgtcagaaagaatgacactaccaattgggcatgatcttcagcataggaaatgtcttagaattttattattttttcctaaattgtgatgctatactacttgtatagctagttaccacatttctaaagcatagtgtgcctctgtgaatcttgttatatac

SEQ ID NO: 39185 - DNA, 294 bp, Homo sapiens
tcgatcctttcccccattcatagtttatggtcccatttaaaattcatgtaatgccgtaaccttttacaatacttataaataaacacgtacattaagaaaaaacaaaccttatattaaatgagaataaaaccagattaaaaaaagatgaggttgcagtatacctggaaataccaaggaattcacttgcctaaccacagaacacaaaccttttgggggtggaaaaaaactgtggagattgtctactgtagcatcctatttaataattaaggaggttaactttcagtgaaatgactg

SEQ ID NO: 39186 - DNA, 313 bp, Homo sapiens
  misc_feature (261)..(261): n is a, c, g, or t
gcggaagtttagtttttaattctgaattacagattacagttattgactttgcattgccttgtagctcttggctgctctttgtggggttcagggaccagtagaatcaggagcccctgggagcttattaggaatgcagaatttcaggcccctccccagacctactgagaatctgcattttaagaagatgtgactttctgacgagctcagatctctctccagccttccctagggttcatcttgcatctgatactctctctcagnctctctactctagctctcactaagaggcgcaggtcattcatcatcatacgag

SEQ ID NO: 39187 - DNA, 312 bp, Homo sapiens
gctcactgcagcctccatctcctgggttcaagcgattctcctgcctcagcctcctgagtagctgcgactacaggcgcatgccaccacgcctggctaattttttgtatttttattagagacagggtctcaccatgttggccaggctggactcgaactcctagcctcaagtgatccacctgccttggcctccccaaatgctgggattacaggtgtgagccaccacgcctggcctgtgatcatttttgatgctttcctttgatcttccaatttctcttcctgctgctcactgtaagccactcctaggttctgcac

SEQ ID NO: 39188 - DNA, 460 bp, Homo sapiens
cagttggatttatgagcctggagtcaggggagaaattggggctgaagataatccatttggaagtcatcagtgtgaagatggtgcttaaagacatgagactgaggtgaggtcaccaagggagcaggcagatagaaaaagttggaggactgagtcccagggccctccaaattccagcagcccagagatgagaaaggaccagctttaaaggtggattcagagataccagcaaaggagaggagatacagcgtgtgctgataaacctgccctctgaaaataaagaaataaacgcattgatttgtagagttttccagtttccatggtgtaaataactcccactgtggtccatttcaggctaccaacatgacgtcactgaacagggagtcaggagctttgcacatagtcaactcttgcaaactattatgagtttgtcctgctccccactgcctggaaaccaagcaaa

SEQ ID NO: 39189 - DNA, 369 bp, Homo sapiens
aaaaatttattttttaaaccaatttccccaaatacctaaatattattttaataatctttatatgtgaatgtataaatccatgccaaaagttactaacattggtaaaatgcctgagccagttctaccacgtagacagtacttattaaaaatggattggtagaccaaaattcttcattgcataaagaaacgtactgttttcttaagatttgtggcccaacagcaaggttataaaataccaagtttggacatcgtgctcacttcagcagcacatatactaaaaattggaatgatatggggaagataatcatggccctgagcaaggatgacaacacaaattagtgaagtgttccatattttattaaaaaaaaa

SEQ ID NO: 39190 - DNA, 355 bp, Homo sapiens
ttcctccaaattactgcaacacctccccaataaggattgagaactgggctgaggctgacatggctgaaatgacagaagtaggctccagaatgtggattaaaacaaacttcatgtgctgaaggagcacattgtaacccagtgtaaggaagctaagaatcataaaacaatacaggagctgaagacaaaatagccagtatagagaggaacataatcgacctgacagttaaaaaaattcactacgaggacttcacaatacaatcacaagtattaataccagaatagaccaaacaagaaaaaatctcagagcttgaagactgtctttctgaaataagagaggcagacaaaaaatagagaa

SEQ ID NO: 39191 - DNA, 581 bp, Homo sapiens
gtcttatagaaaaccaaatggaaaatgaatataaggaaatgcaaaatacattaaatttctttttacccttgctgcctgttttttctttagttcatcctggacttgtgggccaatacttttttgttatgtttaatactaggagagcaaatacataacaggaactgtgatgaatctggaaagaaaatttatatcattcagtcttcctgaagctgtaagaatctccttaacatctattagatttattttctctttgcatttaaagttttggagaaaatatctttgtcatactgacttggttcttagctatgtaagaggactaaatctaggtgcggagtttgctggtttaaatagaattaaaaatttatttttttctggtgacctggagagtgtttcttaaaattataataatgaatacttttcatgctctgatttatgtataggaattattaagagcttcactctgataaagttatttaccacttggctactcaggggtggagtcatttcacaaaggatctgcagcgaatgaattagaccaggagtaacttcacccttctgcttgtcccagctggagcaggatt

SEQ ID NO: 39192 - DNA, 331 bp, Homo sapiens
cttacaaagtggggctcacactatataaagagctctataacttaatgcattctggacattcttccatatgaatagattacaatctgattcttatcaatgactgcaaaatatttcataatatgaatatattacagtatcttcaagcattcttctattgatgggtatttctattgggtatagctttggtttttttgtttgtttgccttggtttggtttacactgttacaagtattgctatactaaacacagcatgaacttatatacttatgactgatagaattaattcatcaaaattagaagctaaatcaaaggctgctgcttcctatgttat

SEQ ID NO: 39193 - DNA, 419 bp, Homo sapiens
acccactcactgtcccccagttgcccatccacatgggacccacacccacactgagcaagccctggcctatctctcttcgggagaaattttgtgatgacagtttacacaagtgagtactcaagctggaaaaaattaagcgaagttccattacatggaaaacagaattcagaaatcccaaagtgtaaccattttgcttataaaacaagactgatggataaaaattaagaaccgcccagaagatttatctggaagaaaggaagaggttgtctttttctttagagtttattgcttatgacataatcttataaagataaagccataatcctctcattatactatgggtccacggaagctgccatatgtctctgattaggatatacatacaaatatctatgccttgttaaaaaggattctctaga

SEQ ID NO: 39194 - DNA, 471 bp, Homo sapiens
acactgcctcttctgcctctctttgccacttgtaaggactcttgcaattaggcagggtcccatcagataacccaagacaatttcccccatctcaaagtcagctcattagcaaccttaattccgcctgcaaccttaattcccctttgccatgtaacctaacacatccacaggttccagggattagggcatgacatctctagggggccgttactctgcccaccaccctacctcactcccacccccttacccccctgtaaacaataatggcagaagcatttattgagcacttactaggtgcctgccattgtgcccagagcttcttcccagaaggtctctttgacctttgaatgatctcatccattcctcacaaccctatggagagggttttttttagtgttctcattttacgtattcaaagaagtaactccccaaggtcacacagtgagtaagggctggatataggaatttgaa

SEQ ID NO: 39195 - DNA, 393 bp, Homo sapiens
tttgtggggcgagccaaactgctgagcttggaatagcatatgcttggaatctgaatatgaataaggcccaggtgccacactttacacacagatcctttgctaaagaggcactatttgtctaacaggcaaggaccaggctggcagtcaggaaggctgggttttggtgctgatcttgtcaccaactatgcactcttgaacaagtcacttcacttcactatcctaagcctgttttctcatctgaaaaataaaggggttagacttagccttttaaatgacatttttgtatatttctactggctataaaattattacaaatatctatgtctgacggtaagatagtctaaatattcaggaaaactccaagtatagctctcctaaaaatgatatgttgcg

SEQ ID NO: 39196 - DNA, 464 bp, Homo sapiens
tctcggttgacatggagagcagggtttgttgttactgttatatggtggtaagggatctgcatgagagctaagggtgggagcacagggcagtagtggtgttggggcccaggcaggcctttgacttgtccaaggatggcgtgaaaagatgctctgctctgttggtcttccaaaaaccctcctaccctacccagagctccagaaaagtcagccactacctaaggagaagtgtttaatttttttggggggggggtgggggcaggcacagagtctcactctgtcaccgaggctggagtgccgtggcgtgatcttggctcactgcaacctccgcctcctgggttcaagcagttctttgcctcagcctcccgagtagctgggattacaggtgcctgccaccacgcccagctaatttttgtatttttagtagagacggggtttcaccatattggccaggctggtcttgaact

SEQ ID NO: 39197 - DNA, 5063 bp, Homo sapiens
  misc_feature (612)..(612): n is a, c, g, or t
  misc_feature (3544)..(3544): n is a, c, g, or t
ctgggctctgagggcgaaggcttgggggagacctggcttagccacccggctagccgcgtttggcatgggcaggtctgtctctgctccgaggcatattcccactgggcagtgacgggggaagcttgggacccgctatccgctctttccgtcctccaggctggcagccctggaggcccgcgtggcgcagctgcgagaggcgcgggcgcagcaggcccagcaggtggaggagtggcgggcgcagaatgcggtgcagcgggcagcctacgaggcgctgcgcgcgcacgtcgggctccgggaggcggcactgcgcaggctccaggaagaggcgcgcgacctgctggagaggctcgtgcagcgcaaggcgcgcgccgcggccgagcgcaacctgcgcaacgagcgccgggagcgggccaagcaggcgcgggtgtcccaggagctgaagaaggctgccaagcggaccgtgagcatcagcgacgtgagcatcagcgagtaagagtggggatgggccggtccgacccttgcgttctgcctcccgccccgcctgcctgcggcgacccaggctgccgactgtacttgtgcacagccccgtcctgaggcccccatgtggtcggngcccacgagacacctgcagaggaccgtgtggtcgtaggagcctgcatgcgtgaccgctgcacgtgtacacccacacagaaccctcatcactgggaattcctgtcttcagcgtatcctgtgctggggtcgggaggggctggcttggtcccttggcctttctgaacttcattacctctcctaggggcccggacaccctaggcgatgggatgagggagagaagggagactctggctctggcccctgagccagagcccctggagaaggaagcttgtgagaagtggaagaggcccttcaggtgaggacccaggtgacagtctcagagctctgagctgagccccaccccagaggctgccagggtcttcctcttggaccttggagccagctcttgggttgggagggggcttgaggagaggccagaaagctcagatctcccagggctagtctgacctccattgtctggagccacttggggtcagttccatctcacccccccaacccctaccctcaaccctttccctccttcttgggatcagagctctgggggtggggagtcaggcttctgaatagctgtcaccaggagagaacctgtgggcaaagcccagagcccagtcatgccaggcatgtgtgcgcagccataggtgtgcaagcatgtgcatccgcagggacatgaggccacaggtgtgtacaagcttgactgagcccgtctgtatgtgtgaatatataagcatgtgtagatgtgtgctcacacttgtgggacctgattggggcttcagaccttgggtgcctgtccgcagggtctcctccatccttcttgatttgcctgtcattgaggctgcccgctctgggcgccattccccagcctaacacctcttctcagtctttccttgcaggtccctggtgtccaggccttggggcagtgaagaaaccgtggggaggggcatgagatgccagtccccaaagtccttgggagcccttgtgggccaagtcattgtaggacacaccctctcctgggcattgctgaggtcacccagtgagcctaggctcccccctcctcccatccccagcctgggggaaccttcagcgtctctcctccctgtaggccccggctcagcttcccaggaacttttgttggtgggtactagtagggtaaggcagttcttcccatcatgagggagaccttgggagactttcattaccaaatccattgctgccccgaccttcctgggactgatctgggtcaccctggtctcctgatcttggagaagtcaagttcttatcccagacttgagaggttacaagcctccaggtctctggcaaagtgtggagatgatggacagccatttgtacacacaccagccagtcccttagcatatctctcttggttttgtctcaggtctgcctcagccacctccctgacgctgtcccactgtgtggatgtggtgaaggggcttctggagtaagtgtgtgtgtgcctgtgtgtgcacccacgtgtgtgtcgggctccccagcccaggcttggtctgtgtctgtgcctcgacctgtccatccctgtgatgtgcagctgtctgcctgtgagtctgttgggccttggagacaggagccaggtgaatggcctcagccccggccccggttcagctgtcttccaggttctgtcctcacaagggtctgtcttcatccaaggtcgtcacaggggaccaagagctccagcctcaggcagggcaggagctcctactcaattgggaaaaatgctctgaaatgtcagggactcattcagagtcacagagccaagcagtggcaagactgggattgaaaccccggccctgaggtttctttgcacccaccaaccctaccctgctcctgtgtctgcctctgtgtgctccccaccccgtctccacaccaacccctggggtcgaggctgggttggggaatgctctcgctgctccttggggccatgttctgccgcctgccatgtctgcttcctatggttgatgcctcaggggagctggaggctcccacctgagaaggacttgctgaatgccctcctgaccccaacccaccttaccccagttttaagaagaggagaggtcactcaattgggggagcccctgagcagcgataccagatcatccctgtgtgtgtggctgcccgacttcctacccgggctcaggatgtgctggatgcccacctctctgaggtcaatgctgttcgttttggccccaacagcagcctcctggccactggaggggctgaccgcctgatccacctctggaatgttgtgggaagtcgcctggaggccaaccagaccctggagggagctggtggcagcatcaccagtgtggactttgacccctcgggctaccaggttttagcagcaacttacaaccaggctgcccagctctggaaggtgggggaggcacagtccaaggtgaggcctgactggggaggctgcctggaggtcagaggtcatacctcaggactagggggcctgttatggggtcttggccaaactcttgatccgtacctggggccggggtacaggagacactgtctggacacaaggataaggtgacagctgccaaattcaagctaacgaggcaccaggcagtgactgggagccgcgaccggacagtgaaggagtgggacctcggccgtgcctattgtgagcccgagccccagccccacctctcctccccaccagccaggagccccaggccagggcacaagggacctcacctgctctctgggagtggctctgagattcataggcatttgggggtgaaacctctcaaggccctccaattccctaatggtatcccccagtggtgttttctgtctggtttcttggtgacctcaggctgtgggtaggaaaaagacgtgggtgagccctgtgctgggaagcggaagacctgggttctagtcttgggaggacacngggttctgggcctcagcttctccatatgtcctgtggggtggctcccgacaaccctcctctgaggccctggggtctgctgcttggtccccaggctccaggaccatcaatgtcctttcctactgtaatgacgtggtgtgtggggaccatatcatcattagtggccacaatgaccagaagatccggttctgggacagcagggggccccactgcacccaggtcatccctgtgcagggccgggtcacctccctgagcctcagccacgaccaactgcacctgctcagctgttcccgagacaacacactcaaggtcatcgacctgcgtgtcagcaacatccgccaggtgttcaggtaccagcctcatgcctgctgaccctgtggcctttgctgggacagctgagcctctcttctcctgtaatagaccctcttggagccctccctggaggcccctccagaccaggtcctgctgaggtaccaaacccctcgacaaagaggaagctctggaagctcactgcagagggcagagactagtgatgacctctgttctgaccccagccctgtctgtcctcagggccgatggcttcaagtgtggttctgactggaccaaagctgtgttcagcccggacagaagctatgcactggcaggctcctgtgatggggccctttacatctgggatgtggacaccgggaaactggagagcagactacagggaccccattgcgctgccgtcaacgccgtggcctggtgctactccgggagccacatggtgagcgtggaccagggcaggaaggttgtgctctggcagtagggccacgacctgcctgcctgggctggagctcttgcccgaagcctgaagcttccttcggcgccatgcaggggttggggttgggactggagctggccttgggatttaatggggaagaaggcctggcaggacctggcctgtttgtttaaaaatgaagtatgggttgggggattacgctagtttttctttgtatttttatctctatctatctcctcactttttctcccaaagtagaaaaaaatgatatctgaaaaaaaaaaaaaaaaaaaaaaaaaaaaaaaaaaacacaaaacaacaaaaaaaaaaaaacaaaaaaacaaaaaaaaaaaaaaacaacaagagggggggggcggcgcgacaaaaaaattcccccgcggggggcgccccatttcccccccccctttttttagaagaggggggcccccaaaggggggccttataaaaacagcgaacggagcggcggagcgcattaaacaaggagcgcggtggagagcaaaaaacccgtcgctgctgtagagctctttctgaggaggagacaaccccccaccgtcgggggggggcaactaagtggggaacagacacaccgccacaggataaaaacacgcactggcgaggaaacacaacattgtgggagagtcagatgtgcgaaacacacgggctaatatctcgccgacaaaaaatgttcgtgcatcggagtaattttgaaaaaattcaggc

SEQ ID NO: 39198 - DNA, 4297 bp, Homo sapiens
gggagagcgcggccatggcggggccgggcgtccccggtgcccccgcagcgcgctggaaacgccacatcgtgcggcagctgcggcttcgggaccgtacgcaaaaggcgcttttcctggagctggtgccggcctataaccatctcttagagaaggctgagctgctggacaagttctcaaagaagctgcagccggagccaaacagtgtcactcccaccacccaccagggcccctgggaggagtcagagcttgactcagaccaagtcccatcactggtcgcactgagggtgaagtggcaggaggaggaggaggggctccggctggtctgtggtgagatggcctaccaggtggtggagaagggcgcggccctgggcacgctggagtcggagctgcagcagaggcaaagcaggctggcagccctggaggcccgcgtggcgcagctgcgagaggcgcgggcgcagcaggcccagcaggtggaggagtggcgggcgcagaatgcggtgcagcgggcagcctacgaggcgctgcgcgcgcacgtcgggctccgggaggcggcactgcgcaggctccaggaagaggcgcgcgacctgctggagaggctcgtgcagcgcaaggcgcgcgccgcggccgagcgcaacctgcgcaacgagcgccgggagcgggccaagcaggcgcgggtgtcccaggagctgaagaaggctgccaagcggaccgtgagcatcagcgagggcccggacaccctaggcgatgggatgagggagagaagggagactctggctctggcccctgagccagagcccctggagaaggaagcttgtgagaagtggaagaggcccttcaggtgaggacccaggtgacagtctcagagctctgagctgagccccaccccagaggctgccagggtcttcctcttggaccttggagccagctcttgggttgggagggggcttgaggagaggccagaaagctcagatctcccagggctagtctgacctccattgtctggagccacttggggtcagttccatctcacccccccaacccctaccctcaaccctttccctccttcttgggatcagagctctgggggtggggagtcaggcttctgaatagctgtcaccaggagagaacctgtgggcaaagcccagagcccagtcatgccaggcatgtgtgcgcagccataggtgtgcaagcatgtgcatccgcagggacatgaggccacaggtgtgtacaagcttgactgagcccgtctgtatgtgtgaatatataagcatgtgtagatgtgtgctcacacttgtgggacctgattggggcttcagaccttgggtgcctgtccgcagggtctcctccatccttcttgatttgcctgtcattgaggctgcccgctctgggcgccattccccagcctaacacctcttctcagtctttccttgcaggtccctggtgtccaggccttggggcagtgaagaaaccgtggggaggggcatgagatgccagtccccaaagtccttgggagcccttgtgggccaagtcattgtaggacacaccctctcctgggcattgctgaggtcacccagtgagcctaggctcccccctcctcccatccccagcctgggggaaccttcagcgtctctcctccctgtaggccccggctcagcttcccaggaacttttgttggtgggtactagtagggtaaggcagttcttcccatcatgagggagaccttgggagactttcattaccaaatccattgctgccccgaccttcctgggactgatctgggtcaccctggtctcctgatcttggagaagtcaagttcttatcccagacttgagaggttacaagcctccaggtctctggcaaagtgtggagatgatggacagccatttgtacacacaccagccagtcccttagcatatctctcttggttttgtctcaggtctgcctcagccacctccctgacgctgtcccactgtgtggatgtggtgaaggggcttctggagtaagtgtgtgtgtgcctgtgtgtgcacccacgtgtgtgtcgggctccccagcccaggcttggtctgtgtctgtgcctcgacctgtccatccctgtgatgtgcagctgtctgcctgtgagtctgttgggccttggagacaggagccaggtgaatggcctcagccccggccccggttcagctgtcttccaggttctgtcctcacaagggtctgtcttcatccaaggtcgtcacaggggaccaagagctccagcctcaggcagggcaggagctcctactcaattgggaaaaatgctctgaaatgtcagggactcattcagagtcacagagccaagcagtggcaagactgggattgaaaccccggccctgaggtttctttgcacccaccaaccctaccctgctcctgtgtctgcctctgtgtgctccccaccccgtctccacaccaacccctggggtcgaggctgggttggggaatgctctcgctgctccttggggccatgttctgccgcctgccatgtctgcttcctatggttgatgcctcaggggagctggaggctcccacctgagaaggacttgctgaatgccctcctgaccccaacccaccttaccccagttttaagaagaggagaggtcactcaattgggggagcccctgagcagcgataccagatcatccctgtgtgtgtggctgcccgacttcctacccgggctcaggatgtgctggatgcccacctctctgaggtcaatgctgttcgttttggccccaacagcagcctcctggccactggaggggctgaccgcctgatccacctctggaatgttgtgggaagtcgcctggaggccaaccagaccctggagggagctggtggcagcatcaccagtgtggactttgacccctcgggctaccaggttttagcagcaacttacaaccaggctgcccagctctggaaggtgggggaggcacagtccaaggagacactgtctggacacaaggataaggtgacagctgccaaattcaagctaacgaggcaccaggcagtgactgggagccgcgaccggacagtgaaggagtgggacctcggccgtgcctattgctccaggaccatcaatgtcctttcctactgtaatgacgtggtgtgtggggaccatatcatcattagtggccacaatgaccagaagatccggttctgggacagcagggggccccactgcacccaggtcatccctgtgcagggccgggtcacctccctgagcctcagccacgaccaactgcacctgctcagctgttcccgagacaacacactcaaggtcatcgacctgcgtgtcagcaacatccgccaggtgttcagggccgatggcttcaagtgtggttctgactggaccaaagctgtgttcagcccggacagaagctatgcactggcaggctcctgtgatggggccctttacatctgggatgtggacaccgggaaactggagagcagactacagggaccccattgcgctgccgtcaacgccgtggcctggtgctactccgggagccacatggtgagcgtggaccagggcaggaaggttgtgctctggcagtagggccacgacctgcctgcctgggctggagctcttgcccgaagcctgaagcttccttcggcgccatgcaggggttggggttgggactggagctggccttgggatttaatggggaagaaggcctggcaggacctggcctgtttgtttaaaaatgaagtatgggttgggggattacgctagtttttctttgtatttttatctctatctatctcctcactttttctcccaaagtagaaaaaaatgatatctgaaaaaaaaaaaaaaaaaaaaaaaaaaaaaaaaaaacacaaaacaacaaaaaaaaaaaaacaaaaaaacaaaaaaaaaaaaaaacaacaagagggggggggcggcgcgacaaaaaaattcccccgcggggggcgccccatttcccccccccctttttttagaagaggggggcccccaaaggggggccttataaaaacagcgaacggagcggcggagcgcattaaacaaggagcgcggtggagagcaaaaaacccgtcgctgctgtagagctctttctgaggaggagacaaccccccaccgtcgggggggggcaactaagtggggaacagacacaccgccacaggataaaaacacgcactggcgaggaaacacaacattgtgggagagtcagatgtgcgaaacacacgggctaatatctcgccgacaaaaaatgttcgtgcatcggagtaattttgaaaaaattcaggc

SEQ ID NO: 39199 - DNA, 2260 bp, Homo sapiens
tctcatagctgctctagagtatccccagcatcattgaactcgacctgtccatccctgtgatgtgcagctgtctgcctgtgagtctgttgggccttggagacaggagccaggtgaatggcctcagccccggccccggttcagctgtcttccaggttctgtcctcacaagggtctgtcttcatccaaggtcgtcacaggggaccaagagctccagcctcaggcagggcaggagctcctactcaattgggaaaaatgctctgaaatgtcagggactcattcagagtcacagagccaagcagtggcaagactgggattgaaaccccggccctgaggtttctttgcacccaccaaccctaccctgctcctgtgtctgcctctgtgtgctccccaccccgtctccacaccaacccctggggtcgaggctgggttggggaatgctctcgctgctccttggggccatgttctgccgcctgccatgtctgcttcctatggttgatgcctcaggggagctggaggctcccacctgagaaggacttgctgaatgccctcctgaccccaacccaccttaccccagttttaagaagaggagaggtcactcaattgggggagcccctgagcagcgataccagatcatccctgtgtgtgtggctgcccgacttcctacccgggctcaggatgtgctggatgcccacctctctgaggtcaatgctgttcgttttggccccaacagcagcctcctggccactggaggggctgaccgcctgatccacctctggaatgttgtgggaagtcgcctggaggccaaccagaccctggagggagctggtggcagcatcaccagtgtggactttgacccctcgggctaccaggttttagcagcaacttacaaccaggctgcccagctctggaaggtgggggaggcacagtccaaggagacactgtctggacacaaggataaggtgacagctgccaaattcaagctaacgaggcaccaggcagtgactgggagccgcgaccggacagtgaaggagtgggacctcggccgtgcctattgctccaggaccatcaatgtcctttcctactgtaatgacgtggtgtgtggggaccatatcatcattagtggccacaatgaccagaagatccggttctgggacagcagggggccccactgcacccaggtcatccctgtgcagggccgggtcacctccctgagcctcagccacgaccaactgcacctgctcagctgttcccgagacaacacactcaaggtcatcgacctgcgtgtcagcaacatccgccaggtgttcagggccgatggcttcaagtgtggttctgactggaccaaagctgtgttcagcccggacagaagctatgcactggcaggctcctgtgatggggccctttacatctgggatgtggacaccgggaaactggagagcagactacagggaccccattgcgctgccgtcaacgccgtggcctggtgctactccgggagccacatggtgagcgtggaccagggcaggaaggttgtgctctggcagtagggccacgacctgcctgcctgggctggagctcttgcccgaagcctgaagcttccttcggcgccatgcaggggttggggttgggactggagctggccttgggatttaatggggaagaaggcctggcaggacctggcctgtttgtttaaaaatgaagtatgggttgggggattacgctagtttttctttgtatttttatctctatctatctcctcactttttctcccaaagtagaaaaaaatgatatctgaaaaaaaaaaaaaaaaaaaaaaaaaaaaaaaaaaacacaaaacaacaaaaaaaaaaaaacaaaaaaacaaaaaaaaaaaaaaacaacaagagggggggggcggcgcgacaaaaaaattcccccgcggggggcgccccatttcccccccccctttttttagaagaggggggcccccaaaggggggccttataaaaacagcgaacggagcggcggagcgcattaaacaaggagcgcggtggagagcaaaaaacccgtcgctgctgtagagctctttctgaggaggagacaaccccccaccgtcgggggggggcaactaagtggggaacagacacaccgccacaggataaaaacacgcactggcgaggaaacacaacattgtgggagagtcagatgtgcgaaacacacgggctaatatctcgccgacaaaaaatgttcgtgcatcggagtaattttgaaaaaattcaggc

SEQ ID NO: 39200 - DNA, 2089 bp, Homo sapiens
  misc_feature (23)..(25): n is a, c, g, or t
  misc_feature (30)..(30): n is a, c, g, or t
  misc_feature (37)..(37): n is a, c, g, or t
  misc_feature (40)..(41): n is a, c, g, or t
agcggaggataggccccgccccnnnagggnggagtcnggnntgccggtatctggaacggaggggggcagcagccgccccctggaggaagggaccgggtctagccccgcctgcgtgcgaggcgccgcgccagggtctcaggatgctttttacccaacaagggccaagcaggcgcgggtgtcccaggagctgaagaaggctgccaagcggaccgtgagcatcagcgagggcccggacaccctaggcgatgggatgagggagagaagggagactctggctctggcccctgagccagagcccctggagaaggaagcttgtgagaagtggaagaggcccttcaggtctgcctcagccacctccctgacgctgtcccactgtgtggatgtggtgaaggggcttctggattttaagaagaggagaggtcactcaattgggggagcccctgagcagcgataccagatcatccctgtgtgtgtggctgcccgacttcctacccgggctcaggatgtgctggatgcccacctctctgaggtcaatgctgttcgttttggccccaacagcagcctcctggccactggaggggctgaccgcctgatccacctctggaatgttgtgggaagtcgcctggaggccaaccagaccctggagggagctggtggcagcatcaccagtgtggactttgacccctcgggctaccaggttttagcagcaacttacaaccaggctgcccagctctggaaggtgggggaggcacagtccaaggagacactgtctggacacaaggataaggtgacagctgccaaattcaagctaacgaggcaccaggcagtgactgggagccgcgaccggacagtgaaggagtgggacctcggccgtgcctattgctccaggaccatcaatgtcctttcctactgtaatgacgtggtgtgtggggaccatatcatcattagtggccacaatgaccagaagatccggttctgggacagcagggggccccactgcacccaggtcatccctgtgcagggccgggtcacctccctgagcctcagccacgaccaactgcacctgctcagctgttcccgagacaacacactcaaggtcatcgacctgcgtgtcagcaacatccgccaggtgttcagggccgatggcttcaagtgtggttctgactggaccaaagctgtgttcagcccggacagaagctatgcactggcaggctcctgtgatggggccctttacatctgggatgtggacaccgggaaactggagagcagactacagggaccccattgcgctgccgtcaacgccgtggcctggtgctactccgggagccacatggtgagcgtggaccagggcaggaaggttgtgctctggcagtagggccacgacctgcctgcctgggctggagctcttgcccgaagcctgaagcttccttcggcgccatgcaggggttggggttgggactggagctggccttgggatttaatggggaagaaggcctggcaggacctggcctgtttgtttaaaaatgaagtatgggttgggggattacgctagtttttctttgtatttttatctctatctatctcctcactttttctcccaaagtagaaaaaaatgatatctgaaaaaaaaaaaaaaaaaaaaaaaaaaaaaaaaaaacacaaaacaacaaaaaaaaaaaaacaaaaaaacaaaaaaaaaaaaaaacaacaagagggggggggcggcgcgacaaaaaaattcccccgcggggggcgccccatttcccccccccctttttttagaagaggggggcccccaaaggggggccttataaaaacagcgaacggagcggcggagcgcattaaacaaggagcgcggtggagagcaaaaaacccgtcgctgctgtagagctctttctgaggaggagacaaccccccaccgtcgggggggggcaactaagtggggaacagacacaccgccacaggataaaaacacgcactggcgaggaaacacaacattgtgggagagtcagatgtgcgaaacacacgggctaatatctcgccgacaaaaaatgttcgtgcatcggagtaattttgaaaaaattcaggc

SEQ ID NO: 39201 - DNA, 3686 bp, Homo sapiens
gggagagcgcggccatggcggggccgggcgtccccggtgcccccgcagcgcgctggaaacgccacatcgtgcggcagctgcggcttcgggaccgtacgcaaaaggcgcttttcctggagctggtgccggcctataaccatctcttagagaaggctgagctgctggacaagttctcaaagaagctgcagccggagccaaacagtgtcactcccaccacccaccagggcccctgggaggagtcagagcttgactcagaccaagtcccatcactggtcgcactgagggtgaagtggcaggaggaggaggaggggctccggctggtctgtggtgagatggcctaccaggtggtggagaagggcgcggccctgggcacgctggagtcggagctgcagcagaggcaaagcaggctggcagccctggaggcccgcgtggcgcagctgcgagaggcgcgggcgcagcaggcccagcaggtggaggagtggcgggcgcagaatgcggtgcagcgggcagcctacgaggcgctgcgcgcgcacgtcgggctccgggaggcggcactgcgcaggctccaggaagaggcgcgcgacctgctggagaggctcgtgcagcgcaaggcgcgcgccgcggccgagcgcaacctgcgcaacgagcgccgggagcgggccaagcaggcgcgggtgtcccaggagctgaagaaggctgccaagcggaccgtgagcatcagcgagggcccggacaccctaggcgatgggatgagggagagaagggagactctggctctggcccctgagccagagcccctggagaaggaagcttgtgagaagtggaagaggcccttcaggtgaggacccaggtgacagtctcagagctctgagctgagccccaccccagaggctgccagggtcttcctcttggaccttggagccagctcttgggttgggagggggcttgaggagaggccagaaagctcagatctcccagggctagtctgacctccattgtctggagccacttggggtcagttccatctcacccccccaacccctaccctcaaccctttccctccttcttgggatcagagctctgggggtggggagtcaggcttctgaatagctgtcaccaggagagaacctgtgggcaaagcccagagcccagtcatgccaggcatgtgtgcgcagccataggtgtgcaagcatgtgcatccgcagggacatgaggccacaggtgtgtacaagcttgactgagcccgtctgtatgtgtgaatatataagcatgtgtagatgtgtgctcacacttgtgggacctgattggggcttcagaccttgggtgcctgtccgcagggtctcctccatccttcttgatttgcctgtcattgaggctgcccgctctgggcgccattccccagcctaacacctcttctcagtctttccttgcaggtccctggtgtccaggccttggggcagtgaagaaaccgtggggaggggcatgagatgccagtccccaaagtccttgggagcccttgtgggccaagtcattgtaggacacaccctctcctgggcattgctgaggtcacccagtgagcctaggctcccccctcctcccatccccagcctgggggaaccttcagcgtctctcctccctgtaggccccggctcagcttcccaggaacttttgttggtgggtactagtagggtaaggcagttcttcccatcatgagggagaccttgggagactttcattaccaaatccattgctgccccgaccttcctgggactgatctgggtcaccctggtctcctgatcttggagaagtcaagttcttatcccagacttgagaggttacaagcctccaggtctctggcaaagtgtggagatgatggacagccatttgtacacacaccagccagtcccttagcatatctctcttggttttgtctcaggtctgcctcagccacctccctgacgctgtcccactgtgtggatgtggtgaaggggcttctggattttaagaagaggagaggtcactcaattgggggagcccctgagcagcgataccagatcatccctgtgtgtgtggctgcccgacttcctacccgggctcaggatgtgctggatgcccacctctctgaggtcaatgctgttcgttttggccccaacagcagcctcctggccactggaggggctgaccgcctgatccacctctggaatgttgtgggaagtcgcctggaggccaaccagaccctggagggagctggtggcagcatcaccagtgtggactttgacccctcgggctaccaggttttagcagcaacttacaaccaggctgcccagctctggaaggtgggggaggcacagtccaaggagacactgtctggacacaaggataaggtgacagctgccaaattcaagctaacgaggcaccaggcagtgactgggagccgcgaccggacagtgaaggagtgggacctcggccgtgcctattgctccaggaccatcaatgtcctttcctactgtaatgacgtggtgtgtggggaccatatcatcattagtggccacaatgaccagaagatccggttctgggacagcagggggccccactgcacccaggtcatccctgtgcagggccgggtcacctccctgagcctcagccacgaccaactgcacctgctcagctgttcccgagacaacacactcaaggtcatcgacctgcgtgtcagcaacatccgccaggtgttcagggccgatggcttcaagtgtggttctgactggaccaaagctgtgttcagcccggacagaagctatgcactggcaggctcctgtgatggggccctttacatctgggatgtggacaccgggaaactggagagcagactacagggaccccattgcgctgccgtcaacgccgtggcctggtgctactccgggagccacatggtgagcgtggaccagggcaggaaggttgtgctctggcagtagggccacgacctgcctgcctgggctggagctcttgcccgaagcctgaagcttccttcggcgccatgcaggggttggggttgggactggagctggccttgggatttaatggggaagaaggcctggcaggacctggcctgtttgtttaaaaatgaagtatgggttgggggattacgctagtttttctttgtatttttatctctatctatctcctcactttttctcccaaagtagaaaaaaatgatatctgaaaaaaaaaaaaaaaaaaaaaaaaaaaaaaaaaaacacaaaacaacaaaaaaaaaaaaacaaaaaaacaaaaaaaaaaaaaaacaacaagagggggggggcggcgcgacaaaaaaattcccccgcggggggcgccccatttcccccccccctttttttagaagaggggggcccccaaaggggggccttataaaaacagcgaacggagcggcggagcgcattaaacaaggagcgcggtggagagcaaaaaacccgtcgctgctgtagagctctttctgaggaggagacaaccccccaccgtcgggggggggcaactaagtggggaacagacacaccgccacaggataaaaacacgcactggcgaggaaacacaacattgtgggagagtcagatgtgcgaaacacacgggctaatatctcgccgacaaaaaatgttcgtgcatcggagtaattttgaaaaaattcaggc

SEQ ID NO: 39202 - DNA, 2026 bp, Homo sapiens
tcgacccacgcgtcggcgcgacctgctggagaggctcgtgcagcgcaaggcgcgcgccgcggccgagcgcaacctgcgcaacgagcgccgggagcgggccaagcaggcgcgggtgtcccaggagctgaagaaggctgccaagcggaccgtgagcatcagcgagggcccggacaccctaggcgatgggatgagggagagaagggagactctggctctggcccctgagccagagcccctggagaaggaagcttgtgagaagtggaagaggcccttcaggtctgcctcagccacctccctgacgctgtcccactgtgtggatgtggtgaaggggcttctggattttaagaagaggagaggtcactcaattgggggagcccctgagcagcgataccagatcatccctgtgtgtgtggctgcccgacttcctacccgggctcaggatgtgctggatgcccacctctctgaggtcaatgctgttcgttttggccccaacagcagcctcctggccactggaggggctgaccgcctgatccacctctggaatgttgtgggaagtcgcctggaggccaaccagaccctggagggagctggtggcagcatcaccagtgtggactttgacccctcgggctaccaggttttagcagcaacttacaaccaggctgcccagctctggaaggtgggggaggcacagtccaaggagacactgtctggacacaaggataaggtgacagctgccaaattcaagctaacgaggcaccaggcagtgactgggagccgcgaccggacagtgaaggagtgggacctcggccgtgcctattgctccaggaccatcaatgtcctttcctactgtaatgacgtggtgtgtggggaccatatcatcattagtggccacaatgaccagaagatccggttctgggacagcagggggccccactgcacccaggtcatccctgtgcagggccgggtcacctccctgagcctcagccacgaccaactgcacctgctcagctgttcccgagacaacacactcaaggtcatcgacctgcgtgtcagcaacatccgccaggtgttcagggccgatggcttcaagtgtggttctgactggaccaaagctgtgttcagcccggacagaagctatgcactggcaggctcctgtgatggggccctttacatctgggatgtggacaccgggaaactggagagcagactacagggaccccattgcgctgccgtcaacgccgtggcctggtgctactccgggagccacatggtgagcgtggaccagggcaggaaggttgtgctctggcagtagggccacgacctgcctgcctgggctggagctcttgcccgaagcctgaagcttccttcggcgccatgcaggggttggggttgggactggagctggccttgggatttaatggggaagaaggcctggcaggacctggcctgtttgtttaaaaatgaagtatgggttgggggattacgctagtttttctttgtatttttatctctatctatctcctcactttttctcccaaagtagaaaaaaatgatatctgaaaaaaaaaaaaaaaaaaaaaaaaaaaaaaaaaaacacaaaacaacaaaaaaaaaaaaacaaaaaaacaaaaaaaaaaaaaaacaacaagagggggggggcggcgcgacaaaaaaattcccccgcggggggcgccccatttcccccccccctttttttagaagaggggggcccccaaaggggggccttataaaaacagcgaacggagcggcggagcgcattaaacaaggagcgcggtggagagcaaaaaacccgtcgctgctgtagagctctttctgaggaggagacaaccccccaccgtcgggggggggcaactaagtggggaacagacacaccgccacaggataaaaacacgcactggcgaggaaacacaacattgtgggagagtcagatgtgcgaaacacacgggctaatatctcgccgacaaaaaatgttcgtgcatcggagtaattttgaaaaaattcaggc

SEQ ID NO: 39203 - DNA, 1609 bp, Homo sapiens
gattcgtgctggtgctaagggattcgtgctggatgcccacctctctgaggtcaatgctgttcgttttggccccaacagcagcctcctggccactggaggggctgaccgcctgatccacctctggaatgttgtgggaagtcgcctggaggccaaccagaccctggagggagctggtggcagcatcaccagtgtggactttgacccctcgggctaccaggttttagcagcaacttacaaccaggctgcccagctctggaaggtgggggaggcacagtccaaggagacactgtctggacacaaggataaggtgacagctgccaaattcaagctaacgaggcaccaggcagtgactgggagccgcgaccggacagtgaaggagtgggacctcggccgtgcctattgctccaggaccatcaatgtcctttcctactgtaatgacgtggtgtgtggggaccatatcatcattagtggccacaatgaccagaagatccggttctgggacagcagggggccccactgcacccaggtcatccctgtgcagggccgggtcacctccctgagcctcagccacgaccaactgcacctgctcagctgttcccgagacaacacactcaaggtcatcgacctgcgtgtcagcaacatccgccaggtgttcagggccgatggcttcaagtgtggttctgactggaccaaagctgtgttcagcccggacagaagctatgcactggcaggctcctgtgatggggccctttacatctgggatgtggacaccgggaaactggagagcagactacagggaccccattgcgctgccgtcaacgccgtggcctggtgctactccgggagccacatggtgagcgtggaccagggcaggaaggttgtgctctggcagtagggccacgacctgcctgcctgggctggagctcttgcccgaagcctgaagcttccttcggcgccatgcaggggttggggttgggactggagctggccttgggatttaatggggaagaaggcctggcaggacctggcctgtttgtttaaaaatgaagtatgggttgggggattacgctagtttttctttgtatttttatctctatctatctcctcactttttctcccaaagtagaaaaaaatgatatctgaaaaaaaaaaaaaaaaaaaaaaaaaaaaaaaaaaacacaaaacaacaaaaaaaaaaaaacaaaaaaacaaaaaaaaaaaaaaacaacaagagggggggggcggcgcgacaaaaaaattcccccgcggggggcgccccatttcccccccccctttttttagaagaggggggcccccaaaggggggccttataaaaacagcgaacggagcggcggagcgcattaaacaaggagcgcggtggagagcaaaaaacccgtcgctgctgtagagctctttctgaggaggagacaaccccccaccgtcgggggggggcaactaagtggggaacagacacaccgccacaggataaaaacacgcactggcgaggaaacacaacattgtgggagagtcagatgtgcgaaacacacgggctaatatctcgccgacaaaaaatgttcgtgcatcggagtaattttgaaaaaattcaggc

SEQ ID NO: 39204 - DNA, 1264 bp, Homo sapiens
gggagagcgcggccatggcggggccgggcgtccccggtgcccccgcagcgcgctggaaacgccacatcgtgcggcagctgcggcttcgggaccgtacgcaaaaggcgcttttcctggagctggtgccggcctataaccatctcttagagaaggctgagctgctggacaagttctcaaagaagctgcagccggagccaaacagtgtcactcccaccacccaccagggcccctgggaggagtcagagcttgactcagaccaagtcccatcactggtcgcactgagggtgaagtggcaggaggaggaggaggggctccggctggtctgtggtgaggtaagttgggaaggggtctgaaaatggggtagagagatgtggtccaagggagccagccagtgacgggtactcttgtgtttgctgaattctccaagcccagtgctgcaagcattgagtgagccctagtgtgtgccaggccctgacctgaagctgagcaggggtcagagtgccctgggcagcccaggatgaagtgggctccaacagcagctggagggagttaggtgtgcaagggcctggcagcccatttcccttccacatggtttagcctgctctgctcactactccatggctcacccctcgcccagccatccccaaggcctagcaccagttgatgctcaatatacatttgcagactacagaagttaggttcatttagcgcattggcagagtgtggacgctccacctgacactaccgccttccctgcccctttgcaacagtgtctcttggcttctctttaaccatgctctcctggtttccctctcatttctgtgattgttgcctctgaacttccttcactggctccttcccctcctccctattcctgtcccttcaaatgtgggtgttcttggggttcactgacccccgttttttctgtttgccaactctcagttctgtctctagccgagccttcttttctgagcttgactctcttgctcaggctgctttttggagatcacatctaaaatcaggctcaccatctcccccagaatttgggccacaccgttttgagagttgactccttgcaggcatcgggctaaacattgtctcagttaatccttcacaactttatggttgtagaggaggaaactgaggcttggagaggtagagccaggatttgagcccttctcacacaaatcaacttctgtgctctccattcattctctcaacatctgttgacagttgctatatccaaagtacggggagtgcaaca

SEQ ID NO: 39205 - DNA, 1317 bp, Homo sapiens
gggagagcgcggccatggcggggccgggcgtccccggtgcccccgcagcgcgctggaaacgccacatcgtgcggcagctgcggcttcgggaccgtacgcaaaaggcgcttttcctggagctggtgccggcctataaccatctcttagagaaggctgagctgctggacaagttctcaaagaagctgcagccggagccaaacagtgtcactcccaccacccaccagggcccctgggaggagtcagagcttgactcagaccaagtcccatcactggtcgcactgagggtgaagtggcaggaggaggaggaggggctccggctggtctgtggtgaggtaagttgggaaggggtctgaaaatggggtagagagatgtggtccaagggagccagccagtgacgggtactcttgtgtttgctgaattctccaagcccagtgctgcaagcattgagtgagccctagtgtgtgccaggccctgacctgaagctgagcaggggtcagagtgccctgggcagcccaggatgaagtgggctccaacagcagctggagggagttaggtgtgcaagggcctggcagcccatttcccttccacatggtttagcctgctctgctcactactccatggctcacccctcgcccagccatccccaaggcctagcaccagttgatgctcaatatacatttgcagactacagaagttaggttcatttagcgcattggcagagtgtggacgctccacctgacactaccgccttccctgcccctttgcaacagtgtctcttggcttctctttaaccatgctctcctggtttccctctcatttctgtgattgttgcctctgaacttccttcactggctccttcccctcctccctattcctgtcccttcaaatgtgggtgttcttggggttcactgacccccgttttttctgtttctgtgttaaattactgagggtaatggcctccatgtgcaaccaagttgctgcaaagggacatgatatcaatcattttatggctccataagtattacgtggtgtatatagaccatattttctttatctatagaccatattttctttatccaatccactgctgatgggcacctaggttgattccatgtctttgctattgtaaatagagctataattaacatagtgcatgtgtctttttggtagaaagaattgtttttttttggaaaaaaacccagtaacaggattgctgggtcagatcaaagtttttttttaagttcctttttttttttttttttttgagatggagtctccctctgttgcccaggctggaatgcggtggcgcgatcacgg

SEQ ID NO: 39206 - DNA, 535 bp, Homo sapiens
gggagagcgcggccatggcggggccgggcgtccccggtgcccccgcagcgcgctggaaacgccacatcgtgcggcagctgcggcttcgggaccgtacgcaaaaggcgcttttcctggagctggtgccggcctataaccatctcttagagaaggctgagctgctggacaagttctcaaagaagctgcagccggagccaaacagtgtcactcccaccacccaccagggcccctgggaggagtcagagcttgactcagaccaagtcccatcactggtcgcactgagggtgaagtggcaggaggaggaggaggggctccggctggtctgtggtgagattcacaggaagttggaaggatagtccagagttcctgcatccccttcccccagcatctcctgctggctacatcttacataactatagtacccacaaccaggaaactgggattggtatgaagtgtgtatatgtcctttgtcattttatcacgtgtagatttgtgtaaccatcaagatatggcactgtttcaccactgcaaagat

SEQ ID NO: 39207 - DNA, 339 bp, Homo sapiens
ttgctgcgtgctctacatagtcccttctccctggtcctctctagcctggtctgtgaaatgactagctgtccctgggacccagtgccagcagttaggggaggtgtagtctccagcccaggcccgcagaacagacccagcgattctgtcttctaacctggggatgtgtcggggggtggggcgggaactgatcttccgctctcaatcccaattcctccattttgtgaggttaagacctcatttcaactgtcccttcccctggtcctcccaggtcgcctggaggccaaccagaccctggagggagctggtggcagcatcaccagtgtggactttgacccctcg

SEQ ID NO: 39208 - DNA, 316 bp, Homo sapiens
ccttgggccggaggctcctttgcctgccttggtgacctgggccgtgggaaactgtgaggcagcccctagcctcattctgtggcccgaagaatgttgcctccggcttagcacctctcacttcctctcccatttctccagggctaccaggttttagcagcaacttacaaccaggctgcccagctctggaaggtgggggaggcacagtccaaggtgaggcctgactggggaggctgcctggaggtcagaggtcatacctcaggactagggggcctgttatggggtcttggccaaactcttgatccgtacctggggccgg

SEQ ID NO: 39209 - DNA, 4417 bp, Homo sapiens
gggagagcgcggccatggcggggccgggcgtccccggtgcccccgcagcgcgctggaaacgccacatcgtgcggcagctgcggcttcgggaccgtacgcaaaaggcgcttttcctggagctggtgccggcctataaccatctcttagagaaggctgagctgctggacaagttctcaaagaagctgcagccggagccaaacagtgtcactcccaccacccaccagggcccctgggaggagtcagagcttgactcagaccaagtcccatcactggtcgcactgagggtgaagtggcaggaggaggaggaggggctccggctggtctgtggtgagcttgcttttcaggaagggggcgggcaggtgagcagccgactcccttagcgccttcggccccggagggactggaggcctggaggggcctcagcgccgccgtgcccacctgtccgcccccagatggcctaccaggtggtggagaagggcgcggccctgggcacgctggagtcggagctgcagcagaggcaaagcaggctggcagccctggaggcccgcgtggcgcagctgcgagaggcgcgggcgcagcaggcccagcaggtggaggagtggcgggcgcagaatgcggtgcagcgggcagcctacgaggcgctgcgcgcgcacgtcgggctccgggaggcggcactgcgcaggctccaggaagaggcgcgcgacctgctggagaggctcgtgcagcgcaaggcgcgcgccgcggccgagcgcaacctgcgcaacgagcgccgggagcgggccaagcaggcgcgggtgtcccaggagctgaagaaggctgccaagcggaccgtgagcatcagcgagggcccggacaccctaggcgatgggatgagggagagaagggagactctggctctggcccctgagccagagcccctggagaaggaagcttgtgagaagtggaagaggcccttcaggtgaggacccaggtgacagtctcagagctctgagctgagccccaccccagaggctgccagggtcttcctcttggaccttggagccagctcttgggttgggagggggcttgaggagaggccagaaagctcagatctcccagggctagtctgacctccattgtctggagccacttggggtcagttccatctcacccccccaacccctaccctcaaccctttccctccttcttgggatcagagctctgggggtggggagtcaggcttctgaatagctgtcaccaggagagaacctgtgggcaaagcccagagcccagtcatgccaggcatgtgtgcgcagccataggtgtgcaagcatgtgcatccgcagggacatgaggccacaggtgtgtacaagcttgactgagcccgtctgtatgtgtgaatatataagcatgtgtagatgtgtgctcacacttgtgggacctgattggggcttcagaccttgggtgcctgtccgcagggtctcctccatccttcttgatttgcctgtcattgaggctgcccgctctgggcgccattccccagcctaacacctcttctcagtctttccttgcaggtccctggtgtccaggccttggggcagtgaagaaaccgtggggaggggcatgagatgccagtccccaaagtccttgggagcccttgtgggccaagtcattgtaggacacaccctctcctgggcattgctgaggtcacccagtgagcctaggctcccccctcctcccatccccagcctgggggaaccttcagcgtctctcctccctgtaggccccggctcagcttcccaggaacttttgttggtgggtactagtagggtaaggcagttcttcccatcatgagggagaccttgggagactttcattaccaaatccattgctgccccgaccttcctgggactgatctgggtcaccctggtctcctgatcttggagaagtcaagttcttatcccagacttgagaggttacaagcctccaggtctctggcaaagtgtggagatgatggacagccatttgtacacacaccagccagtcccttagcatatctctcttggttttgtctcaggtctgcctcagccacctccctgacgctgtcccactgtgtggatgtggtgaaggggcttctggagtaagtgtgtgtgtgcctgtgtgtgcacccacgtgtgtgtcgggctccccagcccaggcttggtctgtgtctgtgcctcgacctgtccatccctgtgatgtgcagctgtctgcctgtgagtctgttgggccttggagacaggagccaggtgaatggcctcagccccggccccggttcagctgtcttccaggttctgtcctcacaagggtctgtcttcatccaaggtcgtcacaggggaccaagagctccagcctcaggcagggcaggagctcctactcaattgggaaaaatgctctgaaatgtcagggactcattcagagtcacagagccaagcagtggcaagactgggattgaaaccccggccctgaggtttctttgcacccaccaaccctaccctgctcctgtgtctgcctctgtgtgctccccaccccgtctccacaccaacccctggggtcgaggctgggttggggaatgctctcgctgctccttggggccatgttctgccgcctgccatgtctgcttcctatggttgatgcctcaggggagctggaggctcccacctgagaaggacttgctgaatgccctcctgaccccaacccaccttaccccagttttaagaagaggagaggtcactcaattgggggagcccctgagcagcgataccagatcatccctgtgtgtgtggctgcccgacttcctacccgggctcaggatgtgctggatgcccacctctctgaggtcaatgctgttcgttttggccccaacagcagcctcctggccactggaggggctgaccgcctgatccacctctggaatgttgtgggaagtcgcctggaggccaaccagaccctggagggagctggtggcagcatcaccagtgtggactttgacccctcgggctaccaggttttagcagcaacttacaaccaggctgcccagctctggaaggtgggggaggcacagtccaaggagacactgtctggacacaaggataaggtgacagctgccaaattcaagctaacgaggcaccaggcagtgactgggagccgcgaccggacagtgaaggagtgggacctcggccgtgcctattgctccaggaccatcaatgtcctttcctactgtaatgacgtggtgtgtggggaccatatcatcattagtggccacaatgaccagaagatccggttctgggacagcagggggccccactgcacccaggtcatccctgtgcagggccgggtcacctccctgagcctcagccacgaccaactgcacctgctcagctgttcccgagacaacacactcaaggtcatcgacctgcgtgtcagcaacatccgccaggtgttcagggccgatggcttcaagtgtggttctgactggaccaaagctgtgttcagcccggacagaagctatgcactggcaggctcctgtgatggggccctttacatctgggatgtggacaccgggaaactggagagcagactacagggaccccattgcgctgccgtcaacgccgtggcctggtgctactccgggagccacatggtgagcgtggaccagggcaggaaggttgtgctctggcagtagggccacgacctgcctgcctgggctggagctcttgcccgaagcctgaagcttccttcggcgccatgcaggggttggggttgggactggagctggccttgggatttaatggggaagaaggcctggcaggacctggcctgtttgtttaaaaatgaagtatgggttgggggattacgctagtttttctttgtatttttatctctatctatctcctcactttttctcccaaagtagaaaaaaatgatatctgaaaaaaaaaaaaaaaaaaaaaaaaaaaaaaaaaaacacaaaacaacaaaaaaaaaaaaacaaaaaaacaaaaaaaaaaaaaaacaacaagagggggggggcggcgcgacaaaaaaattcccccgcggggggcgccccatttcccccccccctttttttagaagaggggggcccccaaaggggggccttataaaaacagcgaacggagcggcggagcgcattaaacaaggagcgcggtggagagcaaaaaacccgtcgctgctgtagagctctttctgaggaggagacaaccccccaccgtcgggggggggcaactaagtggggaacagacacaccgccacaggataaaaacacgcactggcgaggaaacacaacattgtgggagagtcagatgtgcgaaacacacgggctaatatctcgccgacaaaaaatgttcgtgcatcggagtaattttgaaaaaattcaggc

SEQ ID NO: 39210 - DNA, 3478 bp, Homo sapiens
gggagagcgcggccatggcggggccgggcgtccccggtgcccccgcagcgcgctggaaacgccacatcgtgcggcagctgcggcttcgggaccgtacgcaaaaggcgcttttcctggagctggtgccggcctataaccatctcttagagaaggctgagctgctggacaagttctcaaagaagctgcagccggagccaaacagtgtcactcccaccacccaccagggcccctgggaggagtcagagcttgactcagaccaagtcccatcactggtcgcactgagggtgaagtggcaggaggaggaggaggggctccggctggtctgtggtgagatggcctaccaggtggtggagaagggcgcggccctgggcacgctggagtcggagctgcagcagaggcaaagcaggctggcagccctggaggcccgcgtggcgcagctgcgagaggcgcgggcgcagcaggcccagcaggtggaggagtggcgggcgcagaatgcggtgcagcgggcagcctacgaggcgctgcgcgcgcacgtcgggctccgggaggcggcactgcgcaggctccaggaagaggcgcgcgacctgctggagaggctcgtgcagcgcaaggcgcgcgccgcggccgagcgcaacctgcgcaacgagcgccgggagcgggccaagcaggcgcgggtgtcccaggagctgaagaaggctgccaagcggaccgtgagcatcagcgagggcccggacaccctaggcgatgggatgagggagagaagggagactctggctctggcccctgagccagagcccctggagaaggaagcttgtgagaagtggaagaggcccttcaggtgaggacccaggtgacagtctcagagctctgagctgagccccaccccagaggctgccagggtcttcctcttggaccttggagccagctcttgggttgggagggggcttgaggagaggccagaaagctcagatctcccagggctagtctgacctccattgtctggagccacttggggtcagttccatctcacccccccaacccctaccctcaaccctttccctccttcttgggatcagagctctgggggtggggagtcaggcttctgaatagctgtcaccaggagagaacctgtgggcaaagcccagagcccagtcatgccaggcatgtgtgcgcagccataggtgtgcaagcatgtgcatccgcagggacatgaggccacaggtgtgtacaagcttgactgagcccgtctgtatgtgtgaatatataagcatgtgtagatgtgtgctcacacttgtgggacctgattggggcttcagaccttgggtgcctgtccgcagggtctcctccatccttcttgatttgcctgtcattgaggctgcccgctctgggcgccattccccagcctaacacctcttctcagtctttccttgcaggtccctggtgtccaggccttggggcagtgaagaaaccgtggggaggggcatgagatgccagtccccaaagtccttgggagcccttgtgggccaagtcattgtaggacacaccctctcctgggcattgctgaggtcacccagtgagcctaggctcccccctcctcccatccccagcctgggggaaccttcagcgtctctcctccctgtaggccccggctcagcttcccaggaacttttgttggtgggtactagtagggtaaggcagttcttcccatcatgagggagaccttgggagactttcattaccaaatccattgctgccccgaccttcctgggactgatctgggtcaccctggtctcctgatcttggagaagtcaagttcttatcccagacttgagaggttacaagcctccaggtctctggcaaagtgtggagatgatggacagccatttgtacacacaccagccagtcccttagcatatctctcttggttttgtctcaggtctgcctcagccacctccctgacgctgtcccactgtgtggatgtggtgaaggggcttctggagtaagtgtgtgtgtgcctgtgtgtgcacccacgtgtgtgtcgggctccccagcccaggcttggtctgtgtctgtgcctcgacctgtccatccctgtgatgtgcagctgtctgcctgtgagtctgttgggccttggagacaggagccaggtgaatggcctcagccccggccccggttcagctgtcttccaggttctgtcctcacaagggtctgtcttcatccaaggtcgtcacaggggaccaagagctccagcctcaggcagggcaggagctcctactcaattgggaaaaatgctctgaaatgtcagggactcattcagagtcacagagccaagcagtggcaagactgggattgaaaccccggccctgaggtttctttgcacccaccaaccctaccctgctcctgtgtctgcctctgtgtgctccccaccccgtctccacaccaacccctggggtcgaggctgggttggggaatgctctcgctgctccttggggccatgttctgccgcctgccatgtctgcttcctatggttgatgcctcaggggagctggaggctcccacctgagaaggacttgctgaatgccctcctgaccccaacccaccttaccccagttttaagaagaggagaggtcactcaattgggggagcccctgagcagcgataccagatcatccctgtgtgtgtggctgcccgacttcctacccgggctcaggatgtgctggatgcccacctctctgaggtcaatgctgttcgttttggccccaacagcagcctcctggccactggaggggctgaccgcctgatccacctctggaatgttgtgggaagtcgcctggaggccaaccagaccctggagggagctggtggcagcatcaccagtgtggactttgacccctcgggctaccaggttttagcagcaacttacaaccaggctgcccagctctggaaggtgggggaggcacagtccaaggagacactgtctggacacaaggataaggtgacagctgccaaattcaagctaacgaggcaccaggcagtgactgggagccgcgaccggacagtgaaggagtgggacctcggccgtgcctattgctccaggaccatcaatgtcctttcctactgtaatgacgtggtgtgtggggaccatatcatcattagtggccacaatgaccagaagatccggttctgggacagcaggtgacaggcgcaggctgggggaggacttggggagggctggggacagggctcccaagttcttgttcctttctctggccatggcaggaggagtcttggtggcactttgggcaggcaaggctgtggggctggcactgccagctagtgcctctcggctgggctcagctcccgcaggaagctgtgccactgtcttcatggctcttggtccaatgctggactccgcctggaccttgcaaccaagatggagatgtacctttttccatttagttaccacttttatatcaaa

SEQ ID NO: 39211 - DNA, 3639 bp, Homo sapiens
gggagagcgcggccatggcggggccgggcgtccccggtgcccccgcagcgcgctggaaacgccacatcgtgcggcagctgcggcttcgggaccgtacgcaaaaggcgcttttcctggagctggtgccggcctataaccatctcttagagaaggctgagctgctggacaagttctcaaagaagctgcagccggagccaaacagtgtcactcccaccacccaccagggcccctgggaggagtcagagcttgactcagaccaagtcccatcactggtcgcactgagggtgaagtggcaggaggaggaggaggggctccggctggtctgtggtgagatggcctaccaggtggtggagaagggcgcggccctgggcacgctggagtcggagctgcagcagaggcaaagcaggctggcagccctggaggcccgcgtggcgcagctgcgagaggcgcgggcgcagcaggcccagcaggtggaggagtggcgggcgcagaatgcggtgcagcgggcagcctacgaggcgctgcgcgcgcacgtcgggctccgggaggcggcactgcgcaggctccaggaagaggcgcgcgacctgctggagaggctcgtgcagcgcaaggcgcgcgccgcggccgagcgcaacctgcgcaacgagcgccgggagcgggccaagcaggcgcgggtgtcccaggagctgaagaaggctgccaagcggaccgtgagcatcagcgagggcccggacaccctaggcgatgggatgagggagagaagggagactctggctctggcccctgagccagagcccctggagaaggaagcttgtgagaagtggaagaggcccttcaggtgaggacccaggtgacagtctcagagctctgagctgagccccaccccagaggctgccagggtcttcctcttggaccttggagccagctcttgggttgggagggggcttgaggagaggccagaaagctcagatctcccagggctagtctgacctccattgtctggagccacttggggtcagttccatctcacccccccaacccctaccctcaaccctttccctccttcttgggatcagagctctgggggtggggagtcaggcttctgaatagctgtcaccaggagagaacctgtgggcaaagcccagagcccagtcatgccaggcatgtgtgcgcagccataggtgtgcaagcatgtgcatccgcagggacatgaggccacaggtgtgtacaagcttgactgagcccgtctgtatgtgtgaatatataagcatgtgtagatgtgtgctcacacttgtgggacctgattggggcttcagaccttgggtgcctgtccgcagggtctcctccatccttcttgatttgcctgtcattgaggctgcccgctctgggcgccattccccagcctaacacctcttctcagtctttccttgcaggtccctggtgtccaggccttggggcagtgaagaaaccgtggggaggggcatgagatgccagtccccaaagtccttgggagcccttgtgggccaagtcattgtaggacacaccctctcctgggcattgctgaggtcacccagtgagcctaggctcccccctcctcccatccccagcctgggggaaccttcagcgtctctcctccctgtaggccccggctcagcttcccaggaacttttgttggtgggtactagtagggtaaggcagttcttcccatcatgagggagaccttgggagactttcattaccaaatccattgctgccccgaccttcctgggactgatctgggtcaccctggtctcctgatcttggagaagtcaagttcttatcccagacttgagaggttacaagcctccaggtctctggcaaagtgtggagatgatggacagccatttgtacacacaccagccagtcccttagcatatctctcttggttttgtctcaggtctgcctcagccacctccctgacgctgtcccactgtgtggatgtggtgaaggggcttctggattttaagaagaggagaggtcactcaattgggggagcccctgagcagcgataccagatcatccctgtgtgtgtggctgcccgacttcctacccgggctcaggatgtgctgcagcctcctggccactggaggggctgaccgcctgatccacctctggaatgttgtgggaagtcgcctggaggccaaccagaccctggagggagctggtggcagcatcaccagtgtggactttgacccctcgggctaccaggttttagcagcaacttacaaccaggctgcccagctctggaaggtgggggaggcacagtccaaggagacactgtctggacacaaggataaggtgacagctgccaaattcaagctaacgaggcaccaggcagtgactgggagccgcgaccggacagtgaaggagtgggacctcggccgtgcctattgctccaggaccatcaatgtcctttcctactgtaatgacgtggtgtgtggggaccatatcatcattagtggccacaatgaccagaagatccggttctgggacagcagggggccccactgcacccaggtcatccctgtgcagggccgggtcacctccctgagcctcagccacgaccaactgcacctgctcagctgttcccgagacaacacactcaaggtcatcgacctgcgtgtcagcaacatccgccaggtgttcagggccgatggcttcaagtgtggttctgactggaccaaagctgtgttcagcccggacagaagctatgcactggcaggctcctgtgatggggccctttacatctgggatgtggacaccgggaaactggagagcagactacagggaccccattgcgctgccgtcaacgccgtggcctggtgctactccgggagccacatggtgagcgtggaccagggcaggaaggttgtgctctggcagtagggccacgacctgcctgcctgggctggagctcttgcccgaagcctgaagcttccttcggcgccatgcaggggttggggttgggactggagctggccttgggatttaatggggaagaaggcctggcaggacctggcctgtttgtttaaaaatgaagtatgggttgggggattacgctagtttttctttgtatttttatctctatctatctcctcactttttctcccaaagtagaaaaaaatgatatctgaaaaaaaaaaaaaaaaaaaaaaaaaaaaaaaaaaacacaaaacaacaaaaaaaaaaaaacaaaaaaacaaaaaaaaaaaaaaacaacaagagggggggggcggcgcgacaaaaaaattcccccgcggggggcgccccatttcccccccccctttttttagaagaggggggcccccaaaggggggccttataaaaacagcgaacggagcggcggagcgcattaaacaaggagcgcggtggagagcaaaaaacccgtcgctgctgtagagctctttctgaggaggagacaaccccccaccgtcgggggggggcaactaagtggggaacagacacaccgccacaggataaaaacacgcactggcgaggaaacacaacattgtgggagagtcagatgtgcgaaacacacgggctaatatctcgccgacaaaaaatgttcgtgcatcggagtaattttgaaaaaattcaggc

SEQ ID NO: 39212 - DNA, 2026 bp, Homo sapiens
  misc_feature (23)..(25): n is a, c, g, or t
  misc_feature (30)..(30): n is a, c, g, or t
  misc_feature (37)..(37): n is a, c, g, or t
  misc_feature (40)..(41): n is a, c, g, or t
agcggaggataggccccgccccnnnagggnggagtcnggnntgccggtatctggaacggaggggggcagcagccgccccctggaggaagggaccgggtctagccccgcctgcgtgcgaggcgccgcgccagggtctcaggatgctttttacccaacaagggccaagcaggcgcgggtgtcccaggagctgaagaaggctgccaagcggaccgtgagcatcagcgagggcccggacaccctaggcgatgggatgagggagagaagggagactctggctctggcccctgagccagagcccctggagaaggaagcttgtgagaagtggaagaggcccttcagttttaagaagaggagaggtcactcaattgggggagcccctgagcagcgataccagatcatccctgtgtgtgtggctgcccgacttcctacccgggctcaggatgtgctggatgcccacctctctgaggtcaatgctgttcgttttggccccaacagcagcctcctggccactggaggggctgaccgcctgatccacctctggaatgttgtgggaagtcgcctggaggccaaccagaccctggagggagctggtggcagcatcaccagtgtggactttgacccctcgggctaccaggttttagcagcaacttacaaccaggctgcccagctctggaaggtgggggaggcacagtccaaggagacactgtctggacacaaggataaggtgacagctgccaaattcaagctaacgaggcaccaggcagtgactgggagccgcgaccggacagtgaaggagtgggacctcggccgtgcctattgctccaggaccatcaatgtcctttcctactgtaatgacgtggtgtgtggggaccatatcatcattagtggccacaatgaccagaagatccggttctgggacagcagggggccccactgcacccaggtcatccctgtgcagggccgggtcacctccctgagcctcagccacgaccaactgcacctgctcagctgttcccgagacaacacactcaaggtcatcgacctgcgtgtcagcaacatccgccaggtgttcagggccgatggcttcaagtgtggttctgactggaccaaagctgtgttcagcccggacagaagctatgcactggcaggctcctgtgatggggccctttacatctgggatgtggacaccgggaaactggagagcagactacagggaccccattgcgctgccgtcaacgccgtggcctggtgctactccgggagccacatggtgagcgtggaccagggcaggaaggttgtgctctggcagtagggccacgacctgcctgcctgggctggagctcttgcccgaagcctgaagcttccttcggcgccatgcaggggttggggttgggactggagctggccttgggatttaatggggaagaaggcctggcaggacctggcctgtttgtttaaaaatgaagtatgggttgggggattacgctagtttttctttgtatttttatctctatctatctcctcactttttctcccaaagtagaaaaaaatgatatctgaaaaaaaaaaaaaaaaaaaaaaaaaaaaaaaaaaacacaaaacaacaaaaaaaaaaaaacaaaaaaacaaaaaaaaaaaaaaacaacaagagggggggggcggcgcgacaaaaaaattcccccgcggggggcgccccatttcccccccccctttttttagaagaggggggcccccaaaggggggccttataaaaacagcgaacggagcggcggagcgcattaaacaaggagcgcggtggagagcaaaaaacccgtcgctgctgtagagctctttctgaggaggagacaaccccccaccgtcgggggggggcaactaagtggggaacagacacaccgccacaggataaaaacacgcactggcgaggaaacacaacattgtgggagagtcagatgtgcgaaacacacgggctaatatctcgccgacaaaaaatgttcgtgcatcggagtaattttgaaaaaattcaggc

SEQ ID NO: 39213 - DNA, 1940 bp, Homo sapiens
gggagagcgcggccatggcggggccgggcgtccccggtgcccccgcagcgcgctggaaacgccacatcgtgcggcagctgcggcttcgggaccgtacgcaaaaggcgcttttcctggagctggtgccggcctataaccatctcttagagaaggctgagctgctggacaagttctcaaagaagctgcagccggagccaaacagtgtcactcccaccacccaccagggcccctgggaggagtcagagcttgactcagaccaagtcccatcactggtcgcactgagggtgaagtggcaggaggaggaggaggggctccggctggtctgtggtgagatggcctaccaggtggtggagaagggcgcggccctgggcacgctggagtcggagctgcagcagaggcaaagcaggctggcagccctggaggcccgcgtggcgcagctgcgagaggcgcgggcgcagcaggcccagcaggtggaggagtggcgggcgcagaatgcggtgcagcgggcagcctacgaggcgctgcgcgcgcacgtcgggctccgggaggcggcactgcgcaggctccaggaagaggcgcgcgacctgctggagaggctcgtgcagcgcaaggcgcgcgccgcggccgagcgcaacctgcgcaacgagcgccgggagcgggccaagcaggcgcgggtgtcccaggagctgaagaaggctgccaagcggaccgtgagcatcagcgagggcccggacaccctaggcgatgggatgagggagagaagggagactctggctctggcccctgagccagagcccctggagaaggaagcttgtgagaagtggaagaggcccttcagggggccccactgcacccaggtcatccctgtgcagggccgggtcacctccctgagcctcagccacgaccaactgcacctgctcagctgttcccgagacaacacactcaaggtcatcgacctgcgtgtcagcaacatccgccaggtgttcagggccgatggcttcaagtgtggttctgactggaccaaagctgtgttcagcccggacagaagctatgcactggcaggctcctgtgatggggccctttacatctgggatgtggacaccgggaaactggagagcagactacagggaccccattgcgctgccgtcaacgccgtggcctggtgctactccgggagccacatggtgagcgtggaccagggcaggaaggttgtgctctggcagtagggccacgacctgcctgcctgggctggagctcttgcccgaagcctgaagcttccttcggcgccatgcaggggttggggttgggactggagctggccttgggatttaatggggaagaaggcctggcaggacctggcctgtttgtttaaaaatgaagtatgggttgggggattacgctagtttttctttgtatttttatctctatctatctcctcactttttctcccaaagtagaaaaaaatgatatctgaaaaaaaaaaaaaaaaaaaaaaaaaaaaaaaaaaacacaaaacaacaaaaaaaaaaaaacaaaaaaacaaaaaaaaaaaaaaacaacaagagggggggggcggcgcgacaaaaaaattcccccgcggggggcgccccatttcccccccccctttttttagaagaggggggcccccaaaggggggccttataaaaacagcgaacggagcggcggagcgcattaaacaaggagcgcggtggagagcaaaaaacccgtcgctgctgtagagctctttctgaggaggagacaaccccccaccgtcgggggggggcaactaagtggggaacagacacaccgccacaggataaaaacacgcactggcgaggaaacacaacattgtgggagagtcagatgtgcgaaacacacgggctaatatctcgccgacaaaaaatgttcgtgcatcggagtaattttgaaaaaattcaggc

SEQ ID NO: 39214 - DNA, 894 bp, Homo sapiens
ctcaaactacccaggtccagcagtcggggcagagccaggttgcaggcgcagttcctgaagcccccctgaagcctgcccctccctttccccagcgctgccgtcaacgccgtggcctggtgctactccgggagccacatggtgagcgtggaccagggcaggaaggttgtgctctggcagtagggccacgacctgcctgcctgggctggagctcttgcccgaagcctgaagcttccttcggcgccatgcaggggttggggttgggactggagctggccttgggatttaatggggaagaaggcctggcaggacctggcctgtttgtttaaaaatgaagtatgggttgggggattacgctagtttttctttgtatttttatctctatctatctcctcactttttctcccaaagtagaaaaaaatgatatctgaaaaaaaaaaaaaaaaaaaaaaaaaaaaaaaaaaacacaaaacaacaaaaaaaaaaaaacaaaaaaacaaaaaaaaaaaaaaacaacaagagggggggggcggcgcgacaaaaaaattcccccgcggggggcgccccatttcccccccccctttttttagaagaggggggcccccaaaggggggccttataaaaacagcgaacggagcggcggagcgcattaaacaaggagcgcggtggagagcaaaaaacccgtcgctgctgtagagctctttctgaggaggagacaaccccccaccgtcgggggggggcaactaagtggggaacagacacaccgccacaggataaaaacacgcactggcgaggaaacacaacattgtgggagagtcagatgtgcgaaacacacgggctaatatctcgccgacaaaaaatgttcgtgcatcggagtaattttgaaaaaattcaggc

SEQ ID NO: 39215 - DNA, 419 bp, Homo sapiens
atcttgttgcagtaaaaagtaacctgaagtagatgattatctgtctagaccagagaataaaacattttagctttgcatctcaaagtgtcttggtggtctcctaggaaatttggtacttcttaatagagttactttaccttaaaaagaaaatttaaaatcttaagtcagttatcaatattgcatcttcaacatttttgtttcacactctcagtcttttattctgtgtgtgtgcttgatcataactcaggttttcctctggatctcttacgctgtgaaagccttcttggtttggaccctgcaacttgcagcagagttctaaacaaaaattacacgctgcttgtttccatggctcccctcaccaatgaaatccggcctgtcagcagctgcacccctcaggtaaagacctacttggaagatcc

SEQ ID NO: 39216 - DNA, 1568 bp, Homo sapiens
tgaaatttttaagttctaggttctttgctactaaagagtgttggcaaaaggtagttttttgtcatgtgctttgccatccacaaagaactgttagaataagacccgtttaggatttttgaaagactactagtctgtcttggaataaagagaataagtagatatctgcctagatggaagacttttctctgtttctccttttttatcattcacacaactgtctaatacttcataaagtctaaggaaaaaaataattgtttacctggagatgcagatagtgacaacaggatcttaaaatttacaaaatctcaaaaactgcttagtagatcctttgccttgggggattattgtgtgaattataaaaaagaggtttctttatatttgaatatagagcatttttctcttttataagttcacatatttatgagaacttgagttaagatataaataatttaggcatgtgatttcaagtacattgttagctttagtttcagtaagaatgacaactttatatatttcttttttggaatcaattatgatgtattaaagtataaaagtagttctaagagttgtttaataaagtatgtttaagctgttggcgttgtgttattagaaactgttcattaatgtgatgtccgttctgtttgtagagttcactcgtgtcaatatgggtgttcataaagcattgcagatactaaggaacagagtggacttacagcatctctgtggatatgtcaccatgttgaatgcttccagccaacttgcagatagaaaactcagtgatgcttctgatgagagaggttagccaatagttggattctttggattaagataattggttttgagtttgacacagtgttaatatatgaaaagcagcagacctttgtggggatgctgaattattgaatactcaatattctttcactgaagcacgaggaaatattttggaacatcatttggacaaatgtcagttgttcaaatgaagaaaataggattggggtacagaatggtttgggacttttgggtgctctactgtcatatctgtgtttattaggctttattaggttagctttatagggtgatggtttcaaaactcaagtctctttatacaagtgtttccaaaattgacttaatagtttttccctttcaactttttctgtcaaaaggtaccattgtcttaattatctaggtctaaaatcttacctttgtctcattctttcctttttccactatgttcagttagtttccaagttctgtgaattaggctttagataagtctctcatgtccatttcttcccctttctcttcattttaaattctctgtgactgctcttcttgtctgggtcttgaactttaaaccttaaacatgtgctgttgcaaccattccctgcttagcctttctggcctctcctttctatctccagtctgtcctacatattgacaatagctaattttccttagatatcacttactttttttttttttaatttgaaaatccattttcaaatcaccttctcatgcttactagttgtttctgctctggcataatattggcatatatgtggtttggg

SEQ ID NO: 39217 - DNA, 4092 bp, Homo sapiens
atcttgttgcagtaaaaagtaacctgaagtagatgattatctgtctagaccagagaataaaacattttagctttgcatctcaaagtgtcttggtggtctcctaggaaatttggtacttcttaatagagttactttaccttaaaaagaaaatttaaaatcttaagtcagttatcaatattgcatcttcaacatttttgtttcacactctcagtcttttattctgtgtgtgtgcttgatcataactcaggttttcctctggatctcttacgctgtgaaagccttcttggtttggaccctgcaacttgcagcagagttctaaacaaaaattacacgctgcttgtttccatggctcccctcaccaatgaaatccggcctgtcagcagctgcacccctcagcatattggaccagctatcccagaagtcagctctgtctggtttaaactgtacatttatcatgtcactggacaaggaccaccatcccttttattgtccaaaggtacaagacttcgaaaactgccagatatatttcagagttatgatcgattgctaataacatcttggggtcatgatcctggagtagttcctacctcaaatgtgctcacgatgttgaatgatgctttaacacattctgcagttttaattcaggggcatggtctgcatgggataggagaaactgtccatgtcccatttccatttgatgaaacagaactacaaggagagttcactcgtgtcaatatgggtgttcataaagcattgcagatactaaggaacagagtggacttacagcatctctgtggatatgtcaccatgttgaatgcttccagccaacttgcagatagaaaactcagtgatgcttctgatgagagaggagaacctgatttggcttctggctcagatgtaaatgggagtacagagtcatttgaaatggtcattgaggaagcaactatagattcagcaacaaagcaaacctctggtgccacaacagaagcagattgggttcctctcgagctgtgctttggaattccactgttcagttccgaattaaaccggaaagtttgtaggaaaattgctgcacatggcctttgcagaaaagagagccttcaaaacctcttacattccagtagaaaactctctctgcaagtccttaactttgttcactcattccaggaaggtgcttcaatattggatattcacacagagcccagtttttcaagtttgctttcacagtcatcgtatgctgacatgggtgttccacttcctgcaaaaaacttaatatttaaagatggtgtcttatcagaatggagtggacggtcaccttcctcacttcttattgctaatctccatttgcaataatttggttacaccatttgttgctcacactttctgccttttttctttcttaacgttagctttatagtgtcagccactaaaaagcatcctgctgctgcagtgcaattcttgcttaactaatattaaaagttggggaacatattcatgttttctgaagttttgctcattattgcacatcttattgcgacaaagtgctttttagcagccagcactgtattttttaccttgagacaatctgcatttcttttataaaactaagtatatactttataggctttatgatgactgttatgtttataagcagtcactatgaaaattgcaatggtaattttatatgttagtttatcaaacataaatcttgtttaattttatattttgttacctatactttgggggatcaagggaagagatggaactcttcctctgaaaaggcttcttggtacttaaagtagtaaaactataaaacaataaacatccagtattgagagatgatatgatagggcattatgaattcctatgggtgtctgtaaattatgtatgtcagttggacattgtagaaggtatgtaaatcagcatagttgtgtataacttaaccttgatttataaggtcttaagattatgactattcattgacatctcatgagaagctttagaagactttctatttttaaacaccatttatatgtggacttctgttgtcactgactttgggctttatattttcatagagtctttatggaaaaaatagaatttattttccactcttgtagctatagctgctgcacactttcaccctgatttatttttttgtttcttagctttgatgttttcaaaccaaggattgtgattttaggttagaattacatattagaagcattaagactatgtctttggatcagaatgctttagtgataaacctactttgaagacatactcttaagcaatctggatcttaaatttatgtgaatacttttttagaaaatgataaagaaaaatggaattacttcaaagtgtttcttgagtcattgattcttttagcatctcaaatgttaattagaataattggaatcactttttagacttttcaagttaccttccttgggaagtttgtgcagtgttatagtttagtttagctcctcttacagggtaatggtttgctagtttaaaactgtaaccaaacgaactggtcagacaacatatatctaaaacacttaaaatgttaggaagtttgggaatgttataacctaaacgtttttgctggtaactttttgttatttatagatatttgtgtatttaacatacatacttcaggaaatatatgcctttcctaaaacttaaccatgcattcaataccatggcctatctatagaattgaatattttggaccatgttatctgtggcacagtcagtgctgtgtttgaggtaaatgcagtaacggttagttttctactttgtcttatagaaggtagaaaccatgtgtatgttatgtttgtctataaaagaaaaaatactaatattaaataatttcttacgactctgagtcactcacttatttttccaataattgatattgtacattcctagtgccattaggtatgtatgtatgtaacttttacagtttttcagctgaaagttgtaagtatttttttttttggatcggggctctttaatctcattttaatttccttggtttgaactgtagttattttatttattcctatattaaccatctaaaccaactgtaatgacatgtacactaatacagaattgaacatttgtagttgttggcagtgaacccagttgttggtgaatttaaagcttaaaatatgggaatgatttgctgctatatttcctttgagagagaaaggaggaagaaatagaacctaatagtgatcatgaattttagggaaagtaccgaagaaccatggggtcccctctggtttcttgtgttgaatgaggcaagggtaatcatctgattccgagctgaagacctctggtcctcttaaggagggagagtgcatttttagagcttttagcaaaatgtgaaaagctgatgtttgcgccttgctttgtgaatttggctttgttttacttatacattaactcatgtaatctcttaaatcttacaagcattgatccatttcaacaaaaaggtaaatttaaaatgcagactttgttatttgccaaagaagattcatgaaaaatttacgtccaattattttgcaaatagttaatttcatttggctttttaccatgttccttcctttctttttcccgcttccttaatgtaatttaaaccctggcaaacattctttagaaaccaagaggaaagaaagaacaaatatcaaaaaagacatagaatttaatattgatacaatttcacctctaaaatggatttgaagaaatgcaactttatatcaaaaaatgtcatctgatttcctttgtttcttttttaaattatgtaatcagatgattttatgtttttttttcaggggagcggaatattggtttcttttacttgttgttttcagttttctctgccattcatgtttcttttttgtgttcagtgtttcaaatacaatttgtatttaaggattttaaaataccaaactgtaactgagtacagtggatcgttttctgttaggatgttaatattatacaatgaaatctataaagtgttgtcaatttgattattgacacatataacatgtttacaaataaactgtggtatgatcaagttac

SEQ ID NO: 39218 - DNA, 4021 bp, Homo sapiens
tgaaatttttaagttctaggttctttgctactaaagagtgttggcaaaaggtagttttttgtcatgtgctttgccatccacaaagaactgttagaataagacccgtttaggatttttgaaagactactagtctgtcttggaataaagagaataagtagatatctgcctagatggaagacttttctctgtttctccttttttatcattcacacaactgtctaatacttcataaagtctaaggaaaaaaataattgtttacctggagatgcagatagtgacaacaggatcttaaaatttacaaaatctcaaaaactgcttagtagatcctttgccttgggggattattgtgtgaattataaaaaagaggtttctttatatttgaatatagagcatttttctcttttataagttcacatatttatgagaacttgagttaagatataaataatttaggcatgtgatttcaagtacattgttagctttagtttcagtaagaatgacaactttatatatttcttttttggaatcaattatgatgtattaaagtataaaagtagttctaagagttgtttaataaagtatgtttaagctgttggcgttgtgttattagaaactgttcattaatgtgatgtccgttctgtttgtagagttcactcgtgtcaatatgggtgttcataaagcattgcagatactaaggaacagagtggacttacagcatctctgtggatatgtcaccatgttgaatgcttccagccaacttgcagatagaaaactcagtgatgcttctgatgagagaggagaacctgatttggcttctggctcagatgtaaatgggagtacagagtcatttgaaatggtcattgaggaagcaactatagattcagcaacaaagcaaacctctggtgccacaacagaagcagattgggttcctctcgagctgtgctttggaattccactgttcagttccgaattaaaccggaaagtttgtaggaaaattgctgcacatggcctttgcagaaaagagagccttcaaaacctcttacattccagtagaaaactctctctgcaagtccttaactttgttcactcattccaggaaggtgcttcaatattggatattcacacagagcccagtttttcaagtttgctttcacagtcatcgtatgctgacatgggtgttccacttcctgcaaaaaacttaatatttaaagatggtgtcttatcagaatggagtggacggtcaccttcctcacttcttattgctaatctccatttgcaataatttggttacaccatttgttgctcacactttctgccttttttctttcttaacgttagctttatagtgtcagccactaaaaagcatcctgctgctgcagtgcaattcttgcttaactaatattaaaagttggggaacatattcatgttttctgaagttttgctcattattgcacatcttattgcgacaaagtgctttttagcagccagcactgtattttttaccttgagacaatctgcatttcttttataaaactaagtatatactttataggctttatgatgactgttatgtttataagcagtcactatgaaaattgcaatggtaattttatatgttagtttatcaaacataaatcttgtttaattttatattttgttacctatactttgggggatcaagggaagagatggaactcttcctctgaaaaggcttcttggtacttaaagtagtaaaactataaaacaataaacatccagtattgagagatgatatgatagggcattatgaattcctatgggtgtctgtaaattatgtatgtcagttggacattgtagaaggtatgtaaatcagcatagttgtgtataacttaaccttgatttataaggtcttaagattatgactattcattgacatctcatgagaagctttagaagactttctatttttaaacaccatttatatgtggacttctgttgtcactgactttgggctttatattttcatagagtctttatggaaaaaatagaatttattttccactcttgtagctatagctgctgcacactttcaccctgatttatttttttgtttcttagctttgatgttttcaaaccaaggattgtgattttaggttagaattacatattagaagcattaagactatgtctttggatcagaatgctttagtgataaacctactttgaagacatactcttaagcaatctggatcttaaatttatgtgaatacttttttagaaaatgataaagaaaaatggaattacttcaaagtgtttcttgagtcattgattcttttagcatctcaaatgttaattagaataattggaatcactttttagacttttcaagttaccttccttgggaagtttgtgcagtgttatagtttagtttagctcctcttacagggtaatggtttgctagtttaaaactgtaaccaaacgaactggtcagacaacatatatctaaaacacttaaaatgttaggaagtttgggaatgttataacctaaacgtttttgctggtaactttttgttatttatagatatttgtgtatttaacatacatacttcaggaaatatatgcctttcctaaaacttaaccatgcattcaataccatggcctatctatagaattgaatattttggaccatgttatctgtggcacagtcagtgctgtgtttgaggtaaatgcagtaacggttagttttctactttgtcttatagaaggtagaaaccatgtgtatgttatgtttgtctataaaagaaaaaatactaatattaaataatttcttacgactctgagtcactcacttatttttccaataattgatattgtacattcctagtgccattaggtatgtatgtatgtaacttttacagtttttcagctgaaagttgtaagtatttttttttttggatcggggctctttaatctcattttaatttccttggtttgaactgtagttattttatttattcctatattaaccatctaaaccaactgtaatgacatgtacactaatacagaattgaacatttgtagttgttggcagtgaacccagttgttggtgaatttaaagcttaaaatatgggaatgatttgctgctatatttcctttgagagagaaaggaggaagaaatagaacctaatagtgatcatgaattttagggaaagtaccgaagaaccatggggtcccctctggtttcttgtgttgaatgaggcaagggtaatcatctgattccgagctgaagacctctggtcctcttaaggagggagagtgcatttttagagcttttagcaaaatgtgaaaagctgatgtttgcgccttgctttgtgaatttggctttgttttacttatacattaactcatgtaatctcttaaatcttacaagcattgatccatttcaacaaaaaggtaaatttaaaatgcagactttgttatttgccaaagaagattcatgaaaaatttacgtccaattattttgcaaatagttaatttcatttggctttttaccatgttccttcctttctttttcccgcttccttaatgtaatttaaaccctggcaaacattctttagaaaccaagaggaaagaaagaacaaatatcaaaaaagacatagaatttaatattgatacaatttcacctctaaaatggatttgaagaaatgcaactttatatcaaaaaatgtcatctgatttcctttgtttcttttttaaattatgtaatcagatgattttatgtttttttttcaggggagcggaatattggtttcttttacttgttgttttcagttttctctgccattcatgtttcttttttgtgttcagtgtttcaaatacaatttgtatttaaggattttaaaataccaaactgtaactgagtacagtggatcgttttctgttaggatgttaatattatacaatgaaatctataaagtgttgtcaatttgattattgacacatataacatgtttacaaataaactgtggtatgatcaagttac

SEQ ID NO: 39219 - DNA, 3255 bp, Homo sapiens
tttttttttagagatttttcttctgttaggtaatactttggggttaggttaggtcttgtaaaaatgaacttttgcttttcccacagtctcgtagcctcttatttctatttaaaaggacttactacagtttaacgttgttagtcatttttgcacatattaatacctgtcattgattgctttgggctcacagtgtagatctttgcatctcctgtactgctttgcaatccataaacacttctcaggtaatcaaggtctctctttctcattagttatattaagtggttttggtaaagtgttgaatatcatttctcttgtttcttgatcttttaggaaggtgcttcaatattggatattcacacagagcccagtttttcaagtttgctttcacagtcatcgtatgctgacatgggtgttccacttcctgcaaaaaacttaatatttaaagatggtgtcttatcagaatggagtggacggtcaccttcctcacttcttattgctaatctccatttgcaataatttggttacaccatttgttgctcacactttctgccttttttctttcttaacgttagctttatagtgtcagccactaaaaagcatcctgctgctgcagtgcaattcttgcttaactaatattaaaagttggggaacatattcatgttttctgaagttttgctcattattgcacatcttattgcgacaaagtgctttttagcagccagcactgtattttttaccttgagacaatctgcatttcttttataaaactaagtatatactttataggctttatgatgactgttatgtttataagcagtcactatgaaaattgcaatggtaattttatatgttagtttatcaaacataaatcttgtttaattttatattttgttacctatactttgggggatcaagggaagagatggaactcttcctctgaaaaggcttcttggtacttaaagtagtaaaactataaaacaataaacatccagtattgagagatgatatgatagggcattatgaattcctatgggtgtctgtaaattatgtatgtcagttggacattgtagaaggtatgtaaatcagcatagttgtgtataacttaaccttgatttataaggtcttaagattatgactattcattgacatctcatgagaagctttagaagactttctatttttaaacaccatttatatgtggacttctgttgtcactgactttgggctttatattttcatagagtctttatggaaaaaatagaatttattttccactcttgtagctatagctgctgcacactttcaccctgatttatttttttgtttcttagctttgatgttttcaaaccaaggattgtgattttaggttagaattacatattagaagcattaagactatgtctttggatcagaatgctttagtgataaacctactttgaagacatactcttaagcaatctggatcttaaatttatgtgaatacttttttagaaaatgataaagaaaaatggaattacttcaaagtgtttcttgagtcattgattcttttagcatctcaaatgttaattagaataattggaatcactttttagacttttcaagttaccttccttgggaagtttgtgcagtgttatagtttagtttagctcctcttacagggtaatggtttgctagtttaaaactgtaaccaaacgaactggtcagacaacatatatctaaaacacttaaaatgttaggaagtttgggaatgttataacctaaacgtttttgctggtaactttttgttatttatagatatttgtgtatttaacatacatacttcaggaaatatatgcctttcctaaaacttaaccatgcattcaataccatggcctatctatagaattgaatattttggaccatgttatctgtggcacagtcagtgctgtgtttgaggtaaatgcagtaacggttagttttctactttgtcttatagaaggtagaaaccatgtgtatgttatgtttgtctataaaagaaaaaatactaatattaaataatttcttacgactctgagtcactcacttatttttccaataattgatattgtacattcctagtgccattaggtatgtatgtatgtaacttttacagtttttcagctgaaagttgtaagtatttttttttttggatcggggctctttaatctcattttaatttccttggtttgaactgtagttattttatttattcctatattaaccatctaaaccaactgtaatgacatgtacactaatacagaattgaacatttgtagttgttggcagtgaacccagttgttggtgaatttaaagcttaaaatatgggaatgatttgctgctatatttcctttgagagagaaaggaggaagaaatagaacctaatagtgatcatgaattttagggaaagtaccgaagaaccatggggtcccctctggtttcttgtgttgaatgaggcaagggtaatcatctgattccgagctgaagacctctggtcctcttaaggagggagagtgcatttttagagcttttagcaaaatgtgaaaagctgatgtttgcgccttgctttgtgaatttggctttgttttacttatacattaactcatgtaatctcttaaatcttacaagcattgatccatttcaacaaaaaggtaaatttaaaatgcagactttgttatttgccaaagaagattcatgaaaaatttacgtccaattattttgcaaatagttaatttcatttggctttttaccatgttccttcctttctttttcccgcttccttaatgtaatttaaaccctggcaaacattctttagaaaccaagaggaaagaaagaacaaatatcaaaaaagacatagaatttaatattgatacaatttcacctctaaaatggatttgaagaaatgcaactttatatcaaaaaatgtcatctgatttcctttgtttcttttttaaattatgtaatcagatgattttatgtttttttttcaggggagcggaatattggtttcttttacttgttgttttcagttttctctgccattcatgtttcttttttgtgttcagtgtttcaaatacaatttgtatttaaggattttaaaataccaaactgtaactgagtacagtggatcgttttctgttaggatgttaatattatacaatgaaatctataaagtgttgtcaatttgattattgacacatataacatgtttacaaataaactgtggtatgatcaagttac

SEQ ID NO: 39220 - DNA, 2549 bp, Homo sapiens
gcagtaccatacggttcctataggtagccaggtcaatctggataagttcaggctctgaagcagctttatatactttataggctttatgatgactgttatgtttataagcagtcactatgaaaattgcaatggtaattttatatgttagtttatcaaacataaatcttgtttaattttatattttgttacctatactttgggggatcaagggaagagatggaactcttcctctgaaaaggcttcttggtacttaaagtagtaaaactataaaacaataaacatccagtattgagagatgatatgatagggcattatgaattcctatgggtgtctgtaaattatgtatgtcagttggacattgtagaaggtatgtaaatcagcatagttgtgtataacttaaccttgatttataaggtcttaagattatgactattcattgacatctcatgagaagctttagaagactttctatttttaaacaccatttatatgtggacttctgttgtcactgactttgggctttatattttcatagagtctttatggaaaaaatagaatttattttccactcttgtagctatagctgctgcacactttcaccctgatttatttttttgtttcttagctttgatgttttcaaaccaaggattgtgattttaggttagaattacatattagaagcattaagactatgtctttggatcagaatgctttagtgataaacctactttgaagacatactcttaagcaatctggatcttaaatttatgtgaatacttttttagaaaatgataaagaaaaatggaattacttcaaagtgtttcttgagtcattgattcttttagcatctcaaatgttaattagaataattggaatcactttttagacttttcaagttaccttccttgggaagtttgtgcagtgttatagtttagtttagctcctcttacagggtaatggtttgctagtttaaaactgtaaccaaacgaactggtcagacaacatatatctaaaacacttaaaatgttaggaagtttgggaatgttataacctaaacgtttttgctggtaactttttgttatttatagatatttgtgtatttaacatacatacttcaggaaatatatgcctttcctaaaacttaaccatgcattcaataccatggcctatctatagaattgaatattttggaccatgttatctgtggcacagtcagtgctgtgtttgaggtaaatgcagtaacggttagttttctactttgtcttatagaaggtagaaaccatgtgtatgttatgtttgtctataaaagaaaaaatactaatattaaataatttcttacgactctgagtcactcacttatttttccaataattgatattgtacattcctagtgccattaggtatgtatgtatgtaacttttacagtttttcagctgaaagttgtaagtatttttttttttggatcggggctctttaatctcattttaatttccttggtttgaactgtagttattttatttattcctatattaaccatctaaaccaactgtaatgacatgtacactaatacagaattgaacatttgtagttgttggcagtgaacccagttgttggtgaatttaaagcttaaaatatgggaatgatttgctgctatatttcctttgagagagaaaggaggaagaaatagaacctaatagtgatcatgaattttagggaaagtaccgaagaaccatggggtcccctctggtttcttgtgttgaatgaggcaagggtaatcatctgattccgagctgaagacctctggtcctcttaaggagggagagtgcatttttagagcttttagcaaaatgtgaaaagctgatgtttgcgccttgctttgtgaatttggctttgttttacttatacattaactcatgtaatctcttaaatcttacaagcattgatccatttcaacaaaaaggtaaatttaaaatgcagactttgttatttgccaaagaagattcatgaaaaatttacgtccaattattttgcaaatagttaatttcatttggctttttaccatgttccttcctttctttttcccgcttccttaatgtaatttaaaccctggcaaacattctttagaaaccaagaggaaagaaagaacaaatatcaaaaaagacatagaatttaatattgatacaatttcacctctaaaatggatttgaagaaatgcaactttatatcaaaaaatgtcatctgatttcctttgtttcttttttaaattatgtaatcagatgattttatgtttttttttcaggggagcggaatattggtttcttttacttgttgttttcagttttctctgccattcatgtttcttttttgtgttcagtgtttcaaatacaatttgtatttaaggattttaaaataccaaactgtaactgagtacagtggatcgttttctgttaggatgttaatattatacaatgaaatctataaagtgttgtcaatttgattattgacacatataacatgtttacaaataaactgtggtatgatcaagttac

SEQ ID NO: 39221 - DNA, 4052 bp, Homo sapiens
cactcttactgccttcttaatgatgggaaatctttcaccaaacttgaaaagtcatgcagtcacaatgtttgaagtaggcaaactctcagatgagtctctggacagctttcttatagaactagaaaaggttcagagcactggtgaaggagaagcacagagatattttgatcatgcacttactctgagaaacacaatactgtttctgcgtcataacaaagatctagttgcgcaaactgcacagccagaccaacccaattatggttttcctctggatctcttacgctgtgaaagccttcttggtttggaccctgcaacttgcagcagagttctaaacaaaaattacacgctgcttgtttccatggctcccctcaccaatgaaatccggcctgtcagcagctgcacccctcagcatattggaccagctatcccagaagtcagctctgtctggtttaaactgtacatttatcatgtcactggacaaggaccaccatcccttttattgtccaaaggtacaagacttcgaaaactgccagatatatttcagagttatgatcgattgctaataacatcttggggtcatgatcctggagtagttcctacctcaaatgtgctcacgatgttgaatgatgctttaacacattctgcagttttaattcaggggcatggtctgcatgggataggagaaactgtccatgtcccatttccatttgatgaaacagaactacaaggagagttcactcgtgtcaatatgggtgttcataaagcattgcagatactaaggaacagagtggacttacagcatctctgtggatatgtcaccatgttgaatgcttccagccaacttgcagatagaaaactcagtgatgcttctgatgagagaggagaacctgatttggcttctggctcagatgtaaatgggagtacagagtcatttgaaatggtcattgaggaagcaactatagattcagcaacaaagcaaacctctggtgccacaacagaagcagattgggttcctctcgagctgtgctttggaattccactgttcagttccgaattaaaccggaaagtttgtaggaaaattgctgcacatggcctttgcagaaaagagagccttcaaaacctcttacattccagtagaaaactctctctgcaagtccttaactttgttcactcattccaggaaggtgcttcaatattggatattcacacagagcccagtttttcaagtttgctttcacagtcatcgtatgctgacatgggtgttccacttcctgcaaaaaacttaatatttaaagatggtgtcttatcagaatggagtggacggtcaccttcctcacttcttattgctaatctccatttgcaataatttggttacaccatttgttgctcacactttctgccttttttctttcttaacgttagctttatagtgtcagccactaaaaagcatcctgctgctgcagtgcaattcttgcttaactaatattaaaagttggggaacatattcatgttttctgaagttttgctcattattgcacatcttattgcgacaaagtgctttttagcagccagcactgtattttttaccttgagacaatctgcatttcttttataaaactaagtatatactttataggctttatgatgactgttatgtttataagcagtcactatgaaaattgcaatggtaattttatatgttagtttatcaaacataaatcttgtttaattttatattttgttacctatactttgggggatcaagggaagagatggaactcttcctctgaaaaggcttcttggtacttaaagtagtaaaactataaaacaataaacatccagtattgagagatgatatgatagggcattatgaattcctatgggtgtctgtaaattatgtatgtcagttggacattgtagaaggtatgtaaatcagcatagttgtgtataacttaaccttgatttataaggtcttaagattatgactattcattgacatctcatgagaagctttagaagactttctatttttaaacaccatttatatgtggacttctgttgtcactgactttgggctttatattttcatagagtctttatggaaaaaatagaatttattttccactcttgtagctatagctgctgcacactttcaccctgatttatttttttgtttcttagctttgatgttttcaaaccaaggattgtgattttaggttagaattacatattagaagcattaagactatgtctttggatcagaatgctttagtgataaacctactttgaagacatactcttaagcaatctggatcttaaatttatgtgaatacttttttagaaaatgataaagaaaaatggaattacttcaaagtgtttcttgagtcattgattcttttagcatctcaaatgttaattagaataattggaatcactttttagacttttcaagttaccttccttgggaagtttgtgcagtgttatagtttagtttagctcctcttacagggtaatggtttgctagtttaaaactgtaaccaaacgaactggtcagacaacatatatctaaaacacttaaaatgttaggaagtttgggaatgttataacctaaacgtttttgctggtaactttttgttatttatagatatttgtgtatttaacatacatacttcaggaaatatatgcctttcctaaaacttaaccatgcattcaataccatggcctatctatagaattgaatattttggaccatgttatctgtggcacagtcagtgctgtgtttgaggtaaatgcagtaacggttagttttctactttgtcttatagaaggtagaaaccatgtgtatgttatgtttgtctataaaagaaaaaatactaatattaaataatttcttacgactctgagtcactcacttatttttccaataattgatattgtacattcctagtgccattaggtatgtatgtatgtaacttttacagtttttcagctgaaagttgtaagtatttttttttttggatcggggctctttaatctcattttaatttccttggtttgaactgtagttattttatttattcctatattaaccatctaaaccaactgtaatgacatgtacactaatacagaattgaacatttgtagttgttggcagtgaacccagttgttggtgaatttaaagcttaaaatatgggaatgatttgctgctatatttcctttgagagagaaaggaggaagaaatagaacctaatagtgatcatgaattttagggaaagtaccgaagaaccatggggtcccctctggtttcttgtgttgaatgaggcaagggtaatcatctgattccgagctgaagacctctggtcctcttaaggagggagagtgcatttttagagcttttagcaaaatgtgaaaagctgatgtttgcgccttgctttgtgaatttggctttgttttacttatacattaactcatgtaatctcttaaatcttacaagcattgatccatttcaacaaaaaggtaaatttaaaatgcagactttgttatttgccaaagaagattcatgcatgttccttcctttctttttcccgcttccttaatgtaatttaaaccctggcaaacattctttagaaaccaagaggaaagaaagaacaaatatcaaaaaagacatagaatttaatattgatacaatttcacctctaaaatggatttgaagaaatgcaactttatatcaaaaaatgtcatctgatttcctttgtttcttttttaaattatgtaatcagatgattttatgtttttttttcaggggagcggaatattggtttcttttacttgttgttttcagttttctctgccattcatgtttcttttttgtgttcagtgtttcaaatacaatttgtatttaaggattttaaaataccaaactgtaactgagtacagtggatcgttttctgttaggatgttaatattatacaatgaaatctataaagtgttgtcaatttgattattgacacatataacatgtttacaaataaactgtggtatgatcaagttac

SEQ ID NO: 39222 - DNA, 4174 bp, Homo sapiens
cactcttactgccttcttaatgatgggaaatctttcaccaaacttgaaaagtcatgcagtcacaatgtttgaagtaggcaaactctcagatgagtctctggacagctttcttatagaactagaaaaggttcagagcactggtgaaggagaagcacagagatattttgatcatgcacttactctgagaaacacaatactgtttctgcgtcataacaaagatctagttgcgcaaactgcacagccagaccaacccaattatggttttcctctggatctcttacgctgtgaaagccttcttggtttggaccctgcaacttgcagcagagttctaaacaaaaattacacgctgcttgtttccatggctcccctcaccaatgaaatccggcctgtcagcagctgcacccctcagcatattggaccagctatcccagaagtcagctctgtctggtttaaactgtacatttatcatgtcactggacaaggaccaccatcccttttattgtccaaaggtacaagacttcgaaaactgccagatatatttcagagttatgatcgattgctaataacatcttggggtcatgatcctggagtagttcctacctcaaatgtgctcacgatgttgaatgatgctttaacacattctgcagttttaattcaggggcatggtctgcatgggataggagaaactgtccatgtcccatttccatttgatgaaacagaactacaaggagagttcactcgtgtcaatatgggtgttcataaagcattgcagatactaaggaacagagtggacttacagcatctctgtggatatgtcaccatgttgaatgcttccagccaacttgcagatagaaaactcagtgatgcttctgatgagagaggagaacctgatttggcttctggctcagatgtaaatgggagtacagagtcatttgaaatggtcattgaggaagcaactatagattcagcaacaaagcaaacctctggtgccacaacagaagcagattgggttcctctcgagctgtgctttggaattccactgttcagttccgaattaaaccggaaagtttgtaggaaaattgctgcacatggcctttgcagaaaagagagccttcaaaacctcttacattccagtagaaaactctctctgcaagtccttaactttgttcactcattccaggaaggtgcttcaatattggatattcacacagagcccagtttttcaagtttgctttcacagtcatcgtatgctgacatgggtgttccacttcctgcaaaaaacttaatatttaaagatggtgtcttatcagaatggagtggacggtcaccttcctcacttcttattgctaatctccatttgcaataatttggttacaccatttgttgctcacactttctgccttttttctttcttaacgttagctttatagtgtcagccactaaaaagcatcctgctgctgcagtgcaattcttgcttaactaatattaaaagttggggaacatattcatgttttctgaagttttgctcattattgcacatcttattgcgacaaagtgctttttagcagccagcactgtattttttaccttgagacaatctgcatttcttttataaaactaagtatatactttataggctttatgatgactgttatgtttataagcagtcactatgaaaattgcaatggtaattttatatgttagtttatcaaacataaatcttgtttaattttatattttgttacctatactttgggggatcaagggaagagatggaactcttcctctgaaaaggcttcttggtacttaaagtagtaaaactataaaacaataaacatccagtattgagagatgatatgatagggcattatgaattcctatgggtgtctgtaaattatgtatgtcagttggacattgtagaaggtatgtaaatcagcatagttgtgtataacttaaccttgatttataaggtcttaagattatgactattcattgacatctcatgagaagctttagaagactttctatttttaaacaccatttatatgtggacttctgttgtcactgactttgggctttatattttcatagagtctttatggaaaaaatagaatttattttccactcttgtagctatagctgctgcacactttcaccctgatttatttttttgtttcttagctttgatgttttcaaaccaaggattgtgattttaggttagaattacatattagaagcattaagactatgtctttggatcagaatgctttagtgataaacctactttgaagacatactcttaagcaatctggatcttaaatttatgtgaatacttttttagaaaatgataaagaaaaatggaattacttcaaagtgtttcttgagtcattgattcttttagcatctcaaatgttaattagaataattggaatcactttttagacttttcaagttaccttccttgggaagtttgtgcagtgttatagtttagtttagctcctcttacagggtaatggtttgctagtttaaaactgtaaccaaacgaactggtcagacaacatatatctaaaacacttaaaatgttaggaagtttgggaatgttataacctaaacgtttttgctggtaactttttgttatttatagatatttgtgtatttaacatacatacttcaggaaatatatgcctttcctaaaacttaaccatgcattcaataccatggcctatctatagaattgaatattttggaccatgttatctgtggcacagtcagtgctgtgtttgaggtaaatgcagtaacggttagttttctactttgtcttatagaaggtagaaaccatgtgtatgttatgtttgtctataaaagaaaaaatactaatattaaataatttcttacgactctgagtcactcacttatttttccaataattgatattgtacattcctagtgccattaggtatgtatgtatgtaacttttacagtttttcagctgaaagttgtaagtatttttttttttggatcggggctctttaatctcattttaatttccttggtttgaactgtagttattttatttattcctatattaaccatctaaaccaactgtaatgacatgtacactaatacagaattgaacatttgtagttgttggcagtgaacccagttgttggtgaatttaaagcttaaaatatgggaatgatttgctgctatatttcctttgagagagaaaggaggaagaaatagaacctaatagtgatcatgaattttagggaaagtaccgaagaaccatggggtcccctctggtttcttgtgttgaatgaggcaagggtaatcatctgattccgagctgaagacctctggtcctcttaaggagggagagtgcatttttagagcttttagcaaaatgtgaaaagctgatgtttgcgccttgctttgtgaatttggctttgttttacttatacattaactcatgtaatctcttaaatcttacaagcattgatccatttcaacaaaaaggtaaatttaaaatgcagactttgttatttgccaaagaagattcatgaaaaatttacgtccaattattttgcaaatagttaatttcatttggctttttaccatgttccttcctttctttttcccgcttccttaatgtaatttaaaccctggcaaacattctttagaaaccaagaggaaagaaagaacaaatatcaaaaaagacatagaatttaatattgatacaatttcacctctaaaatggatttgaagaaatgcaactttatatcaaaaaatgtcatctgatttcctttgtttcttttttaaattatgtaatcagatgattttatgtttttttttcaggggagcggaatattggtttcttttacttgttgttttcagttttctctgccattcatgtttcttttttgtgttcagtgtttcaaatacaatttgtatttaaggattttaaaataccaaactgtaactgagtacagtggatcgttttctgttaggatgttaatattatacaatgaaatctataaagtgttgtcaatttgattattgacacatataacatgtttacaaataaactgtggtatgatcaagttacaaaaaagaaacatgaatggcagagaaaactgaaaacaacaagtaaaagaaaccaatattcgcgtcgacc

SEQ ID NO: 39223 - DNA, 1302 bp, Homo sapiens
  misc_feature (26)..(26): n is a, c, g, or t
gtgcctgtaccggccccggacagttntgggcatcatgtgtatgttatgtttgtctataaaagaaaaaatactaatattaaataatttcttacgactctgagtcactcacttatttttccaataattgatattgtacattcctagtgccattaggtatgtatgtatgtaacttttacagtttttcagctgaaagttgtaagtatttttttttttggatcggggctctttaatctcattttaatttccttggtttgaactgtagttattttatttattcctatattaaccatctaaaccaactgtaatgacatgtacactaatacagaattgaacatttgtagttgttggcagtgaacccagttgttggtgaatttaaagcttaaaatatgggaatgatttgctgctatatttcctttgagagagaaaggaggaagaaatagaacctaatagtgatcatgaattttagggaaagtaccgaagaaccatggggtcccctctggtttcttgtgttgaatgaggcaagggtaatcatctgattccgagctgaagacctctggtcctcttaaggagggagagtgcatttttagagcttttagcaaaatgtgaaaagctgatgtttgcgccttgctttgtgaatttggctttgttttacttatacattaactcatgtaatctcttaaatcttacaagcattgatccatttcaacaaaaaggtaaatttaaaatgcagactttgttatttgccaaagaagattcatgaaaaatttacgtccaattattttgcaaatagttaatttcatttggctttttaccatgttccttcctttctttttcccgcttccttaatgtaatttaaaccctggcaaacattctttagaaaccaagaggaaagaaagaacaaatatcaaaaaagacatagaatttaatattgatacaatttcacctctaaaatggatttgaagaaatgcaactttatatcaaaaaatgtcatctgatttcctttgtttcttttttaaattatgtaatcagatgattttatgtttttttttcaggggagcggaatattggtttcttttacttgttgttttcagttttctctgccattcatgtttcttttttgtgttcagtgtttcaaatacaatttgtatttaaggattttaaaataccaaactgtaactgagtacagtggatcgttttctgttaggatgttaatattatacaatgaaatctataaagtgttgtcaatttgattattgacacatataacatgtttacaaataaactgtggtatgatcaagttac

SEQ ID NO: 39224 - DNA, 3905 bp, Homo sapiens
cactcttactgccttcttaatgatgggaaatctttcaccaaacttgaaaagtcatgcagtcacaatgtttgaagtaggcaaactctcagatgagtctctggacagctttcttatagaactagaaaaggttcagagcactggtgaaggagaagcacagagatattttgatcatgcacttactctgagaaacacaatactgtttctgcgtcataacaaagatctagttgcgcaaactgcacagccagaccaacccaattatggttttcctctggatctcttacgctgtgaaagccttcttggtttggaccctgcaacttgcagcagagttctaaacaaaaattacacgctgcttgtttccatggctcccctcaccaatgaaatccggcctgtcagcagctgcacccctcagcatattggaccagctatcccagaagtcagctctgtctggtttaaactgtacatttatcatgtcactggacaaggaccaccatcccttttattgtccaaaggtacaagacttcgaaaactgccagatatatttcagagttatgatcgattgctaataacatcttggggtcatgatcctggagtagttcctacctcaaatgtgctcacgatgttgaatgatgctttaacacattctgcagttttaattcaggggcatggtctgcatgggataggagaaactgtccatgtcccatttccatttgatgaaacagaactacaaggagagttcactcgtgtcaatatgggtgttcataaagcattgcagatactaaggaacagagtggacttacagcatctctgtggatatgtcaccatgttgaatgcttccagccaacttgcagatagaaaactcagtgatgcttctgatgagagaggagaacctgatttggcttctggctcagatgtaaatgggagtacagagtcatttgaaatggtcattgaggaagcaactatagattcagcaacaaagcaaacctctggtgccacaacagaagcagattgggttcctctcgagctgtgctttggaattccactgttcagttccgaattaaaccggaaagtttgtaggaaaattgctgcacatggcctttgcagaaaagagagccttcaaaacctcttacattccagtagaaaactctctctgcaagtccttaactttgttcactcattccaggaaggtgcttcaatattggatattcacacagagcccagtttttcaagtttgctttcacagtcatcgtatgctgacatgggtgttccacttcctgcaaaaaacttaatatttaaagatggtgtcttatcagaatggagtggacggtcaccttcctcacttcttattgctaatctccatttgcaataatttggttacaccatttgttgctcacactttctgccttttttctttcttaacgttagctttatagtgtcagccactaaaaagcatcctgctgctgcagtgcaattcttgcttaactaatattaaaagttggggaacatattcatgttttctgaagttttgctcattattgcacatcttattgcgacaaagtgctttttagcagccagcactgtattttttaccttgagacaatctgcatttcttttataaaactaagtatatactttataggctttatgatgactgttatgtttataagcagtcactatgaaaattgcaatggtaattttatatgttagtttatcaaacataaatcttgtttaattttatattttgttacctatactttgggggatcaagggaagagatggaactcttcctctgaaaaggcttcttggtacttaaagtagtaaaactataaaacaataaacatccagtattgagagatgatatgatagggcattatgaattcctatgggtgtctgtaaattatgtatgtcagttggacattgtagaaggtatgtaaatcagcatagttgtgtataacttaaccttgatttataaggtcttaagattatgactattcattgacatctcatgagaagctttagaagactttctatttttaaacaccatttatatgtggacttctgttgtcactgactttgggctttatattttcatagagtctttatggaaaaaatagaatttattttccactcttgtagctatagctgctgcacactttcaccctgatttatttttttgtttcttagctttgatgttttcaaaccaaggattgtgattttaggttagaattacatattagaagcattaagactatgtctttggatcagaatgctttagtgataaacctactttgaagacatactcttaagcaatctggatcttaaatttatgtgaatacttttttagaaaatgataaagaaaaatggaattacttcaaagtgtttcttgagtcattgattcttttagcatctcaaatgttaattagaataattggaatcactttttagacttttcaagttaccttccttgggaagtttgtgcagtgttatagtttagtttagctcctcttacagggtaatggtttgctagtttaaaactgtaaccaaacgaactggtcagacaacatatatctaaaacacttaaaatgttaggaagtttgggaatgttataacctaaacgtttttgctggtaactttttgttatttatagatatttgtgtatttaacatacatacttcaggaaatatatgcctttcctaaaacttaaccatgcattcaataccatggcctatctatagaattgaatattttggaccatgttatctgtggcacagtcagtgctgtgtttgaggtaaatgcagtaacggttagttttctactttgtcttatagaaggtagaaaccatgtgtatgttatgtttgtctataaaagaaaaaatactaatattaaataatttcttacgactctgagtcactcacttatttttccaataattgatattgtacattcctagtgccattaggtatgtatgtatgtaacttttacagtttttcagctgaaagttgtaagtatttttttttttggatcggggctctttaatctcattttaatttccttggtttgaactgtagttattttatttattcctatattaaccatctaaaccaactgtaatgacatgtacactaatacagaattgaacatttgtagttgttggcagtgaacccagttgttggtgaatttaaagcttaaaatatgggaatgatttgctgctatatttcctttgagagagaaaggaggaagaaatagaacctaatagtgatcatgaattttagggaaagtaccgaagaaccatggggtcccctctggtttcttgtgttgaatgaggcaagggtaatcatctgattccgagctgaagacctctggtcctcttaaggagggagagtgcatttttagagcttttagcaaaatgtgaaaagctgatgtttgcgccttgctttgtgaatttggctttgttttacttatacattaactcatgtaatctcttaaatcttacaagcattgatccatttcaacaaaaaggtaaatttaaaatgcagactttgttatttgccaaagaagattcatgaaaaatttacgtccaattattttgcaaatagttaatttcatttggctttttaccatgttccttcctttctttttcccgcttccttaatgtaatttaaaccctggcaaacattcttttacttgttgttttcagttttctctgccattcatgtttcttttttgtgttcagtgtttcaaatacaatttgtatttaaggattttaaaataccaaactgtaactgagtacagtggatcgttttctgttaggatgttaatattatacaatgaaatctataaagtgttgtcaatttgattattgacacatataacatgtttacaaataaactgtggtatgatcaagttac

SEQ ID NO: 39225 - DNA, 1310 bp, Homo sapiens
cactcttactgccttcttaatgatgggaaatctttcaccaaacttgaaaagtcatgcagtcacaatgtttgaagtaggcaaactctcagatgagtctctggacagctttcttatagaactagaaaaggttcagagcactggtgaaggagaagcacagagatattttgatcatgcacttactctgagaaacacaatactgtttctgcgtcataacaaagatctagttgcgcaaactgcacagccagaccaacccaattatggttttcctctggatctcttacgctgtgaaagccttcttggtttggaccctgcaacttgcagcagagttctaaacaaaaattacacgctgcttgtttccatggctcccctcaccaatgaaatccggcctgtcagcagctgcacccctcagcatattggaccagctatcccagaagtcagctctgtctggtttaaactgtacatttatcatgtcactggacaaggaccaccatcccttttattgtccaaaggtacaagacttcgaaaactgccagatatatttcagagttatgatcgattgctaataacatcttggggtcatgatcctggagtagttcctacctcaaatgtgctcacgatgttgaatgatgctttaacacattctgcagttttaattcaggggcatggtctgcatgggataggagaaactgtccatgtcccatttccatttgatgaaacagaactacaaggagagttcactcgtgtcaatatgggtgttcataaagcattgcagatactaaggaacagagtggacttacagcatctctgtggatatgtcaccatgttgaatgcttccagccaacttgcagatagaaaactcagtgatgcttctgatgagagaggagaacctgatttggcttctggctcagatgtaaatgggagtacagagtcatttgaaatggtcattgaggaagcaactatagattcagcaacaaagcaaacctctggtgccacaacagaagcagattgggttcctctcgagctgtgctttggaattccactgttcagttccgaattaaaccggaaagtttgtaggaaaattgctgcacatggcctttgcagaaaagagagccttcaaaacctcttacattccagtagaaaactctctctgcaagtccttaactttgttcactcattccaggtaacaaaaaccaaaaagtccaaatggtacttgtactgagctttaagtatgcacaacacttctgtgtttgtttttgagtcaccacagcagcaagatatgaaataaacattaattttattgtacaaaaaaa

SEQ ID NO: 39226 - DNA, 4105 bp, Homo sapiens
cactcttactgccttcttaatgatgggaaatctttcaccaaacttgaaaagtcatgcagtcacaatgtttgaagtaggcaaactctcagatgagtctctggacagctttcttatagaactagaaaaggttcagagcactggtgaaggagaagcacagagatattttgatcatgcacttactctgagaaacacaatactgtttctgcgtcataacaaagatctagttgcgcaaactgcacagccagaccaacccaattatggttttcctctggatctcttacgctgtgaaagccttcttggtttggaccctgcaacttgcagcagagttctaaacaaaaattacacgctgcttgtttccatggctcccctcaccaatgaaatccggcctgtcagcagctgcacccctcagcatattggaccagctatcccagaagtcagctctgtctggtttaaactgtacatttatcatgtcactggacaaggaccaccatcccttttattgtccaaaggtacaagacttcgaaaactgccagatatatttcagagttatgatcgattgctaataacatcttggggtcatgatcctggagtagttcctacctcaaatgtgctcacgatgttgaatgatgctttaacacattctgcagttttaattcaggggcatggtctgcatgggataggagaaactgtccatgtcccatttccatttgatgaaacagaactacaaggagagttcactcgtgtcaatatgggtgttcataaagcattgcagatactaaggaacagagtggacttacagcatctctgtggatatgtcaccatgttgaatgcttccagccaacttgcagatagaaaactcagtgatgcttctgatgagagaggagaacctgatttggcttctggctcagatgtaaatgggagtacagagtcatttgaaatggtcattgaggaagcaactatagattcagcaacaaagcaaacctctggtgccacaacagaagcagattgggttcctctcgagctgtgctttggaattccactgttcagttccgaattaaaccggaaagtttgtaggaaaattgctgcacatggcctttgcagaaaagagagccttcaaaacctcttacattccagtagaaaactctctctgcaagtccttaactttgttcactcattccaggaaggtgcttcaatattggatattcacacagagcccagtttttcaagtttgctttcacagtcatcgtatgctgacatgggtgttccacttcctgcaaaaaacttaatatttaaagatggtgtcttatcagaatggagtggacggtcaccttcctcacttcttattgctaatctccatttgcaataatttggttacaccatttgttgctcacactttctgccttttttctttcttaacgttagctttatagtgtcagccactaaaaagcatcctgctgctgcagtgcaattcttgcttaactaatattaaaagttggggaacatattcatgttttctgaagttttgctcattattgcacatcttattgcgacaaagtgctttttagcagccagcactgtattttttaccttgagacaatctgcatttcttttataaaactaagtatatactttataggctttatgatgactgttatgtttataagcagtcactatgaaaattgcaatggtaattttatatgttagtttatcaaacataaatcttgtttaattttatattttgttacctatactttgggggatcaagggaagagatggaactcttcctctgaaaaggcttcttggtacttaaagtagtaaaactataaaacaataaacatccagtattgagagatgatatgatagggcattatgaattcctatgggtgtctgtaaattatgtatgtcagttggacattgtagaaggtatgtaaatcagcatagttgtgtataacttaaccttgatttataaggtcttaagattatgactattcattgacatctcatgagaagctttagaagactttctatttttaaacaccatttatatgtggacttctgttgtcactgactttgggctttatattttcatagagtctttatggaaaaaatagaatttattttccactcttgtagctatagctgctgcacactttcaccctgatttatttttttgtttcttagctttgatgttttcaaaccaaggattgtgattttaggttagaattacatattagaagcattaagactatgtctttggatcagaatgctttagtgataaacctactttgaagacatactcttaagcaatctggatcttaaatttatgtgaatacttttttagaaaatgataaagaaaaatggaattacttcaaagtgtttcttgagtcattgattcttttagcatctcaaatgttaattagaataattggaatcactttttagacttttcaagttaccttccttgggaagtttgtgcagtgttatagtttagtttagctcctcttacagggtaatggtttgctagtttaaaactgtaaccaaacgaactggtcagacaacatatatctaaaacacttaaaatgttaggaagtttgggaatgttataacctaaacgtttttgctggtaactttttgttatttatagatatttgtgtatttaacatacatacttcaggaaatatatgcctttcctaaaacttaaccatgcattcaataccatggcctatctatagaattgaatattttggaccatgttatctgtggcacagtcagtgctgtgtttgaggtaaatgcagtaacggttagttttctactttgtcttatagaaggtagaaaccatgtgtatgttatgtttgtctataaaagaaaaaatactaatattaaataatttcttacgactctgagtcactcacttatttttccaataattgatattgtacattcctagtgccattaggtatgtatgtatgtaacttttacagtttttcagctgaaagttgtaagtatttttttttttggatcggggctctttaatctcattttaatttccttggtttgaactgtagttattttatttattcctatattaaccatctaaaccaactgtaatgacatgtacactaatacagaattgaacatttgtagttgttggcagtgaacccagttgttggtgaatttaaagcttaaaatatgggaatgatttgctgctatatttcctttgagagagaaaggaggaagaaatagaacctaatagtgatcatgaattttagggaaagtaccgaagaaccatggggtcccctctggtttcttgtgttgaatgaggcaagggtaatcatctgattccgagctgaagacctctggtcctcttaaggagggagagtgcatttttagagcttttagcaaaatgtgaaaagctgatgtttgcgccttgctttgtgaatttggctttgttttacttatacattaactcatgtaatctcttaaatcttacaagcattgatccatttcaacaaaaaggtaaatttaaaatgcagactttgttatttgccaaagaagattcatgaaaaatttacgtccaattattttgcaaatagttaatttcatttggctttttaccatgttccttcctttctttttcccgcttccttaatgtaatttaaaccctggcaaacattctttagaaaccaagaggaaagaaagaacaaatatcaaaaaagacatagaatttaatattgatacaatttcacctctaaaatggatttgaagaaatgcaactttatatcaaaaaatgtcatctgatttcctttgtttcttttttaaattatgtaatcagatgattttatgtttttttttcaggggagcggaatattggtttcttttacttgttgttttcagttttctctgccattcatgtttcttttttgtgttcagtgtttcaaatacaatttgtatttaaggattttaaaataccaaactgtaactgagtacagtggatcgttttctgttaggatgttaatattatacaatgaaatctataaagtgttgtcaatttgattattgacacatataacatgtttacaaataaactgtggtatgatcaagttac

SEQ ID NO: 39227 - DNA, 4051 bp, Homo sapiens
cactcttactgccttcttaatgatgggaaatctttcaccaaacttgaaaagtcatgcagtcacaatgtttgaagtaggcaaactctcagatgagtctctggacagctttcttatagaactagaaaaggttcagagcactggtgaaggagaagcacagagatattttgatcatgcacttactctgagaaacacaatactgtttctgcgtcataacaaagatctagttgcgcaaactgcacagccagaccaacccaattatggttttcctctggatctcttacgctgtgaaagccttcttggtttggaccctgcaacttgcagcagagttctaaacaaaaattacacgctgcttgtttccatggctcccctcaccaatgaaatccggcctgtcagcagctgcacccctcagcatattggaccagctatcccagaagtcagctctgtctggtttaaactgtacatttatcatgtcactggacaaggaccaccatcccttttattgtccaaaggtacaagacttcgaaaactgccagatatatttcagagttatgatcgattgctaataacatcttggggtcatgatcctggagtagttcctacctcaaatgtgctcacgatgttgaatgatgctttaacacattctgcagttttaattcaggggcatggtctgcatgggataggagaaactgtccatgtcccatttccatttgatgaaacagaactacaaggagagttcactcgtgtcaatatgggtgttcataaagcattgcagatactaaggaacagagtggacttacagcatctctgtggatatgtcaccatgttgaatgcttccagccaacttgcagatagaaaactcagtgatgcttctgatgagagaggagaacctgatttggcttctggctcagatgtaaatgggagtacagagtcatttgaaatggtcattgaggaagcaactatagattcagcaacaaagcaaacctctggtgccacaacagaagcagattgggttcctctcgagctgtgctttggaattccactgttcagttccgaattaaaccggaaagtttgtaggaaaattgctgcacatggcctttgcagaaaagagagccttcaaaacctcttacattccagtagaaaactctctctgcaagtccttaactttgttcactcattccaggaaggtgcttcaatattggatattcacacagagcccagtttttcaagtttgctttcacagtcatcgtatgctgacatgggtgttccacttcctgcaaaaaacttaatatttaaagatggtgtcttatcagaatggagtggacggtcaccttcctcacttcttattgctaatctccatttgcaataatttggttacaccatttgttgctcacactttctgccttttttctttcttaacgttagctttatagtgtcagccactaaaaagcatcctgctgctgcagtgcaattcttgcttaactaatattaaaagttggggaacatattcatgttttctgaagttttgctcattattgcacatcttattgcgacaaagtgctttttagcagccagcactgtattttttaccttgagacaatctgcatttcttttataaaactaagtatatactttataggctttatgatgactgttatgtttataagcagtcactatgaaaattgcaatggtaattttatatgttagtttatcaaacataaatcttgtttaattttatattttgttacctatactttgggggatcaagggaagagatggaactcttcctctgaaaaggcttcttggtacttaaagtagtaaaactataaaacaataaacatccagtattgagagatgatatgatagggcattatgaattcctatgggtgtctgtaaattatgtatgtcagttggacattgtagaaggtatgtaaatcagcatagttgtgtataacttaaccttgatttataaggtcttaagattatgactattcattgacatctcatgagaagctttagaagactttctatttttaaacaccatttatatgtggacttctgttgtcactgactttgggctttatattttcatagagtctttatggaaaaaatagaatttattttccactcttgtagctatagctgctgcacactttcaccctgatttatttttttgtttcttagctttgatgttttcaaaccaaggattgtgattttaggttagaattacatattagaagcattaagactatgtctttggatcagaatgctttagtgataaacctactttgaagacatactcttaagcaatctggatcttaaatttatgtgaatacttttttagaaaatgataaagaaaaatggaattacttcaaagtgtttcttgagtcattgattcttttagcatctcaaatgttaattagaataattggaatcactttttagacttttcaagttaccttccttgggaagtttgtgcagtgttatagtttagtttagctcctcttacagggtaatggtttgctagtttaaaactgtaaccaaacgaactggtcagacaacatatatctaaaacacttaaaatgttaggaagtttgggaatgttataacctaaacgtttttgctggtaactttttgttatttatagatatttgtgtatttaacatacatacttcaggaaatatatgcctttcctaaaacttaaccatgcattcaataccatggcctatctatagaattgaatattttggaccatgttatctgtggcacagtcagtgctgtgtttgaggtaaatgcagtaacggttagttttctactttgtcttatagaaggtagaaaccatgtgtatgttatgtttgtctataaaagaacaataattgatattgtacattcctagtgccattaggtatgtatgtatgtaacttttacagtttttcagctgaaagttgtaagtatttttttttttggatcggggctctttaatctcattttaatttccttggtttgaactgtagttattttatttattcctatattaaccatctaaaccaactgtaatgacatgtacactaatacagaattgaacatttgtagttgttggcagtgaacccagttgttggtgaatttaaagcttaaaatatgggaatgatttgctgctatatttcctttgagagagaaaggaggaagaaatagaacctaatagtgatcatgaattttagggaaagtaccgaagaaccatggggtcccctctggtttcttgtgttgaatgaggcaagggtaatcatctgattccgagctgaagacctctggtcctcttaaggagggagagtgcatttttagagcttttagcaaaatgtgaaaagctgatgtttgcgccttgctttgtgaatttggctttgttttacttatacattaactcatgtaatctcttaaatcttacaagcattgatccatttcaacaaaaaggtaaatttaaaatgcagactttgttatttgccaaagaagattcatgaaaaatttacgtccaattattttgcaaatagttaatttcatttggctttttaccatgttccttcctttctttttcccgcttccttaatgtaatttaaaccctggcaaacattctttagaaaccaagaggaaagaaagaacaaatatcaaaaaagacatagaatttaatattgatacaatttcacctctaaaatggatttgaagaaatgcaactttatatcaaaaaatgtcatctgatttcctttgtttcttttttaaattatgtaatcagatgattttatgtttttttttcaggggagcggaatattggtttcttttacttgttgttttcagttttctctgccattcatgtttcttttttgtgttcagtgtttcaaatacaatttgtatttaaggattttaaaataccaaactgtaactgagtacagtggatcgttttctgttaggatgttaatattatacaatgaaatctataaagtgttgtcaatttgattattgacacatataacatgtttacaaataaactgtggtatgatcaagttac

SEQ ID NO: 39228 - DNA, 1760 bp, Homo sapiens
actaggaagaaacttggagctgttcaggcgatccagcctccaatcgctgctgctcttgtactcggttggcccgggcggcgctgaactgtcgggagcctaggccatggggcagcctgggccttctgcagtgtgaggcgcggggcctcccgcgtcgctccgctgacaggctgcgggcgggcaggcgggaggcgtagtgtgggtcgcggtggcggccccggccgccggccctggccgcggcatcatgaacatagacgtggagttccacatccggcacaactacccctggaacaagttgccggccaacgtgagacagagtcttggaaattcacagagagaatatgaaaagcaggttgtcctgtacagtatccgcaatcagttacgatatagaaataacttagttaaacacgtcaagaaagatgaacgcagatactatgaggaactgctaaagtacagccgagatcatctcatgctgtaccctaaccatcaatcggatattgtatgttatgtttgtctataaaagaaaaaatactaatattaaataatttcttacgactctgagtcactcacttatttttccaataattgatattgtacattcctagtgccattaggtatgtatgtatgtaacttttacagtttttcagctgaaagttgtaagtatttttttttttggatcggggctctttaatctcattttaatttccttggtttgaactgtagttattttatttattcctatattaaccatctaaaccaactgtaatgacatgtacactaatacagaattgaacatttgtagttgttggcagtgaacccagttgttggtgaatttaaagcttaaaatatgggaatgatttgctgctatatttcctttgagagagaaaggaggaagaaatagaacctaatagtgatcatgaattttagggaaagtaccgaagaaccatggggtcccctctggtttcttgtgttgaatgaggcaagggtaatcatctgattccgagctgaagacctctggtcctcttaaggagggagagtgcatttttagagcttttagcaaaatgtgaaaagctgatgtttgcgccttgctttgtgaatttggctttgttttacttatacattaactcatgtaatctcttaaatcttacaagcattgatccatttcaacaaaaaggtaaatttaaaatgcagactttgttatttgccaaagaagattcatgaaaaatttacgtccaattattttgcaaatagttaatttcatttggctttttaccatgttccttcctttctttttcccgcttccttaatgtaatttaaaccctggcaaacattctttagaaaccaagaggaaagaaagaacaaatatcaaaaaagacatagaatttaatattgatacaatttcacctctaaaatggatttgaagaaatgcaactttatatcaaaaaatgtcatctgatttcctttgtttcttttttaaattatgtaatcagatgattttatgtttttttttcaggggagcggaatattggtttcttttacttgttgttttcagttttctctgccattcatgtttcttttttgtgttcagtgtttcaaatacaatttgtatttaaggattttaaaataccaaactgtaactgagtacagtggatcgttttctgttaggatgttaatattatacaatgaaatctataaagtgttgtcaatttgattattgacacatataacatgtttacaaataaactgtggtatgatcaagttac

SEQ ID NO: 39229 - DNA, 3633 bp, Homo sapiens
  misc_feature (2902)..(2902): n is a, c, g, or t
cactcttactgccttcttaatgatgggaaatctttcaccaaacttgaaaagtcatgcagtcacaatgtttgaagtaggcaaactctcagatgagtctctggacagctttcttatagaactagaaaaggttcagagcactggtgaaggagaagcacagagatattttgatcatgcacttactctgagaaacacaatactgtttctgcgtcataacaaagatctagttgcgcaaactgcacagccagaccaacccaattatggttttcctctggatctcttacgctgtgaaagccttcttggtttggaccctgcaacttgcagcagagttctaaacaaaaattacacgctgcttgtttccatggctcccctcaccaatgaaatccggcctgtcagcagctgcacccctcagcatattggaccagctatcccagaagtcagctctgtctggtttaaactgtacatttatcatgtcactggacaaggaccaccatcccttttattgtccaaaggtacaagacttcgaaaactgccagatatatttcagagttatgatcgattgctaataacatcttggggtcatgatcctggagtagttcctacctcaaatgtgctcacgatgttgaatgatgctttaacacattctgcagttttaattcaggggcatggtctgcatgggataggagaaactgtccatgtcccatttccatttgatgaaacagaactacaaggagagttcactcgtgtcaatatgggtgttcataaagcattgcagatactaaggaacagagtggacttacagcatctctgtggatatgtcaccatgttgaatgcttccagccaacttgcagatagaaaactcagtgatgcttctgatgagagaggagaacctgatttggcttctggctcagatgtaaatgggagtacagagtcatttgaaatggtcattgaggaagcaactatagattcagcaacaaagcaaacctctggtgccacaacagaagcagattgggttcctctcgagctgtgctttggaattccactgttcagttccgaattaaaccggaaagtttgtaggaaaattgctgcacatggcctttgcagaaaagagagccttcaaaacctcttacattccagtagaaaactctctctgcaagtccttaactttgttcactcattccaggaaggtgcttcaatattggatattcacacagagcccagtttttcaagtttgctttcacagtcatcgtatgctgacatgggtgttccacttcctgcaaaaaacttaatatttaaagatggtgtcttatcagaatggagtggacggtcaccttcctcacttcttattgctaatctccatttgcaataatttggttacaccatttgttgctcacactttctgccttttttctttcttaacgttagctttatagtgtcagccactaaaaagcatcctgctgctgcagtgcaattcttgcttaactaatattaaaagttggggaacatattcatgttttctgaagttttgctcattattgcacatcttattgcgacaaagtgctttttagcagccagcactgtattttttaccttgagacaatctgcatttcttttataaaactaagtatatactttataggctttatgatgactgttatgtttataagcagtcactatgaaaattgcaatggtaattttatatgttagtttatcaaacataaatcttgtttaattttatattttgttacctatactttgggggatcaagggaagagatggaactcttcctctgaaaaggcttcttggtacttaaagtagtaaaactataaaacaataaacatccagtattgagagatgatatgatagggcattatgaattcctatgggtgtctgtaaattatgtatgtcagttggacattgtagaaggtatgtaaatcagcatagttgtgtataacttaaccttgatttataaggtcttaagattatgactattcattgacatctcatgagaagctttagaagactttctatttttaaacaccatttatatgtggacttctgttgtcactgactttgggctttatattttcatagagtctttatggaaaaaatagaatttattttccactcttgtagctatagctgctgcacactttcaccctgatttatttttttgtttcttagctttgatgttttcaaaccaaggattgtgattttaggttagaattacatattagaagcattaagactatgtctttggatcagaatgctttagtgataaacctactttgaagacatactcttaagcaatctggatcttaaatttatgtgaatacttttttagaaaatgataaagaaaaatggaattacttcaaagtgtttcttgagtcattgattcttttagcatctcaaatgttaattagaataattggaatcactttttagacttttcaagttaccttccttgggaagtttgtgcagtgttatagtttagtttagctcctcttacagggtaatggtttgctagtttaaaactgtaaccaaacgaactggtcagacaacatatatctaaaacacttaaaatgttaggaagtttgggaatgttataacctaaacgtttttgctggtaactttttgttatttatagatatttgtgtatttaacatacatacttcaggaaatatatgcctttcctaaaacttaaccatgcattcaataccatggcctatctatagaattgaatattttggaccatgttatctgtggcacagtcagtgctgtgtttgaggtaaatgcagtaacggttagttttctactttgtcttatagaaggtagaaaccatgtgtatgttatgtttgtctataaaagaaaaaatactaatattaaataatttcttacgaaaaanaaaaacaaaaaaaaaaaaaaaaaaaaaaaaaaaaaaaaaaaaaaacaactgggggagggagacaatcgacacgcgacgagacacagagagaacacaagagagggggagagcgggggccacgcgagagaggaagacagagcggacaagcggagtaccaagagaagaaggcggggagagaggaggggggagggtacacacagaaaaaaaaacgaccgaggggaaacacacacgacgctgtaagaaaacacacacagaagagaccatcagagagaacataagacgaggaacaaacacgagagatgatactagaagaaggccagaaagaaaaaatggcccagagaggggagaagagaacaaaagagacaaaggaagaacagacgagacgaaacgagaagacacgaagagggaaagaaagagagagagaagatagaccaagagaacgacagaaaagcaacacacgcccagagagagagcgacagaagcaagcaaacgtacagagggggggagagggggagaaagaaaggcaggaagcaaagaagaagcgaacagaggagagaacggtggaggaagagggaggagagagcggggaaagagcaaacaggagcgaaggagagggaaggaggggaagagaagaacagagaagagaggaaaagaagcggcaacgcgcggacagaagcggaaggaaagagggaggagaggagaaaaggcaggggacaggggagacagggcgg

SEQ ID NO: 39230 - DNA, 487 bp, Homo sapiens
taaaactagtgaaaacaaacaaaaaaagcagatacatgtgcattagagattgtaacttaggcctctttaaataggatttctgattattctatgatactttaagacatttacttatacctaatgttaaatgacgagttaatgggtgcagcacaccaatatggcacatgtatacatatgtaacaaacctgcacattgtgcacatgtaccctaaaacttaaagtataataaaaaaaaatcccccccctcaaaaaaaagacatttactgaatgcctacgatatgccagaaatgggctgtatttacacaatacagaaaaagaaaagacaagcattgcatttaagagcacagagctggctgggtatggtggctctcatggtttataatttctaactgtctacttaaaatgaagtgatatgggagaaatttatctggactcaaaatcaggaagaattttatttttatttaaaattagctttatagacactacat

SEQ ID NO: 39231 - DNA, 422 bp, Homo sapiens
tttctttctctctctctctctctctctctctctgtctgtctttctttccttctttctttcagacagggtccagctctgtcacacccaggctaaagtgcctccctctgccttctgcctcagcctttcaagtagctgggactataggtgcccaccaccatatctggcaaatttttgcattttttgtagcgacagggttttgccatgttgcccaagctggtctcaaactcccgggcttaagcgatctgcctgccttggtctcccaaagtgttgggattacaggtgtgagccactgtgactagcctctcatggtttataatttctaactgtctacttaaaatgaagtgatatgggagaaatttatctggactcaaaatcaggaagaattttatttttatttaaaattagctttatagacactacat

SEQ ID NO: 39232 - DNA, 4864 bp, Homo sapiens
ggatccgaattcgcggccgcgtcgactggagaggacggcgttatttttattaactggaggcgacggcggctgcggcggcggcgggacccgcctcctccggggtatgaaaatcggcagtgggttcctgagtggcggcggaggtaccggcagtagcggtggtagcggctccggcggcggtggtagtggcggcggcggcggcggcggcagcagcggcaggagggcagagatggaacccacctttccccagggtatggttatgttcaaccaccgtcttcccccggtcaccagcttcacccggccggcggggtcggccgcccctcccccgcaatgcgtgttatcctcctctacctccgcagccccggccgctgagcccccccctccgccagccccggacatgactttcaagaaggagccggcggcgtcagccgcggccttcccctcgcagaggacctcctgggggttcttgcagtctttggttagcatcaaacaggagaaacccgcggatcctgaggagcagcagtcccaccaccaccatcaccaccaccactatggggggctgttcgctggagctgaagagaggtctccaggcctaggaggcggtgaaggggggagtcacggcgtcatccaggacctcagtattctccaccagcatgtccagcagcaaccagcccagcaccaccgtgacgtattactcagcagcagtagcaggactgatgaccaccatggcactgaggagccaaagcaggacactaatgtcaaaaaggcaaaaaggccaaagccagaatctcagggaatcaaagccaagaggaagccaagtgcatcttccaaaccttctttggttggagatggagaaggtgccatcctctccccaagtcagaaacctcatatctgtgatcactgtagtgctgctttccgaagctcctatcacctgcggagacatgtcctcattcatacaggagaaagacctttccagtgcagccagtgtagtatgggtttcattcagaaatacctactacagagacatgagaaaattcatagtagagagaagccatttggatgtgatcagtgcagcatgaagtttattcagaagtaccatatggagagacacaagaggacacatagtggagaaaagccatataagtgtgacacttgccaacagtatttttcaaggactgatagattgttgaagcacaggcgcacatgtggtgaagtcatagttaaaggagccactagtgcagaacctgggtcatcaaaccataccaatatgggtaatctggctgtgttgtctcagggaaatacaagttcttcaaggagaaaaacaaagtcaaaaagcatagctattgaaaataaggaacagaagaccggtaaaacaaatgaatcgcaaatttcaaataatataaacatgcagagttactcagtagaaatgcctaccgtgtcttccagtggaggcataattggcactggaatagatgaactgcagaagagggtgccaaaattgatctttaagaaaggaagcagaaagaatacagataaaaactaccttaactttgtgtcaccattaccagacatagtaggacagaaatccttgtctggaaaaccaagtggctcacttggcatagtatcaaataatagtgtggagaccattggtcttctccaaagtacaagtggcaaacaaggtcagataagtagtaattatgatgatgccatgcagttttcaaagaaaagaagatatttaccaactgccagcagcaacagtgccttttctataaacgtaggacacatggtctcccaacagtctgtcattcagtctgcaggtgtcagtgttttggacaatgaggcaccattgtcacttattgactcctcagctctaaatgctgaaattaaatcttgtcatgacaagtctggaattcctgatgaggttttacaaagtattttggatcaatactccaacaaatcagaaagccagaaagaggatcctttcaatattgcagaaccacgagtggatttacacacctcaggagaacactcagaattggttcaagaagaaaatttgagcccaggcacccaaacaccttcaaatgataaagcaagtatgttgcaagaatactccaaatacctccaacaggcttttgaaaaatccactaatgcaagttttactcttggacacggtttccaatttgtcagtttgtcttcacctctccacaaccacactttgtttccagaaaaacaaatatacactacgtctcctttggagtgtggtttcggccaatctgttacctcagtgttgccatcttcattgccaaagcctccttttgggatgttgtttggatctcagccaggtctttatttgtctgctttggatgctacacatcagcagttgacaccttcccaggagctggatgatctgatagattctcagaagaacttagagacttcatcagccttccagtcctcatctcagaaattgactagccagaaggaacagaaaaacttagagtcttcaacaggctttcagattccatctcaggagttagctagccagatagatcctcagaaagacatagagcctagaacaacgtatcagattgagaactttgcacaagcgtttggttctcagtttaagtcgggcagcagggtgccaatgacctttatcactaactctaatggagaagtggaccatagagtaaggacttcagtgtcagatttctcagggtatacaaatatgatgtctgatgtaagtgagccatgtagtacaagagtaaagacacccaccagccagagttacaggtaaggtcccaaaagtggccaggctggaggtcttctaatgtaattttgttttattttgagaacactgccattggaatgtttctacacgatcctattaagaataatgtgatgccctttcaatgcaacttttcatatttagtttattttgttagcgtgattttagctctgtttgtattatgatttttaatcaaaatcaatagattaaaaatagtttgacattcaaagtgacaatgtttagcaatcaaatttacatgtatagatcgtcagggaatagcccaaatgttttaaacgcaaaaaaaaagacaaaaaaaaaccaaaaaaaaaaaacctacaaaaaaaactttgttgctaggattaaggttattctaattgctttactctcaggaaagtgtaataacgcatgggaattctgtacgttatcactgtaatggaatatccaatttacagatagtatgatatacatttcatcatttaagtaagggatcgaaaacatttcaaattgctctatctgggctgatagacatttcgtcatttaagtaagggatcgaagacatttcaaattgctatctccatctgggctgatccaaaattctgagattgttggctacctatattttgttgcagcttttaaatgtactctgaacttccaaaccacattcattccagcctggtagaacaaatattcttggatctttgatcaaagcctggaatgatagctttaataaaagaaggaaaaaaaaaaagcaccctctcttgatctcaactgtaacaaggctgtaattccatcaagcgattctactgacatctagtacagtgttgaagcccaagtggttggctggttccagtattagaactcaagttgaaattatatgattaactgaaatttggggcatgcattatttattatacatggcctacaacggttctgtctgcgctgttacgtattacctacacttctgggtttttttgttcttgttctcagcctctctttaagagttcttgggccttccttttccctctttctattttaacagttttaattttagaaccatttacattccagtaggtaattcactatgcgctttatatgccttagggcatccaaataaaaaacaatagggtaaacatccccaaaacccacctttaaaaaaaaaaaaacccatacagatttccatatgtaataaaaccccgtgttcttggatagatattaataaggttgtaattccaactggtgacataactcctgtgagggataagaatgtgtctgcttatagtaataacatcagaacctctttgtgaaattgcggcctttaatgtacattttaatgaaagggtgcattagtattgtacaggggtcttgtaaagtcatcaaaacttgctatgaactctaattgccatttgaagctactgattggcagtggctctactctaaaactgctttttagcaattgtatttttttcctgattatattttttaatgtactttgatgtttatgctgatgagttttttatgtacttttggtgatgtttcagtcttatgtactcttctgacgtcagaaaagtaccactggttgtttgcagtcttattgtgtaatcagcctaccgcaggcttccatgtataataaagtaattaatattgtgcaagtgtaaaacacttctgttataaaagcagtgtttggaaaataagaaatattaaaaatggttacaaagtattagttaatttccttttcccactttcctccctttagctttagcagctaaagggtcaccaacttgtcattgcaagattcttagaaaatgtacttaatcttaaatacgctgagtactaaaaagtgtttatttcttatttcagtaagtgcggtaagttctattgagtacagagtacaagctgtaatcaaaggatggagaggacctttaccactgtatctcttaagctgtatgatttttctccagtttgttttatacaggttttgaatttctttaacttttattgtgtgtactgaatactgcatatgtattattctgattgtttgctctagtttactaccaataaaagtcctgttaatcacaaaaaaaa

SEQ ID NO: 39233 - DNA, 4813 bp, Homo sapiens
ggatccgaattcgcggccgcgtcgactggagaggacggcgttatttttattaactggaggcgacggcggctgcggcggcggcgggacccgcctcctccggggtatgaaaatcggcagtgggttcctgagtggcggcggaggtaccggcagtagcggtggtagcggctccggcggcggtggtagtggcggcggcggcggcggcggcagcagcggcaggagggcagagatggaacccacctttccccagggtatggttatgttcaaccaccgtcttcccccggtcaccagcttcacccggccggcggggtcggccgcccctcccccgcaatgcgtgttatcctcctctacctccgcagccccggccgctgagcccccccctccgccagccccggacatgactttcaagaaggagccggcggcgtcagccgcggccttcccctcgcagaggacctcctgggggttcttgcagtctttggttagcatcaaacaggagaaacccgcggatcctgaggagcagcagtcccaccaccaccatcaccaccaccactatggggggctgttcgctggagctgaagagaggtctccaggcctaggaggcggtgaaggggggagtcacggcgtcatccaggacctcagtattctccaccagcatgtccagcagcaaccagcccagcaccaccgtgacgtattactcagcagcagtagcaggactgatgaccaccatggcactgaggagccaaagcaggacactaatgtcaaaaaggcaaaaaggccaaagccagaatctcagggaatcaaagccaagaggaagccaagtgcatcttccaaaccttctttggttggagatggagaaggtgccatcctctccccaagtcagaaacctcatatctgtgatcactgtagtgctgctttccgaagctcctatcacctgcggagacatgtcctcattcatacaggagaaagacctttccagtgcagccagtgtagtatgggtttcattcagaaatacctactacagagacatgagaaaattcatagtagagagaagccatttggatgtgatcagtgcagcatgaagtttattcagaagtaccatatggagagacacaagaggacacatagtggagaaaagccatataagtgtgacacttgccaacagtatttttcaaggactgatagattgttgaagcacaggcgcacatgtggtgaagtcatagttaaaggagccactagtgcagaacctgggtcatcaaaccataccaatatgggtaatctggctgtgttgtctcagggaaatacaagttcttcaaggagaaaaacaaagtcaaaaagcatagctattgaaaataaggaacagaagaccggtaaaacaaatgaatcgcaaatttcaaataatataaacatgcagagttactcagtagaaatgcctaccgtgtcttccagtggaggcataattggcactggaatagatgaactgcagaagagggtgccaaaattgatctttaagaaaggaagcagaaagaatacagataaaaactaccttaactttgtgtcaccattaccagacatagtaggacagaaatccttgtctggaaaaccaagtggctcacttggcatagtatcaaataatagtgtggagaccattggtcttctccaaagtacaagtggcaaacaaggtcagataagtagtaattatgatgatgccatgcagttttcaaagaaaagaagatatttaccaactgccagcagcaacagtgccttttctataaacgtaggacacatggtctcccaacagtctgtcattcagtctgcaggtgtcagtgttttggacaatgaggcaccattgtcacttattgactcctcagctctaaatgctgaaattaaatcttgtcatgacaagtctggaattcctgatgaggttttacaaagtattttggatcaatactccaacaaatcagaaagccagaaagaggatcctttcaatattgcagaaccacgagtggatttacacacctcaggagaacactcagaattggttcaagaagaaaatttgagcccaggcacccaaacaccttcaaatgataaagcaagtatgttgcaagaatactccaaatacctccaacaggcttttgaaaaatccactaatgcaagttttactcttggacacggtttccaatttgtcagtttgtcttcacctctccacaaccacactttgtttccagaaaaacaaatatacactacgtctcctttggagtgtggtttcggccaatctgttacctcagtgttgccatcttcattgccaaagcctccttttgggatgttgtttggatctcagccaggtctttatttgtctgctttggatgctacacatcagcagttgacaccttcccaggagctggatgatctgatagattctcagaagaacttagagacttcatcagccttccagtcctcatctcagaaattgactagccagaaggaacagaaaaacttagagtcttcaacaggctttcagattccatctcaggagttagctagccagatagatcctcagaaagacatagagcctagaacaacgtatcagattgagaactttgcacaagcgtttggttctcagtttaagtcgggcagcagggtgccaatgacctttatcactaactctaatggagaagtggaccatagagtaaggacttcagtgtcagatttctcagggtatacaaatatgatgtctgatgtaagtgagccatgtagtacaagagtaaagacacccaccagccagagttacaggtaaggtcccaaaagtggccaggctggaggtcttctaatgtaattttgttttattttgagaacactgccattggaatgtttctacacgatcctattaagaataatgtgatgccctttcaatgcaacttttcatatttagtttattttgttagcgtgattttagctctgtttgtattatgatttttaatcaaaatcaatagattaaaaatagtttgacattcaaagtgacaatgtttagcaatcaaatttacatgtatagatcgtcagggaatagcccaaatgttttaaacgcaaaaaaaaagacaaaaaaaaaccaaaaaaaaaaaacctacaaaaaaaactttgttgctaggattaaggttattctaattgctttactctcaggaaagtgtaataacgcatgggaattctgtacgttatcactgtaatggaatatccaatttacagatagtatgatatacatttcatcatttaagtaagggatcgaaaacatttcaaattgctctatctgggctgatagacatttcgtcatttaagtaagggatcgaagacatttcaaattgctatctccatctgggctgatccaaaattctgagattgttggctacctatattttgttgcagcttttaaatgtactctgaacttccaaaccacattcattccagcctggtagaacaaatattcttggatctttgatcaaagcctggaatgatagctttaataaaagaaggaaaaaaaaaaagcaccctctcttgatctcaactgtaacaaggctgtaattccatcaagcgattctactgacatctagtacagtgttgaagcccaagtggttggctggttccagtattagaactcaagttgaaattatatgattaactgaaatttggggcatgcattatttattatacatggcctacaacggttctgtctgcgctgttacgtattacctacacttctgggtttttttgttcttgttctcagcctctctttaagagttcttgggccttccttttccctctttctattttaacagttttaattttagaaccatttacattccagtaggtaattcactatgcgctttatatgccttagggcatccaaataaaaaacaatagggtaaacatccccaaaacccacctttaaaaaaaaaaaaacccatacagatttccatatgtaataaaaccccgtgttcttggatagatattaataaggttgtaattccaactggtgacataactcctgtgagggataagaatgtgtctgcttatagtaataacatcagaacctctttgtgaaattgcggcctttaatgtacattttaatgaaagggtgcattagtattgtacaggggtcttgtaaagtcatcaaaacttgctatgaactctaattgccatttgaagctactgattggcagtggctctactctaaaactgctttttagcaattgtatttttttcctgattatattttttaatgtactttgatgtttatgctgatgagttttttatgtacttttggtgatgtttcagtcttatgtactcttctgacgtcagaaaagtaccactggttgtttgcagtcttattgtgtaatcagcctaccgcaggcttccatgtataataaagtaattaatattgtgcaagtgtaaaacacttctgttataaaagcagtgtttggaaaataagaaatattaaaaatggttacaaagtattagttaatttccttttcccactttcctccctttagctttagcagctaaagggtcaccaacttgtcattgcaagattcttagaaaatgtacttaatcttaaatacgctgagtactaaagtacaagctgtaatcaaaggatggagaggacctttaccactgtatctcttaagctgtatgatttttctccagtttgttttatacaggttttgaatttctttaacttttattgtgtgtactgaatactgcatatgtattattctgattgtttgctctagtttactaccaataaaagtcctgttaatcacaaaaaaaa

SEQ ID NO: 39234 - DNA, 4809 bp, Homo sapiens
ggatccgaattcgcggccgcgtcgactggagaggacggcgttatttttattaactggaggcgacggcggctgcggcggcggcgggacccgcctcctccggggtatgaaaatcggcagtgggttcctgagtggcggcggaggtaccggcagtagcggtggtagcggctccggcggcggtggtagtggcggcggcggcggcggcggcagcagcggcaggagggcagagatggaacccacctttccccagggtatggttatgttcaaccaccgtcttcccccggtcaccagcttcacccggccggcggggtcggccgcccctcccccgcaatgcgtgttatcctcctctacctccgcagccccggccgctgagcccccccctccgccagccccggacatgactttcaagaaggagccggcggcgtcagccgcggccttcccctcgcagaggacctcctgggggttcttgcagtctttggttagcatcaaacaggagaaacccgcggatcctgaggagcagcagtcccaccaccaccatcaccaccaccactatggggggctgttcgctggagctgaagagaggtctccaggcctaggaggcggtgaaggggggagtcacggcgtcatccaggacctcagtattctccaccagcatgtccagcagcaaccagcccagcaccaccgtgacgtattactcagcagcagtagcaggactgatgaccaccatggcactgaggagccaaagcaggacactaatgtcaaaaaggcaaaaaggccaaagccagaatctcagggaatcaaagccaagaggaagccaagtgcatcttccaaaccttctttggttggagatggagaaggtgccatcctctccccaagtcagaaacctcatatctgtgatcactgtagtgctgctttccgaagctcctatcacctgcggagacatgtcctcattcatacaggagaaagacctttccagtgcagccagtgtagtatgggtttcattcagaaatacctactacagagacatgagaaaattcatagtagagagaagccatttggatgtgatcagtgcagcatgaagtttattcagaagtaccatatggagagacacaagaggacacatagtggagaaaagccatataagtgtgacacttgccaacagtatttttcaaggactgatagattgttgaagcacaggcgcacatgtggtgaagtcatagttaaaggagccactagtgcagaacctgggtcatcaaaccataccaatatgggtaatctggctgtgttgtctcagggaaatacaagttcttcaaggagaaaaacaaagtcaaaaagcatagctattgaaaataaggaacagaagaccggtaaaacaaatgaatcgcaaatttcaaataatataaacatgcagagttactcagtagaaatgcctaccgtgtcttccagtggaggcataattggcactggaatagatgaactgcagaagagggtgccaaaattgatctttaagaaaggaagcagaaagaatacagataaaaactaccttaactttgtgtcaccattaccagacatagtaggacagaaatccttgtctggaaaaccaagtggctcacttggcatagtatcaaataatagtgtggagaccattggtcttctccaaagtacaagtggcaaacaaggtcagataagtagtaattatgatgatgccatgcagttttcaaagaaaagaagatatttaccaactgccagcagcaacagtgccttttctataaacgtaggacacatggtctcccaacagtctgtcattcagtctgcaggtgtcagtgttttggacaatgaggcaccattgtcacttattgactcctcagctctaaatgctgaaattaaatcttgtcatgacaagtctggaattcctgatgaggttttacaaagtattttggatcaatactccaacaaatcagaaagccagaaagaggatcctttcaatattgcagaaccacgagtggatttacacacctcaggagaacactcagaattggttcaagaagaaaatttgagcccaggcacccaaacaccttcaaatgataaagcaagtatgttgcaagaatactccaaatacctccaacaggcttttgaaaaatccactaatgcaagttttactcttggacacggtttccaatttgtcagtttgtcttcacctctccacaaccacactttgtttccagaaaaacaaatatacactacgtctcctttggagtgtggtttcggccaatctgttacctcagtgttgccatcttcattgccaaagcctccttttgggatgttgtttggatctcagccaggtctttatttgtctgctttggatgctacacatcagcagttgacaccttcccaggagctggatgatctgatagattctcagaagaacttagagacttcatcagccttccagtcctcatctcagaaattgactagccagaaggaacagaaaaacttagagtcttcaacaggctttcagattccatctcaggagttagctagccagatagatcctcagaaagacatagagcctagaacaacgtatcagattgagaactttgcacaagcgtttggttctcagtttaagtcgggcagcagggtgccaatgacctttatcactaactctaatggagaagtggaccatagagtaaggacttcagtgtcagatttctcagggtatacaaatatgatgtctgatgtaagtgagccatgtagtacaagagtaaagacacccaccagccagagttacaggtaaggtcccaaaagtggccaggctggaggtcttctaatgtaattttgttttattttgagaacactgccattggaatgtttctacacgatcctattaagaataatgtgatgccctttcaatgcaacttttcatatttagtttattttgttagcgtgattttagctctgtttgtattatgatttttaatcaaaatcaatagattaaaaatagtttgacattcaaagtgacaatgtttagcaatcaaatttacatgtatagatcgtcagggaatagcccaaatgttttaaacgcaaaaaaaaagacaaaaaaaaaccaaaaaaaaaaaacctacaaaaaaaactttgttgctaggattaaggttattctaattgctttactctcaggaaagtgtaataacgcatgggaattctgtacgttatcactgtaatggaatatccaatttacagatagtatgatatacatttcatcatttaagtaagggatcgaaaacatttcaaattgctctatctgggctgatagacatttcgtcatttaagtaagggatcgaagacatttcaaattgctatctccatctgggctgatccaaaattctgagattgttggctacctatattttgttgcagcttttaaatgtactctgaacttccaaaccacattcattccagcctggtagaacaaatattcttggatctttgatcaaagcctggaatgatagctttaataaaagaaggaaaaaaaaaaagcaccctctcttgatctcaactgtaacaaggctgtaattccatcaagcgattctactgacatctagtacagtgttgaagcccaagtggttggctggttccagtattagaactcaagttgaaattatatgattaactgaaatttggggcatgcattatttattatacatggcctacaacggttctgtctgcgctgttacgtattacctacacttctgggtttttttgttcttgttctcagcctctctttaagagttcttgggccttccttttccctctttctattttaacagttttaattttagaaccatttacattccagtaggtaattcactatgcgctttatatgccttagggcatccaaataaaaaacaatagggtaaacatccccaaaacccacctttaaaaaaaaaaaaacccatacagatttccatatgtaataaaaccccgtgttcttggatagatattaataaggttgtaattccaactggtgacataactcctgtgagggataagaatgtgtctgcttatagtaataacatcagaacctctttgtgaaattgcggcctttaatgtacattttaatgaaagggtgcattagtattgtacaggggtcttgtaaagtcatcaaaacttgctatgaactctaattgccatttgaagctactgattggcagtggctctactctaaaactgctttttagcaattgtatttttttcctgattatattttttaatgtactttgatgtttatgctgatgagttttttatgtacttttggtgatgtttcagtcttatgtactcttctgacgtcagaaaagtaccactggttgtttgcagtcttattgtgtaatcagcctaccgcaggcttccatgtataataaagtaattaatattgtgcaagtgtaaaacacttctgttataaaagcagtgtttggaaaataagaaatattaaaaatggttacaaagtattagttaatttccttttcccactttcctccctttagctttagcagctaaagggtcaccaacttgtcattgcaagattcttagaaaatagtgcggtaagttctattgagtacagagtacaagctgtaatcaaaggatggagaggacctttaccactgtatctcttaagctgtatgatttttctccagtttgttttatacaggttttgaatttctttaacttttattgtgtgtactgaatactgcatatgtattattctgattgtttgctctagtttactaccaataaaagtcctgttaatcacaaaaaaaa

SEQ ID NO: 39235 - DNA, 4305 bp, Homo sapiens
cacgcgggcccgggctggtgctgggctggttgctgctggacatgctgggggagtcacggcgtcatccaggacctcagtattctccaccagcatgtccagcagcaaccagcccagcaccaccgtgacgtattactcagcagcagtagcaggactgatgaccaccatggcactgaggagccaaagcaggacactaatgtcaaaaaggcaaaaaggccaaagccagaatctcagggaatcaaagccaagaggaagccaagtgcatcttccaaaccttctttggttggagatggagaaggtgccatcctctccccaagtcagaaacctcatatctgtgatcactgtagtgctgctttccgaagctcctatcacctgcggagacatgtcctcattcatacaggagaaagacctttccagtgcagccagtgtagtatgggtttcattcagaaatacctactacagagacatgagaaaattcatagtagagagaagccatttggatgtgatcagtgcagcatgaagtttattcagaagtaccatatggagagacacaagaggacacatagtggagaaaagccatataagtgtgacacttgccaacagtatttttcaaggactgatagattgttgaagcacaggcgcacatgtggtgaagtcatagttaaaggagccactagtgcagaacctgggtcatcaaaccataccaatatgggtaatctggctgtgttgtctcagggaaatacaagttcttcaaggagaaaaacaaagtcaaaaagcatagctattgaaaataaggaacagaagaccggtaaaacaaatgaatcgcaaatttcaaataatataaacatgcagagttactcagtagaaatgcctaccgtgtcttccagtggaggcataattggcactggaatagatgaactgcagaagagggtgccaaaattgatctttaagaaaggaagcagaaagaatacagataaaaactaccttaactttgtgtcaccattaccagacatagtaggacagaaatccttgtctggaaaaccaagtggctcacttggcatagtatcaaataatagtgtggagaccattggtcttctccaaagtacaagtggcaaacaaggtcagataagtagtaattatgatgatgccatgcagttttcaaagaaaagaagatatttaccaactgccagcagcaacagtgccttttctataaacgtaggacacatggtctcccaacagtctgtcattcagtctgcaggtgtcagtgttttggacaatgaggcaccattgtcacttattgactcctcagctctaaatgctgaaattaaatcttgtcatgacaagtctggaattcctgatgaggttttacaaagtattttggatcaatactccaacaaatcagaaagccagaaagaggatcctttcaatattgcagaaccacgagtggatttacacacctcaggagaacactcagaattggttcaagaagaaaatttgagcccaggcacccaaacaccttcaaatgataaagcaagtatgttgcaagaatactccaaatacctccaacaggcttttgaaaaatccactaatgcaagttttactcttggacacggtttccaatttgtcagtttgtcttcacctctccacaaccacactttgtttccagaaaaacaaatatacactacgtctcctttggagtgtggtttcggccaatctgttacctcagtgttgccatcttcattgccaaagcctccttttgggatgttgtttggatctcagccaggtctttatttgtctgctttggatgctacacatcagcagttgacaccttcccaggagctggatgatctgatagattctcagaagaacttagagacttcatcagccttccagtcctcatctcagaaattgactagccagaaggaacagaaaaacttagagtcttcaacaggctttcagattccatctcaggagttagctagccagatagatcctcagaaagacatagagcctagaacaacgtatcagattgagaactttgcacaagcgtttggttctcagtttaagtcgggcagcagggtgccaatgacctttatcactaactctaatggagaagtggaccatagagtaaggacttcagtgtcagatttctcagggtatacaaatatgatgtctgatgtaagtgagccatgtagtacaagagtaaagacacccaccagccagagttacaggtaaggtcccaaaagtggccaggctggaggtcttctaatgtaattttgttttattttgagaacactgccattggaatgtttctacacgatcctattaagaataatgtgatgccctttcaatgcaacttttcatatttagtttattttgttagcgtgattttagctctgtttgtattatgatttttaatcaaaatcaatagattaaaaatagtttgacattcaaagtgacaatgtttagcaatcaaatttacatgtatagatcgtcagggaatagcccaaatgttttaaacgcaaaaaaaaagacaaaaaaaaaccaaaaaaaaaaaacctacaaaaaaaactttgttgctaggattaaggttattctaattgctttactctcaggaaagtgtaataacgcatgggaattctgtacgttatcactgtaatggaatatccaatttacagatagtatgatatacatttcatcatttaagtaagggatcgaaaacatttcaaattgctctatctgggctgatagacatttcgtcatttaagtaagggatcgaagacatttcaaattgctatctccatctgggctgatccaaaattctgagattgttggctacctatattttgttgcagcttttaaatgtactctgaacttccaaaccacattcattccagcctggtagaacaaatattcttggatctttgatcaaagcctggaatgatagctttaataaaagaaggaaaaaaaaaaagcaccctctcttgatctcaactgtaacaaggctgtaattccatcaagcgattctactgacatctagtacagtgttgaagcccaagtggttggctggttccagtattagaactcaagttgaaattatatgattaactgaaatttggggcatgcattatttattatacatggcctacaacggttctgtctgcgctgttacgtattacctacacttctgggtttttttgttcttgttctcagcctctctttaagagttcttgggccttccttttccctctttctattttaacagttttaattttagaaccatttacattccagtaggtaattcactatgcgctttatatgccttagggcatccaaataaaaaacaatagggtaaacatccccaaaacccacctttaaaaaaaaaaaaacccatacagatttccatatgtaataaaaccccgtgttcttggatagatattaataaggttgtaattccaactggtgacataactcctgtgagggataagaatgtgtctgcttatagtaataacatcagaacctctttgtgaaattgcggcctttaatgtacattttaatgaaagggtgcattagtattgtacaggggtcttgtaaagtcatcaaaacttgctatgaactctaattgccatttgaagctactgattggcagtggctctactctaaaactgctttttagcaattgtatttttttcctgattatattttttaatgtactttgatgtttatgctgatgagttttttatgtacttttggtgatgtttcagtcttatgtactcttctgacgtcagaaaagtaccactggttgtttgcagtcttattgtgtaatcagcctaccgcaggcttccatgtataataaagtaattaatattgtgcaagtgtaaaacacttctgttataaaagcagtgtttggaaaataagaaatattaaaaatggttacaaagtattagttaatttccttttcccactttcctccctttagctttagcagctaaagggtcaccaacttgtcattgcaagattcttagaaaatgtacttaatcttaaatacgctgagtactaaaaagtgtttatttcttatttcagtaagtgcggtaagttctattgagtacagagtacaagctgtaatcaaaggatggagaggacctttaccactgtatctcttaagctgtatgatttttctccagtttgttttatacaggttttgaatttctttaacttttattgtgtgtactgaatactgcatatgtattattctgattgtttgctctagtttactaccaataaaagtcctgttaatcacaaaaaaaa

SEQ ID NO: 39236 - DNA, 4756 bp, Homo sapiens
ggatccgaattcgcggccgcgtcgactggagaggacggcgttatttttattaactggaggcgacggcggctgcggcggcggcgggacccgcctcctccggggtatgaaaatcggcagtgggttcctgagtggcggcggaggtaccggcagtagcggtggtagcggctccggcggcggtggtagtggcggcggcggcggcggcggcagcagcggcaggagggcagagatggaacccacctttccccaggccccggccgctgagcccccccctccgccagccccggacatgactttcaagaaggagccggcggcgtcagccgcggccttcccctcgcagaggacctcctgggggttcttgcagtctttggttagcatcaaacaggagaaacccgcggatcctgaggagcagcagtcccaccaccaccatcaccaccaccactatggggggctgttcgctggagctgaagagaggtctccaggcctaggaggcggtgaaggggggagtcacggcgtcatccaggacctcagtattctccaccagcatgtccagcagcaaccagcccagcaccaccgtgacgtattactcagcagcagtagcaggactgatgaccaccatggcactgaggagccaaagcaggacactaatgtcaaaaaggcaaaaaggccaaagccagaatctcagggaatcaaagccaagaggaagccaagtgcatcttccaaaccttctttggttggagatggagaaggtgccatcctctccccaagtcagaaacctcatatctgtgatcactgtagtgctgctttccgaagctcctatcacctgcggagacatgtcctcattcatacaggagaaagacctttccagtgcagccagtgtagtatgggtttcattcagaaatacctactacagagacatgagaaaattcatagtagagagaagccatttggatgtgatcagtgcagcatgaagtttattcagaagtaccatatggagagacacaagaggacacatagtggagaaaagccatataagtgtgacacttgccaacagtatttttcaaggactgatagattgttgaagcacaggcgcacatgtggtgaagtcatagttaaaggagccactagtgcagaacctgggtcatcaaaccataccaatatgggtaatctggctgtgttgtctcagggaaatacaagttcttcaaggagaaaaacaaagtcaaaaagcatagctattgaaaataaggaacagaagaccggtaaaacaaatgaatcgcaaatttcaaataatataaacatgcagagttactcagtagaaatgcctaccgtgtcttccagtggaggcataattggcactggaatagatgaactgcagaagagggtgccaaaattgatctttaagaaaggaagcagaaagaatacagataaaaactaccttaactttgtgtcaccattaccagacatagtaggacagaaatccttgtctggaaaaccaagtggctcacttggcatagtatcaaataatagtgtggagaccattggtcttctccaaagtacaagtggcaaacaaggtcagataagtagtaattatgatgatgccatgcagttttcaaagaaaagaagatatttaccaactgccagcagcaacagtgccttttctataaacgtaggacacatggtctcccaacagtctgtcattcagtctgcaggtgtcagtgttttggacaatgaggcaccattgtcacttattgactcctcagctctaaatgctgaaattaaatcttgtcatgacaagtctggaattcctgatgaggttttacaaagtattttggatcaatactccaacaaatcagaaagccagaaagaggatcctttcaatattgcagaaccacgagtggatttacacacctcaggagaacactcagaattggttcaagaagaaaatttgagcccaggcacccaaacaccttcaaatgataaagcaagtatgttgcaagaatactccaaatacctccaacaggcttttgaaaaatccactaatgcaagttttactcttggacacggtttccaatttgtcagtttgtcttcacctctccacaaccacactttgtttccagaaaaacaaatatacactacgtctcctttggagtgtggtttcggccaatctgttacctcagtgttgccatcttcattgccaaagcctccttttgggatgttgtttggatctcagccaggtctttatttgtctgctttggatgctacacatcagcagttgacaccttcccaggagctggatgatctgatagattctcagaagaacttagagacttcatcagccttccagtcctcatctcagaaattgactagccagaaggaacagaaaaacttagagtcttcaacaggctttcagattccatctcaggagttagctagccagatagatcctcagaaagacatagagcctagaacaacgtatcagattgagaactttgcacaagcgtttggttctcagtttaagtcgggcagcagggtgccaatgacctttatcactaactctaatggagaagtggaccatagagtaaggacttcagtgtcagatttctcagggtatacaaatatgatgtctgatgtaagtgagccatgtagtacaagagtaaagacacccaccagccagagttacaggtaaggtcccaaaagtggccaggctggaggtcttctaatgtaattttgttttattttgagaacactgccattggaatgtttctacacgatcctattaagaataatgtgatgccctttcaatgcaacttttcatatttagtttattttgttagcgtgattttagctctgtttgtattatgatttttaatcaaaatcaatagattaaaaatagtttgacattcaaagtgacaatgtttagcaatcaaatttacatgtatagatcgtcagggaatagcccaaatgttttaaacgcaaaaaaaaagacaaaaaaaaaccaaaaaaaaaaaacctacaaaaaaaactttgttgctaggattaaggttattctaattgctttactctcaggaaagtgtaataacgcatgggaattctgtacgttatcactgtaatggaatatccaatttacagatagtatgatatacatttcatcatttaagtaagggatcgaaaacatttcaaattgctctatctgggctgatagacatttcgtcatttaagtaagggatcgaagacatttcaaattgctatctccatctgggctgatccaaaattctgagattgttggctacctatattttgttgcagcttttaaatgtactctgaacttccaaaccacattcattccagcctggtagaacaaatattcttggatctttgatcaaagcctggaatgatagctttaataaaagaaggaaaaaaaaaaagcaccctctcttgatctcaactgtaacaaggctgtaattccatcaagcgattctactgacatctagtacagtgttgaagcccaagtggttggctggttccagtattagaactcaagttgaaattatatgattaactgaaatttggggcatgcattatttattatacatggcctacaacggttctgtctgcgctgttacgtattacctacacttctgggtttttttgttcttgttctcagcctctctttaagagttcttgggccttccttttccctctttctattttaacagttttaattttagaaccatttacattccagtaggtaattcactatgcgctttatatgccttagggcatccaaataaaaaacaatagggtaaacatccccaaaacccacctttaaaaaaaaaaaaacccatacagatttccatatgtaataaaaccccgtgttcttggatagatattaataaggttgtaattccaactggtgacataactcctgtgagggataagaatgtgtctgcttatagtaataacatcagaacctctttgtgaaattgcggcctttaatgtacattttaatgaaagggtgcattagtattgtacaggggtcttgtaaagtcatcaaaacttgctatgaactctaattgccatttgaagctactgattggcagtggctctactctaaaactgctttttagcaattgtatttttttcctgattatattttttaatgtactttgatgtttatgctgatgagttttttatgtacttttggtgatgtttcagtcttatgtactcttctgacgtcagaaaagtaccactggttgtttgcagtcttattgtgtaatcagcctaccgcaggcttccatgtataataaagtaattaatattgtgcaagtgtaaaacacttctgttataaaagcagtgtttggaaaataagaaatattaaaaatggttacaaagtattagttaatttccttttcccactttcctccctttagctttagcagctaaagggtcaccaacttgtcattgcaagattcttagaaaatgtacttaatcttaaatacgctgagtactaaaaagtgtttatttcttatttcagtaagtgcggtaagttctattgagtacagagtacaagctgtaatcaaaggatggagaggacctttaccactgtatctcttaagctgtatgatttttctccagtttgttttatacaggttttgaatttctttaacttttattgtgtgtactgaatactgcatatgtattattctgattgtttgctctagtttactaccaataaaagtcctgttaatcacaaaaaaaa

SEQ ID NO: 39237 - DNA, 4844 bp, Homo sapiens
ggatccgaattcgcggccgcgtcgactggagaggacggcgttatttttattaactggaggcgacggcggctgcggcggcggcgggacccgcctcctccggggtatgaaaatcggcagtgggttcctgagtggcggcggaggtaccggcagtagcggtggtagcggctccggcggcggtggtagtggcggcggcggcggcggcggcagcagcggcaggagggcagagatggaacccacctttccccagggtatggttatgttcaaccaccgtcttcccccggtcaccagcttcacccggccggcggggtcggccgcccctcccccgcaatgcgtgttatcctcctctacctccgcagccccggccgctgagcccccccctccgccagccccggacatgactttcaagaaggagccggcggcgtcagccgcggccttcccctcgcagaggacctcctgggggttcttgcagtctttggttagcatcaaacaggagaaacccgcggatcctgaggagcagcagtcccaccaccaccatcaccaccaccactatggggggctgttcgctggagctgaagagaggtctccaggcctaggaggcggtgaaggggggagtcacggcgtcatccaggacctcagtattctccaccagcatgtccagcagcaaccagcccagcaccaccgtgacgtattactcagcagcagtagcaggactgatgaccaccatggcactgaggagccaaagcaggacactaatgtcaaaaaggcaaaaaggccaaagccagaatctcagggaatcaaagccaagaggaagccaagtgcatcttccaaaccttctttggttggagatggagaaggtgccatcctctccccaagtcagaaacctcatatctgtgatcactgtagtgctgctttccgaagctcctatcacctgcggagacatgtcctcattcatacaggagaaagacctttccagtgcagccagtgtagtatgggtttcattcagaaatacctactacagagacatgagaaaattcatagtagagagaagccatttggatgtgatcagtgcagcatgaagtttattcagaagtaccatatggagagacacaagaggacacatagtggagaaaagccatataagtgtgacacttgccaacagtatttttcaaggactgatagattgttgaagcacaggcgcacatgtggtgaagtcatagttaaaggagccactagtgcagaacctgggtcatcaaaccataccaatatgggtaatctggctgtgttgtctcagggaaatacaagttcttcaaggagaaaaacaaagtcaaaaagcatagctattgaaaataaggaacagaagaccggtaaaacaaatgaatcgcaaatttcaaataatataaacatgcagagttactcagtagaaatgcctaccgtgtcttccagtggaggcataattggcactggaatagatgaactgcagaagagggtgccaaaattgatctttaagaaaggaagcagaaagaatacagataaaaactaccttaactttgtgtcaccattaccagacatagtaggacagaaatccttgtctggaaaaccaagtggctcacttggcatagtatcaaataatagtgtggagaccattggtcttctccaaagtacaagtggcaaacaaggtcagataagtagtaattatgatgatgccatgcagttttcaaagaaaagaagatatttaccaactgccagcagcaacagtgccttttctataaacgtaggacacatggtctcccaacagtctgtcattcagtctgcaggtgtcagtgttttggacaatgaggcaccattgtcacttattgactcctcagctctaaatgctgaaattaaatcttgtcatgacaagtctggaattcctgatgaggttttacaaagtattttggatcaatactccaacaaatcagaaagccagaaagaggatcctttcaatattgcagaaccacgagtggatttacacacctcaggagaacactcagaattggttcaagaagaaaatttgagcccaggcacccaaacaccttcaaatgataaagcaagtatgttgcaagaatactccaaatacctccaacaggcttttgaaaaatccactaatgcaagttttactcttggacacggtttccaatttgtcagtttgtcttcacctctccacaaccacactttgtttccagaaaaacaaatatacactacgtctcctttggagtgtggtttcggccaatctgttacctcagtgttgccatcttcattgccaaagcctccttttgggatgttgtttggatctcagccaggtctttatttgtctgctttggatgctacacatcagcagttgacaccttcccaggagctggatgatctgatagattctcagaagaacttagagacttcatcagccttccagtcctcatctcagaaattgactagccagaaggaacagaaaaacttagagtcttcaacaggctttcagattccatctcaggagttagctagccagatagatcctcagaaagacatagagcctagaacaacgtatcagattgagaactttgcacaagcgtttggttctcagtttaagtcgggcagcagggtgccaatgacctttatcactaactctaatggagaagtggaccatagagtaaggacttcagtgtcagatttctcagggtatacaaatatgatgtctgatgtaagtgagccatgtagtacaagagtaaagacacccaccagccagagttacaggtaaggtcccaaaagtggccaggctggaggtcttctaatgtaattttgttttattttgagaacactgccattggaatgtttctacacgatcctattaagaataatgtgatgccctttcaatgcaacttttcatatttagtttattttgttagcgtgattttagctctgtttgtattatgatttttaatcaaaatcaatagattaaaaatagtttgacattcaaagtgacaatgtttagcaatcaaatttacatgtatagatcgtcagggaatagcccaaatgttttaaacgcaaaaaaaaagacaaaaaaaaaccaaaaaaaaaaaacctacaaaaaaaactttgttgctaggattaaggttattctaattgctttactctcaggaaagtgtaataacgcatgggaattctgtacgttatcactgtaatggaatatccaatttacagatagtatgatatacatttcatcatttaagtaagggatcgaaaacatttcaaattgctctatctgggctgatagacatttcgtcatttaagtaagggatcgaagacatttcaaattgctatctccatctgggctgatccaaaattctgagattgttggctacctatattttgttgcagcttttaaatgtactctgaacttccaaaccacattcattccagcctggtagaacaaatattcttggatctttgatcaaagcctggaatgatagctttaataaaagaaggaaaaaaaaaaagcaccctctcttgatctcaactgtaacaaggctgtaattccatcaagcgattctactgacatctagtacagtgttgaagcccaagtggttggctggttccagtattagaactcaagttgaaattatatgattaactgaaatttggggcatgcattatttattatacatggcctacaacggttctgtctgcgctgttacgtattacctacacttctgggtttttttgttcttgttctcagcctctctttaagagttcttgggccttccttttccctctttctattttaacagttttaattttagaaccatttacattccagtaggtaattcactatgcgctttatatgccttagggcatccaaataaaaaacaatagggtaaacatccccaaaacccacctttaaaaaaaaaaaaacccatacagatttccatatgtaataaaaccccgtgttcttggatagatattaataaggttgtaattccaactggtgacataactcctgtgagggataagaatgtgtctgcttatagtaataacatcagaacctctttgtgaaattgcggcctttaatgtacattttaatgaaagggtgcattagtattgtacaggggtcttgtaaagtcatcaaaacttgctatgaactctaattgccatttgaagctactgattggcagtggctctactctaaaactgctttttagcaattgtatttttttcctgattatattttttaatgtactttgatgtttatgctgatgagttttttatgtacttttggtgatgtttcagtcttatgtactcttctgacgtcagaaaagtaccactggttgtttgcagtcttattgtgtaatcagcctaccgcaggcttccatgtataataaagtaattaatattgtgcaagtgtaaaacacttctgttataaaagcagtgtttggaaaataagaaatattaaaaatggttacaaagtattagttaatttccttttcccactttcctccctttagctttagcagctaaagggtcaccaacttgtcattgcaagattcttagaaaatgtacttaatcttaaatacgctgagtactaaaaagtgtttatttcttatttcagtaagtgcggtaagttctattgagtacagagtacaagctgtaatcaaaggatggagaggacctttaccactgtatctcttaagctgtatgatttttctccagtttgttttatacaggttttgaatttctttaacttttattgggggacctaaacctgaaaggataattcgatgggtgccctagtaaaccaaaaaagcctggaatcc

SEQ ID NO: 39238 - DNA, 4886 bp, Homo sapiens
acactgcgccgcggctgcgcagtacacgggaggcttttaattccattgtggagaggacggcgttatttttattaactggaggcgacggcggctgcggcggcggcgggacccgcctcctccggggtatgaaaatcggcagtgggttcctgagtggcggcggaggtaccggcagtagcggtggtagcggctccggcggcggtggtagtggcggcggcggcggcggcggcagcagcggcaggagggcagagatggaacccacctttccccagggtatggttatgttcaaccaccgtcttcccccggtcaccagcttcacccggccggcggggtcggccgcccctcccccgcaatgcgtgttatcctcctctacctccgcagccccggccgctgagcccccccctccgccagccccggacatgactttcaagaaggagccggcggcgtcagccgcggccttcccctcgcagaggacctcctgggggttcttgcagtctttggttagcatcaaacaggagaaacccgcggatcctgaggagcagcagtcccaccaccaccatcaccaccaccactatggggggctgttcgctggagctgaagagaggtctccaggcctaggaggcggtgaaggggggagtcacggcgtcatccaggacctcagtattctccaccagcatgtccagcagcaaccagcccagcaccaccgtgacgtattactcagcagcagtagcaggactgatgaccaccatggcactgaggagccaaagcaggacactaatgtcaaaaaggcaaaaaggccaaagccagaatctcagggaatcaaagccaagaggaagccaagtgcatcttccaaaccttctttggttggagatggagaaggtgccatcctctccccaagtcagaaacctcatatctgtgatcactgtagtgctgctttccgaagctcctatcacctgcggagacatgtcctcattcatacaggagaaagacctttccagtgcagccagtgtagtatgggtttcattcagaaatacctactacagagacatgagaaaattcatagtagagagaagccatttggatgtgatcagtgcagcatgaagtttattcagaagtaccatatggagagacacaagaggacacatagtggagaaaagccatataagtgtgacacttgccaacagtatttttcaaggactgatagattgttgaagcacaggcgcacatgtggtgaagtcatagttaaaggagccactagtgcagaacctgggtcatcaaaccataccaatatgggtaatctggctgtgttgtctcagggaaatacaagttcttcaaggagaaaaacaaagtcaaaaagcatagctattgaaaataaggaacagaagaccggtaaaacaaatgaatcgcaaatttcaaataatataaacatgcagagttactcagtagaaatgcctaccgtgtcttccagtggaggcataattggcactggaatagatgaactgcagaagagggtgccaaaattgatctttaagaaaggaagcagaaagaatacagataaaaactaccttaactttgtgtcaccattaccagacatagtaggacagaaatccttgtctggaaaaccaagtggctcacttggcatagtatcaaataatagtgtggagaccattggtcttctccaaagtacaagtggcaaacaaggtcagataagtagtaattatgatgatgccatgcagttttcaaagaaaagaagatatttaccaactgccagcagcaacagtgccttttctataaacgtaggacacatggtctcccaacagtctgtcattcagtctgcaggtgtcagtgttttggacaatgaggcaccattgtcacttattgactcctcagctctaaatgctgaaattaaatcttgtcatgacaagtctggaattcctgatgaggttttacaaagtattttggatcaatactccaacaaatcagaaagccagaaagaggatcctttcaatattgcagaaccacgagtggatttacacacctcaggagaacactcagaattggttcaagaagaaaatttgagcccaggcacccaaacaccttcaaatgataaagcaagtatgttgcaagaatactccaaatacctccaacaggcttttgaaaaatccactaatgcaagttttactcttggacacggtttccaatttgtcagtttgtcttcacctctccacaaccacactttgtttccagaaaaacaaatatacactacgtctcctttggagtgtggtttcggccaatctgttacctcagtgttgccatcttcattgccaaagcctccttttgggatgttgtttggatctcagccaggtctttatttgtctgctttggatgctacacatcagcagttgacaccttcccaggagctggatgatctgatagattctcagaagaacttagagacttcatcagccttccagtcctcatctcagaaattgactagccagaaggaacagaaaaacttagagtcttcaacaggctttcagattccatctcaggagttagctagccagatagatcctcagaaagacatagagcctagaacaacgtatcagattgagaactttgcacaagcgtttggttctcagtttaagtcgggcagcagggtgccaatgacctttatcactaactctaatggagaagtggaccatagagtaaggacttcagtgtcagatttctcagggtatacaaatatgatgtctgatgtaagtgagccatgtagtacaagagtaaagacacccaccagccagagttacaggtaaggtcccaaaagtggccaggctggaggtcttctaatgtaattttgttttattttgagaacactgccattggaatgtttctacacgatcctattaagaataatgtgatgccctttcaatgcaacttttcatatttagtttattttgttagcgtgattttagctctgtttgtattatgatttttaatcaaaatcaatagattaaaaatagtttgacattcaaagtgacaatgtttagcaatcaaatttacatgtatagatcgtcagggaatagcccaaatgttttaaacgcaaaaaaaaagacaaaaaaaaaccaaaaaaaaaaaacctacaaaaaaaactttgttgctaggattaaggttattctaattgctttactctcaggaaagtgtaataacgcatgggaattctgtacgttatcactgtaatggaatatccaatttacagatagtatgatatacatttcatcatttaagtaagggatcgaaaacatttcaaattgctctatctgggctgatagacatttcgtcatttaagtaagggatcgaagacatttcaaattgctatctccatctgggctgatccaaaattctgagattgttggctacctatattttgttgcagcttttaaatgtactctgaacttccaaaccacattcattccagcctggtagaacaaatattcttggatctttgatcaaagcctggaatgatagctttaataaaagaaggaaaaaaaaaaagcaccctctcttgatctcaactgtaacaaggctgtaattccatcaagcgattctactgacatctagtacagtgttgaagcccaagtggttggctggttccagtattagaactcaagttgaaattatatgattaactgaaatttggggcatgcattatttattatacatggcctacaacggttctgtctgcgctgttacgtattacctacacttctgggtttttttgttcttgttctcagcctctctttaagagttcttgggccttccttttccctctttctattttaacagttttaattttagaaccatttacattccagtaggtaattcactatgcgctttatatgccttagggcatccaaataaaaaacaatagggtaaacatccccaaaacccacctttaaaaaaaaaaaaacccatacagatttccatatgtaataaaaccccgtgttcttggatagatattaataaggttgtaattccaactggtgacataactcctgtgagggataagaatgtgtctgcttatagtaataacatcagaacctctttgtgaaattgcggcctttaatgtacattttaatgaaagggtgcattagtattgtacaggggtcttgtaaagtcatcaaaacttgctatgaactctaattgccatttgaagctactgattggcagtggctctactctaaaactgctttttagcaattgtatttttttcctgattatattttttaatgtactttgatgtttatgctgatgagttttttatgtacttttggtgatgtttcagtcttatgtactcttctgacgtcagaaaagtaccactggttgtttgcagtcttattgtgtaatcagcctaccgcaggcttccatgtataataaagtaattaatattgtgcaagtgtaaaacacttctgttataaaagcagtgtttggaaaataagaaatattaaaaatggttacaaagtattagttaatttccttttcccactttcctccctttagctttagcagctaaagggtcaccaacttgtcattgcaagattcttagaaaatgtacttaatcttaaatacgctgagtactaaaaagtgtttatttcttatttcagtaagtgcggtaagttctattgagtacagagtacaagctgtaatcaaaggatggagaggacctttaccactgtatctcttaagctgtatgatttttctccagtttgttttatacaggttttgaatttctttaacttttattgtgtgtactgaatactgcatatgtattattctgattgtttgctctagtttactaccaataaaagtcctgttaatcacaaaaaaaa

SEQ ID NO: 39239 - DNA, 3644 bp, Homo sapiens
ggatccgaattcgcggccgcgtcgactggagaggacggcgttatttttattaactggaggcgacggcggctgcggcggcggcgggacccgcctcctccggggtatgaaaatcggcagtgggttcctgagtggcggcggaggtaccggcagtagcggtggtagcggctccggcggcggtggtagtggcggcggcggcggcggcggcagcagcggcaggagggcagagatggaacccacctttccccagggtatggttatgttcaaccaccgtcttcccccggtcaccagcttcacccggccggcggggtcggccgcccctcccccgcaatgcgtgttatcctcctctacctccgcagccccggccgctgagcccccccctccgccagccccggacatgactttcaagaaggagccggcggcgtcagccgcggccttcccctcgcagaggacctcctgggggttcttgcagtctttggttagcatcaaacaggagaaacccgcggatcctgaggagcagcagtcccaccaccaccatcaccaccaccactatggggggctgttcgctggagctgaagagaggtctccaggcctaggaggcggtgaaggggggagtcacggcgtcatccaggacctcagtattctccaccagcatgtccagcagcaaccagcccagcaccaccgtgacgtattactcagcagcagtagcaggactgatgaccaccatggcactgaggagccaaagcaggacactaatgtcaaaaaggcaaaaaggccaaagccagaatctcagggaatcaaagccaagaggaagccaagtgcatcttccaaaccttctttggttggagatggagaaggtgccatcctctccccaagtcagaaacctcatatctgtgatcactgtagtgctgctttccgaagctcctatcacctgcggagacatgtcctcattcatacaggagaaagacctttccagtgcagccagtgtagtatgggtttcattcagaaatacctactacagagacatgagaaaattcatagtagagagaagccatttggatgtgatcagtgcagcatgaagtttattcagaagtaccatatggagagacacaagaggacacatagtggagaaaagccatataagtgtgacacttgccaacagtatttttcaaggactgatagattgttgaagcacaggcgcacatgtggtgaagtcatagttaaaggagccactagtgcagaacctgggtcatcaaaccataccaatatgggtaatctggctgtgttgtctcagggaaatacaagttcttcaaggagaaaaacaaagtcaaaaagcatagctattgaaaataaggaacagaagaccggtaaaacaaatgaatcgcaaatttcaaataatataaacatgcagagttactcagtagaaatgcctaccgtgtcttccagtggaggcataattggcactggaatagatgaactgcagaagagggtgccaaaattgatctttaagaaaggaagcagaaagaatacagataaaaactaccttaactttgtgtcaccattaccagacatagtaggacagaaatccttgtctggaaaaccaagtggctcacttggcatagtatcaaataatagtgtggagaccattggtcttctccaaagtacaagtggcaaacaaggtcagataagtagtaattatgatgatgccatgcagttttcaaagaaaagaagatatttaccaactgccagcagcaacagtgccttttctataaacgtaggacacatggtctcccaacagtctgtcattcagtctgcaggtgtcagtgttttggacaatgaggcaccattgtcacttattgactcctcagctctaaatgctgaaattaaatcttgtcatgacaagtctggaattcctgatgaggttttacaaagtattttggatcaatactccaacaaatcagaaagccagaaagaggatcctttcaatattgcagaaccacgagtggatttacacacctcaggagaacactcagaattggttcaagaagaaaatttgagcccaggcacccaaacaccttcaaatgataaagcaagtatgttgcaagaatactccaaatacctccaacaggcttttgaaaaatccactaatgcaagttttactcttggacacggtttccaatttgtcagtttgtcttcacctctccacaaccacactttgtttccagaaaaacaaatatacactacgtctcctttggagtgtggtttcggccaatctgttacctcagtgttgccatcttcattgccaaagcctccttttgggatgttgtttggatctcagccaggtctttatttgtctgctttggatgctacacatcagcagttgacaccttcccaggagctggatgatctgatagattctcagaagaacttagagacttcatcagccttccagtcctcatctcagaaattgactagccagaaggaacagaaaaacttagagtcttcaacaggctttcagattccatctcaggagttagctagccagatagatcctcagaaagacatagagcctagaacaacgtatcagattgagaactttgcacaagcgtttggttctcagtttaagtcgggcagcagggtgccaatgacctttatcactaactctaatggagaagtggaccatagagtaaggacttcagtgtcagatttctcagggtatacaaatatgatgtctgatgtaagtgagccatgtagtacaagagtaaagacacccaccagccagagttacaggtaaggtcccaaaagtggccaggctggaggtcttctaatgtaattttgttttattttgagaacactgccattggaatgtttctacacgatcctattaagaataatgtgatgccctttcaatgcaacttttcatatttagtttattttgttagcgtgattttagctctgtttgtattatgatttttaatcaaaatcaatagattaaaaatagtttgacattcaaagtgacaatgtttagcaatcaaatttacatgtatagatcgtcagggaatagcccaaatgttttaaacgcaaaaaaaaagacaaaaaaaaaccaaaaaaaaaaaacctacaaaaaaaacctcttggtggcaaggggataaagggtaaatccaaattgggcttaacctctccaggagaagggtgtaattaccgcgctgggaaatcctggtagcggtaatcactggtaggggattattcccaattataccaggataggttgtggatatactttccatcatttaacggtacgggatctcgaaacctttccaattgggctcatatctgggagctggataagacatttccggccattttaacacgataggggcgatccagacgagaccttttccaaagttgggctattctcccaattcgtggggttggatccaaaaaattttctggagaattgtggtggctaaccccaattatctgggtgcgcggctttaccaagtggtcctctggaaatttccaaaagccaatttcaattcccacggcttgggtagaacaaaatattttttgggcaccttggatccaaggccttggaatgtatagtttaattacacgacgggaaaaaaaaaggacccttcttgtgatac

SEQ ID NO: 39240 - DNA, 771 bp, Homo sapiens
  misc_feature (771)..(771): n is a, c, g, or t
ggatccgaattcgcggccgcgtcgactggagaggacggcgttatttttattaactggaggcgacggcggctgcggcggcggcgggacccgcctcctccggggtatgaaaatcggcagtgggttcctgagtggcggcggaggtaccggcagtagcggtggtagcggctccggcggcggtggtagtggcggcggcggcggcggcggcagcagcggcaggagggcagagatggaacccacctttccccagggtatggttatgttcaaccaccgtcttcccccggtcaccagcttcacccggccggcggggtcggccgcccctcccccgcaatgcgtgttatcctcctctacctccgcagccccggccgctgagcccccccctccgccagccccggacatgactttcaagaaggagccggcggcgtcagccgcggccttcccctcgcagaggacctcctgggggttcttgcagtctttggttagcatcaaacaggagaaacccgcggatcctgaggagcagcagtcccaccaccaccatcaccaccaccactatggggggctgttcgctggagctgaagagaggtctccaggcctaggaggcggtgaaggggggagtcacggcgtcatccaggacctcagtattctccaccagcatgtccagcagcaaccagcccagcaccaccgtgacgtattactcagcagcagtagcaggactgatgaccaccatggcactgaggagccaaagcaggacacttgtcaggctcttccccttcn

SEQ ID NO: 39241 - DNA, 594 bp, Homo sapiens
atggcagcggccgccagccccgcgatccttccgcgcctcgcgattcttccgtacctgctattcgactggtccgggacggggcgggccggtgagttcggggatggagcctaagcggggcgggggccaaacctggggggctgtggactgcagcgggtttcagaggagggaagccttctagaaggaccggcgcgatctccccggactgcccccacgctcagttccgattcgctgctctttttcgccaggtccgcttcctgcggctgctgcttgccctgcagagcaggaggggggtcaaagaaggcgaaaaaagaaccgcaggagggtggaggggccaaaaagctgcagagggcgaggtggggaggggatccctggtgcaaccccgcagccccactcgtcctcgggaaggagaaaccagagcccccggaacccgagctggggtcaagacatgggtgacgccagcgtcatatagaatagtcactaagcagacaggagtcagcaaaccctttctagaaaggaaaggctgaaggcactttggtccttgctggccgtgagttctctgtctctgtgtcaagtcccgtccctttgtagagcaac

SEQ ID NO: 39242 - DNA, 919 bp, Homo sapiens
atggcagcggccgccagccccgcgatccttccgcgcctcgcgattcttccgtacctgctattcgactggtccgggacggggcgggccgacgctcactctctctggtataacttcaccatcattcatttgcccagacatgggcaacagtggtgtgaggtccagagccaggtggatcagaagaattttctctcctatgactgtggcagtgacaaggtcttatctatgggtcacctagaagagcagctgtatgccacagatgcctggggaaaacaactggaaatgctgagagaggtggggcagaggctcagactggaactggctgacactgagctggaggatttcacacccagtggacccctcacgctgcaggtcaggatgtcttgtgagtgtgaagccgatggatacatccgtggatcttggcagttcagcttcgatggacggaagttcctcctctttgactcaaacaacagaaagtggacagtggttcacgctggagccaggcggatgaaagagaagtgggagaaggatagcggactgaccaccttcttcaagatggtctcaatgagagactgcaagagctggcttagggacttcctgatgcacaggaagaagaggctggaacccacagcaccacccaccatggccccaggcttagctcaacccaaagccatagccaccaccctcagtccctggagcttcctcatcatcctctgcttcatcctccctggcatctgagaagagtcatttagagtgacaggtggaaggtgatatcaagaagcctctgttagcctggtctggttcctgctctcccttcagggaggccgcctgtctactcaccactgtgcctttctggaaagcaggagttcaagccttagcaagcccagaggcccccagcagatgatgaggacattgtcggctc

SEQ ID NO: 39243 - DNA, 3556 bp, Homo sapiens
  misc_feature (659)..(659): n is a, c, g, or t
  misc_feature (3069)..(3069): n is a, c, g, or t
ttagaccatgcctgtatggatgcccctctttaaggggataataaatcacattcagattatagtgaggggattcaatgtcataggaaatagtggaaggaagacagtatgtttaatatggaaaagagaaggcctcacacagactctgctgatagtcttcaaataagtaagagagtgcgctttagaaaaacattgtatttgtactataggacctagagtaccccagaaataggaggggtagagagaggctatgggaagatttccattcagcctaataaagaaccttgaaaacagttgcttcccaaagatggaagggattgctttatgaggtttcgtatcatgttgcagggttttaaacttacaagccttccggggctaggtggtaaataaatataacagaggttaagagtgtaagatcatagggagtggtggggattgacaagctggagagcatgtgccctgcctaaagtcattttgattcagtttttaaagttatattgaccagctaaaaactatgtatggatagggccacgactagcttatacagagcttttgtgccagttagaaaaagtatgtttcttccgcaagtcattttatttccttcttttagaaaattgtctgactatttctttttaaaaacaaggcattttattgtcctgganaatgggtgataaaagtacaacattggtggccctacggttggtaggaccctatggatggactggattcatagccctatggtagtagccctatggatggactggattcagccctctggagcccaggttacaacctttctgactgtaaacctgtttctggatgtaaagctgatgaaattaggagagaaaagtatttgtctaacattttcagagagcaaaatcatagtgttcaggctaggaaggccctaggaacatgggaggcacagcgtctaccctcagggagatttggggctggaggaggaagcaggtaagttagcagggcattgtggcactcgaggtatcaagagagaatccatctgtggtgtgtgtattcagggcagacagcaggtcagttctacctaaagagtagggggacagatttaatagaggaggtgaggcttggagagaaaaccttgagtgtaacaaccttcacatcatagcatcctttctcctgggaagtgagcctttcagtagaggagggccctttgggctgagctcagaagcacatacattccattttgcctagccttttgtagcatcagtttttcatgctggagagctggaaacgaggaaaggcagactatttgttttaaagcccttcttccaagtcatattgaatgttcttaggcctcccacatggtagattgaggctgactcaggcctgtaggctgggcagagatcactggcacagcctatacaccagcctttagctgccctcacctaagcctcttgacttggtcccttaatccttaattaatctggaatccacaggttacacagggatatgtttcctagatactgtgactctcaagccccttctcctttcccactactgctgcttgtgtccccagatgcctggacttctccaacagcctttctctttagagacctccacaatctgctgaatacacagctgtgtttaggtcacttttgcattcaaaacccctcaatagctccctactgcctttcccatcaaaggaagacagattcctcagcctgacattcagaatcttcttaacatcttccctacccttctttctaaaacatctgttcatcttcaactctggtgagcactttgctctagcaagtggttcctcagtctgcatctttgcagagattttctctacgggaagaaagaccttggatagggcaaggtagaaaacctgctttttctcctagctcaaaaaccaactccatgtgtgactagtcaaaccatttaacctctctgggctcagtttcctcatctgaaaaaaacaggacgttggacaagagcagggatctgggacctatttgttgagtacagttatatgcactctttctcatcagtatggcttatttattatgggtgcagtacaggtgcactgagctctttgtaagcattttctcatttcacataggtggtagtcagccttcaagatggttccaatgatccttgcctcctggtattcacctttgtgaatcccctctcacattaaatcagaactaacctgccatccatagaaacggatgtggtatgtgattttcgaggcgagatcataaaaggcattgtcaacttcctccttggccccttcaattgccccttctgaggaaagccagacaccatgctgtgaggacactgaagcagcaatgtggagactgctatggagagaagacctcccaccaacagctaccaccaacttgccagtcctttgttaacagccagcttggaagcaaatcttccggccccagttaggccttcatgtgactgcagcctcaccaaagacccagaactagttgaactgccccccaaatttctgatccaaagaaactatgagataataaatgatcattgttgttgtaagcccctaagtctttgagtaatttgcttcacagcaatagataactaataccatgggtatttgtattatctctgacagatgaggaaaatgaggctcagagcaactgaatagcccatctgaggttgtgaactggtgagtgatgggaaagggatgcaaatccaggtctgcctgacttctcacccatcacgttatacgcctcatgctgcagtgaccctctgtcaggttcagaggagattgctgaactagaagattgaattgagattggagtcttcctggaataaataaaagaacagccactaaagggtaatgtgatacacttattattctgccaggctcctctgcatactattctaacaaactccttgggtgaataagaaaccaaagctagtctttataacactgggactcacagatgggggatgggaaaagtgctgtgctcatggaaaaaatatttcatttgttaactcggctttaaattgtattacagttgaaaacgggagaagcacttgtggttaatttaacagatccattagtgnaaggacccttagaaatctgtcaaaactttttattatataaatagggaaatttctcagatgggaaaaataacttgctcgaactcaaatcgtaagagccaaatgtcacttgttcatcactttgtggccaaacaactctatgcaggttgttcggaatcataattattatccttggactgtttgttaatggttgttactgattattaatggtctgtggtgtttaccttccaagggtctaacatttttacatgtaaaagaaccttgtagcgtaggaagaagaaggtttcgatggtaaaatcaaccctaaggccacctagtaaactcaatgagcaggggctcttaacctgaagtccttagaagggctttaatctgctgggtgcggtggctcatgcctgtaatcccagcactttgggaggccgaggaaggtggatcacctgaggtcaggagtttgagacaagcctggccaatgtggtgcaaccccttctctact

SEQ ID NO: 39244 - DNA, 1703 bp, Homo sapiens
ggcggggccgcgcgcagagggcggggaggtgggcaagatggcgcttgccgagtgattctcctcgaatacctcctgccggcgcggagacaccggggcgggggtcctgccgcaactacctcccttcctcctctcccccgcccccggagccttcatccttcccttccccccccacctcgaggggcgggcctggttcccgggacaccatgtcggactctgaggaggagagccaggaccggcaactgaaaatcgtcgtgctgggggacggcgcctccgggaagacctccttaactacgtgttttgctcaagaaacttttgggaaacagtacaaacaaactataggactggatttctttttgagaaggataacattgccaggaaacttgaatgttacccttcaaatttgggatataggagggcagacaataggaggcaaaatgttggataaatatatctatggagcacagggagtcctcttggtatatgatattacaaattatcaaagctttgagaatttagaagattggtatactgtggtgaagaaagtgagcgaggagtcagaaactcagccactggttgccttggtaggcaataaaattgatttggagcatatgcgaacaataaaacctgaaaaacacttacggttttgccaggaaaatggttttagtagccactttgtctcagccaagacaggagactctgtcttcctgtgctttcagaaagttgctgctgaaatccttgggatcaaattaaacaaagcagaaatagaacagtcacagagggtggtgaaggcagatattgtaaactacaaccaggaacctatgtcaaggactgttaaccctcctagaagctctatgtgtgcagttcagtgagcgcatttttcttttgtgttgatagttctggctgcccttcacctctgggtgggcccgaggacttctaggaacttgttttatcagtgaccatctctgtagttcagttaacactttactcccaacttgcttcatcattgctattgcctcacagtggcaggcagctccttggatttgaaagaattcaactttgggaccacacactttgaattcaaaatggaaaacccattccctggaattagactgcttcattgcaaaagaatgatgttgtttctttgtatgtccttgcttcttttttcattgatgtaaatttttttaacttaatatgaaaactctccaagtcttgatcatcagccaggattttgccacagcaatttcattctcttatcggaacttgtatgtgtcaaagtatacttcagagtgcaaacattaagcaagtaatatattttacctacagatacttatgaagacattctttcgctatcgtgagtaaaagtatataaagctgtttctaactgaaaatgcttgaaataagcctgtaatagaaatattttttcattttttaaaaaagggcctaaattgtttatattgtagtttgtaactcacaaagtaatatttgatattgtatttttattactgtatcgttgtcgttatgtattgtgtaatactcaggtttgaaggctttctgaattctgataaatgttcagctgatgctccacgtggaatttctcttgcaaactgcataagagtactcccgagaatgagttatgacattgtggatcagactgtacctgatgttcagatgtttttctttcacaaataaacttatttaaatta

SEQ ID NO: 39245 - DNA, 1798 bp, Homo sapiens
ggcggggccgcgcgcagagggcggggaggtgggcaagatggcgcttgccgagtgattctcctcgaatacctcctgccggcgcggagacaccggggcgggggtcctgccgcaactacctcccttcctcctctcccccgcccccggagccttcatccttcccttccccccccacctcgaggggcgggcctggttcccgggacaccatgtcggactctgaggaggagagccaggaccggcaactgaaaatcgtcgtgctgggggacggcgcctccgggaagacctccttaactacgtgttttgctcaagaaacttttgggaaacagtacaaacaaactataggactggatttctttttgagaaggataacattgccaggaaacttgaatgttacccttcaaatttgggatataggagggcagacaataggaggcaaaatgttggataaatatatctatggagcacagggagtcctcttggtatatgatattacaaattatcaaagctttgagaatttagaagattggtatactgtggtgaagaaagtgagcgaggagtcagaaactcagccactggttgccttggtaggcaataaaattgatttggagcatatgcgaacaataaaacctgaaaaacacttacggttttgccaggaaaatggttttagtagccactttgtctcagccaagacaggagactctgtcttcctgtgctttcagaaagttgctgctgaaatccttgggatcaaattaaacaaagcagaaatagaacagtcacagcgtattgtcagggcagaaatagtgaagtacccggaagaagaaaatcaacataccacctctactcagagtagaatctgttcagtacagtagtgcagagggtggtgaaggcagatattgtaaactacaaccaggaacctatgtcaaggactgttaaccctcctagaagctctatgtgtgcagttcagtgagcgcatttttcttttgtgttgatagttctggctgcccttcacctctgggtgggcccgaggacttctaggaacttgttttatcagtgaccatctctgtagttcagttaacactttactcccaacttgcttcatcattgctattgcctcacagtggcaggcagctccttggatttgaaagaattcaactttgggaccacacactttgaattcaaaatggaaaacccattccctggaattagactgcttcattgcaaaagaatgatgttgtttctttgtatgtccttgcttcttttttcattgatgtaaatttttttaacttaatatgaaaactctccaagtcttgatcatcagccaggattttgccacagcaatttcattctcttatcggaacttgtatgtgtcaaagtatacttcagagtgcaaacattaagcaagtaatatattttacctacagatacttatgaagacattctttcgctatcgtgagtaaaagtatataaagctgtttctaactgaaaatgcttgaaataagcctgtaatagaaatattttttcattttttaaaaaagggcctaaattgtttatattgtagtttgtaactcacaaagtaatatttgatattgtatttttattactgtatcgttgtcgttatgtattgtgtaatactcaggtttgaaggctttctgaattctgataaatgttcagctgatgctccacgtggaatttctcttgcaaactgcataagagtactcccgagaatgagttatgacattgtggatcagactgtacctgatgttcagatgtttttctttcacaaataaacttatttaaatta

SEQ ID NO: 39246 - DNA, 1023 bp, Homo sapiens
cccatttttgttatgtaggtcttcctgtgctttcagaaagttgctgctgaaatccttgggatcaaattaaacaaagcagaaatagaacagtcacagagggtggtgaaggcagatattgtaaactacaaccaggaacctatgtcaaggactgttaaccctcctagaagctctatgtgtgcagttcagtgagcgcatttttcttttgtgttgatagttctggctgcccttcacctctgggtgggcccgaggacttctaggaacttgttttatcagtgaccatctctgtagttcagttaacactttactcccaacttgcttcatcattgctattgcctcacagtggcaggcagctccttggatttgaaagaattcaactttgggaccacacactttgaattcaaaatggaaaacccattccctggaattagactgcttcattgcaaaagaatgatgttgtttctttgtatgtccttgcttcttttttcattgatgtaaatttttttaacttaatatgaaaactctccaagtcttgatcatcagccaggattttgccacagcaatttcattctcttatcggaacttgtatgtgtcaaagtatacttcagagtgcaaacattaagcaagtaatatattttacctacagatacttatgaagacattctttcgctatcgtgagtaaaagtatataaagctgtttctaactgaaaatgcttgaaataagcctgtaatagaaatattttttcattttttaaaaaagggcctaaattgtttatattgtagtttgtaactcacaaagtaatatttgatattgtatttttattactgtatcgttgtcgttatgtattgtgtaatactcaggtttgaaggctttctgaattctgataaatgttcagctgatgctccacgtggaatttctcttgcaaactgcataagagtactcccgagaatgagttatgacattgtggatcagactgtacctgatgttcagatgtttttctttcacaaataaacttatttaaatta

SEQ ID NO: 39247 - DNA, 1526 bp, Homo sapiens
tcataaccaatagtgagccatttggaaatagggattttggaggaaaggtttagaagttggaaaagatttaaaaatgggttgctcagaatatttctgctttatatgtgaatcctctttaacatttaaatgtcttcttccaaactcacaaactgctgtaaacattcaatgaaaagttttcgctaaatataatggcttatggaaatattaatcaataatgctattttttactttgaaatgatgagttcttttctatgatttaaaatatatgtgaatgatttatttattttgctctaaattattatcagggtttaatttttcattattgatttgtcagtttttcattagacttatgataacctcaagttaatgtcataaaaccagggacaactcagtagctgagttgccattctcttcttgaaaaaaaaaaatccactctttgtttgtttgtctggcttattcttttaatatcaactcctgcttcatttatggtgtccatcatcagaagttcagcaaagttcagaaaataaaaatatactttaaggagctctttctaaatgttctgatatcctgataatacccctgttttctttttatgacagagggtggtgaaggcagatattgtaaactacaaccaggaacctatgtcaaggactgttaaccctcctagaagctctatgtgtgcagttcagtgagcgcatttttcttttgtgttgatagttctggctgcccttcacctctgggtgggcccgaggacttctaggaacttgttttatcagtgaccatctctgtagttcagttaacactttactcccaacttgcttcatcattgctattgcctcacagtggcaggcagctccttggatttgaaagaattcaactttgggaccacacactttgaattcaaaatggaaaacccattccctggaattagactgcttcattgcaaaagaatgatgttgtttctttgtatgtccttgcttcttttttcattgatgtaaatttttttaacttaatatgaaaactctccaagtcttgatcatcagccaggattttgccacagcaatttcattctcttatcggaacttgtatgtgtcaaagtatacttcagagtgcaaacattaagcaagtaatatattttacctacagatacttatgaagacattctttcgctatcgtgagtaaaagtatataaagctgtttctaactgaaaatgcttgaaataagcctgtaatagaaatattttttcattttttaaaaaagggcctaaattgtttatattgtagtttgtaactcacaaagtaatatttgatattgtatttttattactgtatcgttgtcgttatgtattgtgtaatactcaggtttgaaggctttctgaattctgataaatgttcagctgatgctccacgtggaatttctcttgcaaactgcataagagtactcccgagaatgagttatgacattgtggatcagactgtacctgatgttcagatgtttttctttcacaaataaacttatttaaatta

SEQ ID NO: 39248 - DNA, 868 bp, Homo sapiens
gtaactcttttgtgacagggagtcctcttggtatatgatattacaaattatcaaagctttgagaatttagaagattggtatactgtggtgaagaaagtgagcgaggagtcagaaactcagccactggttgccttggtaggcaataaaattgatttggagcatatgcgaacaatattgcctcacagtggcaggcagctccttggatttgaaagaattcaactttgggaccacacactttgaattcaaaatggaaaacccattccctggaattagactgcttcattgcaaaagaatgatgttgtttctttgtatgtccttgcttcttttttcattgatgtaaatttttttaacttaatatgaaaactctccaagtcttgatcatcagccaggattttgccacagcaatttcattctcttatcggaacttgtatgtgtcaaagtatacttcagagtgcaaacattaagcaagtaatatattttacctacagatacttatgaagacattctttcgctatcgtgagtaaaagtatataaagctgtttctaactgaaaatgcttgaaataagcctgtaatagaaatattttttcattttttaaaaaagggcctaaattgtttatattgtagtttgtaactcacaaagtaatatttgatattgtatttttattactgtatcgttgtcgttatgtattgtgtaatactcaggtttgaaggctttctgaattctgataaatgttcagctgatgctccacgtggaatttctcttgcaaactgcataagagtactcccgagaatgagttatgacattgtggatcagactgtacctgatgttcagatgtttttctttcacaaataaacttatttaaatta

SEQ ID NO: 39249 - DNA, 1646 bp, Homo sapiens
ggcggggccgcgcgcagagggcggggaggtgggcaagatggcgcttgccgagtgattctcctcgaatacctcctgccggcgcggagacaccggggcgggggtcctgccgcaactacctcccttcctcctctcccccgcccccggagccttcatccttcccttccccccccacctcgaggggcgggcctggttcccgggacaccatgtcggactctgaggaggagagccaggaccggcaactgaaaatcgtcgtgctgggggacggcgcctccgggaagacctccttaactacgtgttttgctcaagaaacttttgggaaacagtacaaacaaactataggactggatttctttttgagaaggataacattgccaggaaacttgaatgttacccttcaaatttgggatataggagggcagacaataggaggcaaaatgttggataaatatatctatggagcacagggagtcctcttggtatatgatattacaaattatcaaagctttgagaatttagaagattggtatactgtggtgaagaaagtgagcgaggagtcagaaactcagccactggttgccttggtaggcaataaaattgatttggagcatatgcgaacaataaaacctgaaaaacacttacggttttgccaggaaaatggttttagtagccactttgtctcagccaagacaggagactctgtcttcctgtgctttcagaaagttgctgctgaaatccttgggatcaaattaaacaaagcagaaatagaacagtcacagcgtattgtcagggcagaaatagtgaagtacccggaagaagaaaatcaacataccacctctactcagagtagaatctgttcagtacagtagtgcagatgaggaaaatgaggctcagagcaactgaatagcccatctgaggttgtgaactggtgagtgatgggaaagggatgcaaatccaggtctgcctgacttctcacccatcacgttatacgcctcatgctgcagtgaccctctgtcaggttcagagaagttcagggatgagcatctgagggctggtggctcatcaggaaccaagactctttttttctgctctgatgtcccaagcacaaaggcttcatcctcattcaaatggcttccagattgcgaggtggctgccatccactccatgtctgcatgccatggagcaacaagggaggaggaaaaggatgaaagggagcctaaggaggaatgaatagcaatgccctgaattccaactgaccttctacagaaaagtacctgactgccaagtggtctttccagtcattggtggaggatcactttggtacccctaccaataggctcaccatggtcagcacacacagtgaaggaacctccagcagaagactctcaggcatgccatcatcattgggctttgtgatcacaaccactttctctgctaccagcctgaaggaatgtacctcaatggaaaagaaaatgaagatgctcattaattttcaaggactttaggtgtggagtggatgggtgagtgtagcatggtacttagcacttggttagtcttcttgccctgtttcttgctgggctcttatgatggtgtctgaaaagagaaagatacaacaattaaaaataaagtaaaattacttgttgctgaaa

SEQ ID NO: 39250 - DNA, 1128 bp, Homo sapiens
ggcggggccgcgcgcagagggcggggaggtgggcaagatggcgcttgccgagtgattctcctcgaatacctcctgccggcgcggagacaccggggcgggggtcctgccgcaactacctcccttcctcctctcccccgcccccggagccttcatccttcccttccccccccacctcgaggggcgggcctggttcccgggacaccatgtcggactctgaggaggagagccaggaccggcaactgaaaatcgtcgtgctgggggacggcgcctccgggaagacctccttaactacgtgttttgctcaagaaacttttgggaaacagtacaaacaaactataggactggatttctttttgagaaggataacattgccaggaaacttgaatgttacccttcaaatttgggatataggagggcagacaataggaggcaaaatgttggataaatatatctatggagcacagggagtcctcttggtatatgatattacaaattatcaaagctttgagaatttagaagattggtatactgtggtgaagaaagtgagcgaggagtcagaaactcagccactggttgccttggtaggcaataaaattgatttggagcatatgcgaacaataaaacctgaaaaacacttacggttttgccaggaaaatggttttagtagccactttgtctcagccaagacaggagactctgtcttcctgtgctttcagaaagttgctgctgaaatccttgggatcaaattaaacaaagcagaaatagaacagtcacagatttattgagcacctgtcagttactatttcagtgctggccataagtggagaacaagagagacatgatggctacttcctctgtggatcctcattctgggtgagactcaatttcatgaacgtgtatatttatctgctcctagaactgtttgtaaagtctcattaactgtaaaaccacttcttgatatcttgcctgactttcaggtgcttcagcaacatcgaaacaagtttgagaaccgctcaacttgaccctgagattttgtatgagatgaggtgtgtaaaactcactcgtcaacatgcatcttgtgattgtgttataaaagcagccaaaaggtcaataaacagcaaaattttt

SEQ ID NO: 39251 - DNA, 761 bp, Homo sapiens
  misc_feature (22)..(22): n is a, c, g, or t
  misc_feature (110)..(110): n is a, c, g, or t
  misc_feature (112)..(112): n is a, c, g, or t
  misc_feature (114)..(115): n is a, c, g, or t
  misc_feature (118)..(118): n is a, c, g, or t
  misc_feature (134)..(134): n is a, c, g, or t
  misc_feature (151)..(151): n is a, c, g, or t
  misc_feature (174)..(174): n is a, c, g, or t
  misc_feature (187)..(187): n is a, c, g, or t
  misc_feature (219)..(220): n is a, c, g, or t
  misc_feature (223)..(223): n is a, c, g, or t
  misc_feature (235)..(235): n is a, c, g, or t
  misc_feature (284)..(285): n is a, c, g, or t
  misc_feature (305)..(305): n is a, c, g, or t
  misc_feature (309)..(309): n is a, c, g, or t
ctcctcgaatacctcctgccgncgcggagacaccggggcgggggtcctgccgcaactacctcccttcctcctctcccccgacccggagccttcatacttacccattgccncncnncancatcgaggaggcgggnctggtatcccgggacancatgatcaggagatctgaggagngagagcacaggancggcaactgaaaatcgtcgtgctgggggacgnncgnctccgggaaganctccttaactacgtgttttgctcaagaaacttttgggaaacagtacaanncaaactataggactggattncttnttgagaaggataacattgccaggaaacttgaatgttacccttcaaatttgggatataggagggcagacaataggaggcaaaatgttggataaatatatctatggagcacagaaaagtaaattaaagcatgaagaagagaaatgatgacaagaggttgcacagaaagttactgcataatagatctggaagccaaagtccttaatgcacatctagagatcacggcactaccctgtaccctggaaaatcttcaacatgggccaaaaagatggcacataatcttcctccacctctctccctccacacctactggtttgaagaaacatttgagctgagaggagaggcaatctgtggctaggtagaaaggcaatgaggtagaatttggacaattaattgctagggtgctactcgggctgaaagttgtttggactgagaatagaagaccaatgcatggg

SEQ ID NO: 39252 - DNA, 1573 bp, Homo sapiens
ggcggggccgcgcgcagagggcggggaggtgggcaagatggcgcttgccgagtgattctcctcgaatacctcctgccggcgcggagacaccggggcgggggtcctgccgcaactacctcccttcctcctctcccccgcccccggagccttcatccttcccttccccccccacctcgaggggcgggcctggttcccgggacaccatgtcggactctgaggaggagagccaggaccggcaactgaaaatcgtcgtgctgggggacggcgcctccgggaagacctccttaactacgtgttttgctcaagaaacttttgggaaacagtacaaacaaactataggactggatttctttttgagaaggataacattgccaggaaacttgaatgttacccttcaaatttgggatataggagggcagacaataggaggcaaaatgttggataaatatatctatggagcacagttgatttggagcatatgcgaacaataaaacctgaaaaacacttacggttttgccaggaaaatggttttagtagccactttgtctcagccaagacaggagactctgtcttcctgtgctttcagaaagttgctgctgaaatccttgggatcaaattaaacaaagcagaaatagaacagtcacagagggtggtgaaggcagatattgtaaactacaaccaggaacctatgtcaaggactgttaaccctcctagaagctctatgtgtgcagttcagtgagcgcatttttcttttgtgttgatagttctggctgcccttcacctctgggtgggcccgaggacttctaggaacttgttttatcagtgaccatctctgtagttcagttaacactttactcccaacttgcttcatcattgctattgcctcacagtggcaggcagctccttggatttgaaagaattcaactttgggaccacacactttgaattcaaaatggaaaacccattccctggaattagactgcttcattgcaaaagaatgatgttgtttctttgtatgtccttgcttcttttttcattgatgtaaatttttttaacttaatatgaaaactctccaagtcttgatcatcagccaggattttgccacagcaatttcattctcttatcggaacttgtatgtgtcaaagtatacttcagagtgcaaacattaagcaagtaatatattttacctacagatacttatgaagacattctttcgctatcgtgagtaaaagtatataaagctgtttctaactgaaaatgcttgaaataagcctgtaatagaaatattttttcattttttaaaaaagggcctaaattgtttatattgtagtttgtaactcacaaagtaatatttgatattgtatttttattactgtatcgttgtcgttatgtattgtgtaatactcaggtttgaaggctttctgaattctgataaatgttcagctgatgctccacgtggaatttctcttgcaaactgcataagagtactcccgagaatgagttatgacattgtggatcagactgtacctgatgttcagatgtttttctttcacaaataaacttatttaaatta

SEQ ID NO: 39253 - DNA, 1152 bp, Homo sapiens
ggcggggccgcgcgcagagggcggggaggtgggcaagatggcgcttgccgagtgattctcctcgaatacctcctgccggcgcggagacaccggggcgggggtcctgccgcaactacctcccttcctcctctcccccgcccccggagccttcatccttcccttccccccccacctcgaggggcgggcctggttcccgggacaccatgtcggactctgaggaggagagccaggaccggcaactgaaaatcgtcgtgctgggggacggcgcctccgggaagacctccttaactacgtgttttgctcaagaaacttttgggaaacagtacaaacaaactataggactggatttctttttgagaaggataacattgccaggaaacttgaatgttacccttcaaatttgggatataggagggcagacaataggaggcaaaatgttggataaatatatctatggagcacagggagtcctcttggtatatgatattacaaattatcaaagctttgagaatttagaagattggtatactgtggtgaagaaagtgagcgaggagtcagaaactcagccactggttgccttggtaggcaataaaattgatttggagcatatgcgaacaataaaacctgaaaaacacttacggttttgccaggaaaatggttttagtagccactttgtctcagccaagacaggagactctgtcttcctgtgctttcagaaagttgctgctgaaatccttgggatcaaattaaacaaagcagaaatagaacagtcacagcgtattgtcagggcagaaatagtgaagtacccggaagaagaaaatcaacataccacctctactcagagtagaatctgttcagtacagtagtgcagatgaggaaaatgaggctcagagcaactgaatagcccatctgaggttgtgaactggtgagtgatgggaaagggatgcaaatccaggtctgcctgacttctcacccatcacgttatacgcctcatgctgcagtgaccctctgtcaggttcagagtaagtgcttattacacagtttcaagtgaacgaacaaactgttttcatgactgaatatataaatctgttacacaagtatatatttagaaaaggagcccataaaaataaagaatgaatattttcaatctca

SEQ ID NO: 39254 - DNA, 849 bp, Homo sapiens
ggcggggccgcgcgcagagggcggggaggtgggcaagatggcgcttgccgagtgattctcctcgaatacctcctgccggcgcggagacaccggggcgggggtcctgccgcaactacctcccttcctcctctcccccgcccccggagccttcatccttcccttccccccccacctcgaggggcgggcctggttcccgggacaccatgtcggactctgaggaggagagccaggaccggcaactgaaaatcgtcgtgctgggggacggcgcctccgggaagacctccttaactacgtgttttgctcaagaaacttttgggaaacagtacaaacaaactataggactggatttctttttgagaaggataacattgccaggaaacttgaatgttacccttcaaatttgggatataggagggcagacaataggaggcaaaatgttggataaatatatctatggagcacagggagtcctcttggtatatgatattacaaattatcaaagctttgagaatttagaagattggtatactgtggtgaagaaagtgagcgaggagtcagaaactcagccactggttgccttggtaggcaataaaattgatttggagcatttcttctactcttgagagctcaggcagcgttagggctgcttaggtctcatggaccagtggctggtctcacccaactgcagtttactattgctatcttttctggatgatcagaaaaataattccataaatctattgtctacttgcgattttttaaaaaatgtatatttttatatatattgttaaatcctttgcttcattccaaatgctttcagtaataataaaattgtgggtggaaattctt

SEQ ID NO: 39255 - DNA, 347 bp, Homo sapiens
tccgactccctaagccagtgcattaaagagaaggctgctaatcagctaaatagaaagtggaatctgttcacatgaagtctctctttccttccatcaccagagggacaccaccgtgttctgaaatacactcttgacatcgtttggcaggaaaccctattttgctgaacatgattcatcccttaggttactgtttttaatattagaaagtgagctttcaagtgccaaacaaattttgcagcaggggacaaaagatattccaagtggtctccctggaccttctaccaactgcggccaccaaatggcttaaaagaaaaccttcccgtggtgcttcagaaatgaagcagaga

SEQ ID NO: 39256 - DNA, 381 bp, Homo sapiens
tgcaccatcacccccggcctcatttttgtatttttagtagcgatggggtttccacccatgttggcccaggctggtcctcaaactccctgatcctccgcccagcctcggcccttcccaaagtgcctgagattacaggcatgagcccacggtgccctgaccctaaaagcattttaatgcccacagagaaagccagctaaagggaggaggagcagtagatggattctgtcttctaagtgggatttgagaattgactggattttaaataattaataaaggtgttttacttaatgaacacagtttaagagaactgagttgattttacttcattttacctaaagtacaaaggtaagtgtgtttactcaaataatatgtgagcctttt

SEQ ID NO: 39257 - DNA, 1493 bp, Homo sapiens
ctagaagataaaagccctgcccgagattccccattaattagaaaaactcacttttattcccaagaatcctgaattgccacaaataaggcacttctcataatctgacatttatatcgtccattaataccattcctaccaccatataataatccagaggacccacttctagttaaaacccatttcaaattctctaccttatatctatcacgaaatgccacttactggtctctcagtatgttcttctacctctttaaccatattccctaagctagaaatgccccacatggttagtctcatttgttcttctcaaatatcccagagccaaaaaggaccatcatcatcttcatttcacaaatgaaaaacaaagtcagtcagtctaaggttacctggtctcctaaattcaagtttatctttcttcacatatgtcatgtatttccaagctttttttctctttggataactgggaactttctgttaagttagctttaaaaaaaaataagcataaataaaaaagatataaaatcgaagtttttcttttaatctcaataagtctaaagtccagaataagtggagaactggggcaagaggacaacaaaagaagtcttgttccagcctgggcatcatggcgaacctgtctctactaaaaacacaaaaaattagccgagtgtggtggcacgcacctgtagtccgaactactgaggaggctgagaatcacctgagcccaagaagctgaggctgcagtaagctgagattgcgtcactacacgccagcctgggcgacaggaatgagatcctgtctcaaacaaacaaacaaacaaacaaaaaagtcttgttgagaacaagaagagataaaccaaaggcccattgcttagggaagatgcaatatcaagagacaacagggccaattccctatgcttcatcttcatcaagaagcatgatcttcaagctagggaggtcagaaatctgataaaaggaaaccagcttctaaggtaagtggcatgggtaggggacagtaacagaatacagagctagttcaaaagaatatgctttctgatccaaataactcacactccatgatgctgaaaaaacttttacatctgccttaaaaactaccacaaattatctaagctaccttgacaaggtgccagaagaccagaaatcaaataaatagaaataaacacatgctcaaatttcaaaaaaggagaaatgcaggccgggcgcagtggctcatgcctgtaatcctagcactttggaaggccgaggtaggcggattgcctgagctcaggagttcgagaccagaatgggcaacacagtgaaaccccatatctactaaaatacaaacaattagccgggcgtggtggtgtgcgcctgtagtcccagctactcgggaggcttgaggcaggagaactggttgaacctggaaggcagaggttacagtgagccgagatcatgccactgcactccagcctgggcgacagagcaagactccatctc

SEQ ID NO: 39258 - DNA, 343 bp, Homo sapiens
attttaacaaataccaacagaacttcttgtggtaggccagctttccaagttactggttcaagagaacagtcattttataacaggtataaaatcaaagacgtttagtaaaatattttgcccttaattctccatggatagcttgtttatgaagagttcagtattcagggaagatggaaaaacagcccagtgtcagctaaagtaataaaaccgacttaatcccaaattgacaatttaaagccctttaaaattacttgttgcaaacaagaaataatccacccagtctgtcatctcttttcagcttattagtagtggaatctcttaggtggctctttaaaccgtgtgt

SEQ ID NO: 39259 - DNA, 419 bp, Homo sapiens
tttatgttatctccaaatgaattactaagacaaagggataataaatgggaagtgtacaacccggagacttcagaccagaaaatcaaagagagatgatgggaaagggtggagtaatgctgagttttgaagaatgggcacatttagacagaccaaagactgagcatcatatcattgctgccgttccatgaactgagagcaaactgttagatcatgacctgctacagaatcactaggcatcaggaagaagagtaggtatatggtctgtattagagtatagcaatggattattcttccagctgccaagaagtcaagaaggaaagcctgtatttgactttatcatttctattgaatgtctgagtgatacatagagtagtaattttagacatttaagtaactaaagatttatatagctttagtat

SEQ ID NO: 39260 - DNA, 827 bp, Homo sapiens
cagaccctcttgatacttgacaggaaataaggaggggtttgttttattttgattcgtttaaatatgagacttgattacaggttgaggttgaagatgcagtagtggggaagatgagtttgaaaataattgatatggaaaacaatctctaaagcaagatcaatgaggaactgagggatgagcataattgcaagaaattagccttgcacatgaagaaggatagaagataaaggatgcatgtgggtgtaggcaattttttaggtagaagaatgtgaaaaagatgtttcatgcttttcatataattttctattgagagtagcagattatgttatcagatgaattaagggtgagagggtagagacctggatcagcatggagaaagtgaaattagctgcagggaggaatgagagagagggcaattaagaatagctaaataagttgattaaaggccttagagataggaaacagttaacttgttattccattatacagaattgagtgatttttttcccctaccaccaatgctcaattacctgtgtgtaaattgaataagacagacaattggactgatcctgtttagagtttacaggacatgtgcaaatgaagaggcaacaggtgacaagggttttgaggccactagcaataatgtaattaaagtgtgggcttttgggcttaggctgaagtgggttgggaaggcaagtgagaccaggatgactgatcttaaataagaatttttaaagctggctgggcatggtggatcatacctctaatcccagcactttgggaggcccaggcaggcagatcactggagcccaggagtttgaaaccag

SEQ ID NO: 39261 - DNA, 405 bp, Homo sapiens
tcccaagtaagttgtttagtatgttcaggaattaactggctctgggagggactatctgtcttcaggtctgtaatgcccctcaagatgtcaaaacatcataatatacagaaaataaaaatcatagccaggcgtggtggctcatgcctgttatcccagcactctgggaggccaaggcaggcagatcacttgaggccaggagtttgagaccagcctggccaacacgtcgaaaccctgtctctactaaaaatacaaaaattaggcaggtgtggtggcacacacctgtaaatcccagctactcgggagactgggggatgagaattgcttgagcctgggaggcagaggtggaggttgcagtgagctgaggttgcaccagcttgggtgagagtgagactctgtctcaaaaac

SEQ ID NO: 39262 - DNA, 458 bp, Homo sapiens
accaaaaactttcactctttggattaaagtgctctatgcatcaaatcccagtgggttttaaaattatactgaatctaggccaggcacagtggctcatgtttgtaatcccagcacttaaggaggccgaagtgagaggattggttgaggccaggaattcgagacaagtctgggcaacaaagtgagatcccatctctacaaaaaattagccagactggtgggctcccttagcctcagctacttgggaggctgaggtgggagattgcttgaacctgagaggcggaggctgcagtgagccaagatcacatcactgcactccagcctgggtgacagagcgagactccaccacacacacacacacacacacacacacaaaatcagcaaactttgagtaaagcagattccccctccattccctctattatgtcagtgggcctcatccaatcagtggaaaggcctta

SEQ ID NO: 39263 - DNA, 148 bp, Homo sapiens
aaagccagtgtacctgtgatgggagatcaatcctgacagctcacagaacgagtctggtcttctgtggagcacacctgctaagtcccagactctgcagcaagcctggctggcttcacatcacactcctgatcttcggggtgactttgaa

SEQ ID NO: 39264 - DNA, 394 bp, Homo sapiens
ggacccagacatgggctcttcatccatctgctactgtgtgacctcaggcagggtgtccaacctctctgagcttcctccgtggtaatcccatcccatggccaccccgtggaccattgctgggagaattaaagatgatggcatgtgaaaaccctctagggcactgcccaaaacacagtaggtgctcaacaaacagcagctggggacctcccctgctaggtacactgccatgccctcatctggggacacccctgccaccctaaccgcagacagactggccagccagggatttgaaattccagagatgtctcccctttccccggcaccctctccaaccagcagcacctcctggaagcagcaactcagggctgttgctcactggctcaaatgtggcttt

SEQ ID NO: 39265 - DNA, 431 bp, Homo sapiens
cactagcatcctggggaggaaattaaagcattcgtcgagggcctgactcaggaaagggtagaggaatggattatgtcagccacaggagaccaaggtgagagcacgagggaaggagcaggaagttcgacccttgagtagcatccggaagcatgagaagtggtgaaaagcttgagcgatgagttttttaatatgatacttctgtggaacaaaaattggtctgtctcccccaaacttcagcaaagtctgttatccacacaaaagctttagtgagagtttttttttttttctacctcagagcaaggggagttgtgaaaatgagtaaaacggctgaactccctcatctgggtcaaggcgatggggagcatgggatggcgcgatgtagaagtaaggccccctgtgagctggggaagacatggtcgggaaaacccata

SEQ ID NO: 39266 - DNA, 433 bp, Homo sapiens
atgtgcaagttgtatgcatttaattctttgaagtccaaacacattcttgcttgaaagaaaagctctggaggatgaaataagagtatacaattattgcaaaatggtaataaaatcacctccccacgcttcccttgagaaccatggtcaaggaagatctggctgagagggctgaaacagactgtcaacttgacttttaattttatgaactatgagaatttggacaaaaaaaaatcttcaaaggatcaatatcatttctacaaatgagaagaagactgagtgtgaaaacgctgctttgaagcaggctcagaagaaaaaaatcttatgagcaagtaccaatagaactttctcaatttctcatttttttttctttaaaagggattttatttcttttaagcacaggaattgcagttaaaaattattttataacccttaa

SEQ ID NO: 39267 - DNA, 422 bp, Homo sapiens
tgttaaaactcacttgtgtctcacattaagctcctaaatgtgccctctgtttccctaggccagagccagtgtctaacaagtaatgcatttggagggtcatggcccaacagtctacattcagccaggatttaggaacttcattccaatgatctttgaaggacttgtacaactctagccagcctttgaagggagtattttgggaactgggaagagatctttctagtcctcccatggagacagcaaggttatggtgaagtttggaatcagataaaactaatggaggcattacatctctaatctaaaatgaggattatagtctaggtgtggtggcacacacctgtaatcccatcactttgggaggccaaggccagaggattgcttgccaaggagttggggaccagcctgggcaacatacagatgca

SEQ ID NO: 39268 - DNA, 126 bp, Homo sapiens
acactggtgctctggtcgccgggtcagagactcactggggacgcatgtgattcacactggtgcgctggccgccgggtcagagactcactggggacacatgtgattcacactggtgtgctggccgcc

SEQ ID NO: 39269 - DNA, 1764 bp, Homo sapiens
gcagccctgcagagatctaagaaaaaattccagaaaaatgagcagcaacctccaaggccaggcatcggtgcaggggacaaggggtcgtagctggaggggcctaggtgaggctgccgggaagggacgatgtggttggtggagtgcacaggcagggacctcactggactttcctgtctgctcggcatggacaggcagcccaggagaaggcagcacgtggccgggtgcagggacgtaccacccccacttccccaggggagctggggcagacgagtcccaggcactccatcctctgcagcaagtcaggttgtgatttactagggggtggtgaatataatggagagacttctggggaggaattcctggctcccgcgtggacttgcagagctcaacaggcagccacgtggctgagtgtccagcaaacatcacataaggctttgggtcctgcaggtggggctgccatgagcagcaagctcagtccagaagaacagttcctctccaggatccacttcctgcgcacttttatgtgcagtgtagctggagcagagctccccggaattccacaggcaactgagaacggagagggatgcaggccagccagggatccagcgtcttccccatcgtcactctccatggcctccgtctacacacagtgttcgtctgcacagcttgtcagcgcgttatcatgacttctatttggcaccggcccgtctgtccactgtcctggcttgttccaagcgctgccttctccaactggggtcctggctgcagagctgtctgctccccacgttgggcaactccagccaagattcctacacccaaatgtgaccgtgttgctcacgaagaaggctcagctttgcgtgtgcccagccgtgtgcacagctcgtcccaactcctgcgggtggcacctgcctctcccacctccagtctttcccctgtgatgagcagatgaccaccgccctccagggtcagcgtttggctgtttgtgtgcctgcccacccgcctccctgtgcctgggcctgccctgtgcctgcacacaggagtggctcatggcgtttgccctacacggatgggctgtcctgggagctactggacagtcaccttggtgggaatgccagaggcatgggcattaggtccccccggccagcctccgttgccacatgggctatttttgtccatcgcgtgggacaacctagtattgggggaaaactcagtccactctaaagaagcatcggcgttttggatggacgaatgctgcttcatgcgactccatgtcaatggactattttattcaactcgggtatttatgagtgtctcctctgtgccagccacgtgtgaaagaagaactccaagttactggacaccaggacaaaccaggagtctcgctgtgtcacccaggctggagtgcagtggtgtgatcttggcttactgcaacctctgcctcccaggttcaagtgattctcctgcctcagcctcccaagtacctgggactacagatctttagataagcactctttcaaccaaatgccaatcagaaaatctttgaatccacctgtgagctggaagccccgctgtgctttgtgttgtcctgccttttcggaccaatgtaaatctcacatgtactgattgatgcctacatctccttaaaacgtataaaatcaagctgtaacccaaccaccttgggcatgtgttctgaggacctcttgaggctgtgtcactggtcatgatccttaaccttggcaacataaacttctaaactgattgaga

SEQ ID NO: 39270 - DNA, 2559 bp, Homo sapiens
gcagccctgcagagatctaagaaaaaattccagaaaaatgagcagcaacctccaaggccaggcatcggtgcaggggacaaggggtcgtagctggaggggcctaggtgaggctgccgggaagggacgatgtggttggtggagtgcacaggcagggacctcactggactttcctgtctgctcggcatggacaggcagcccaggagaaggcagcacgtggccgggtgcagggacgtaccacccccacttccccaggggagctggggcagacgagtcccaggcactccatcctctgcagcaagtcaggttgtgatttactagggggtggtgaatataatggagagacttctggggaggaattcctggctcccgcgtggacttgcagagctcaacaggcagccacgtggctgagtgtccagcaaacatcacataaggctttgggtcctgcaggtggggctgccatgagcagcaagctcagtccagaagaacagttcctctccaggatccacttcctgcgcacttttatgtgcagtgtagctggagcagagctccccggaattccacaggcaactgagaacggagagggatgcaggccagccagggatccagcgtcttccccatcgtcactctccatggcctccgtctacacacagtgttcgtctgcacagcttgtcagcgcgttatcatgacttctatttggcaccggcccgtctgtccactgtcctggcttgttccaagcgctgccttctccaactggggtcctggctgcagagctgtctgctccccacgttgggcaactccagccaagattcctacacccaaatgtgaccgtgttgctcacgaagaaggctcagctttgcgtgtgcccagccgtgtgcacagctcgtcccaactcctgcgggtggcacctgcctctcccacctccagtctttcccctgtgatgagcagatgaccaccgccctccagggtcagcgtttggctgtttgtgtgcctgcccacccgcctccctgtgcctgggcctgccctgtgcctgcacacaggagtggctcatggcgtttgccctacacggatgggctgtcctgggagctactggacagtcaccttggtgggaatgccagaggcatgggcattaggtccccccggccagcctccgttgccacatgggctatttttgtccatcgcgtgggacaacctagtattgggggaaaactcagtccactctaaagaagcatcggcgttttggatggacgaatgctgcttcatgcgactccatgtcaatggactattttattcaactcgggtatttatgagtgtctcctctgtgccagccacgtgtgaaagaagaactccaagttactggacaccaggacaaaccaggtagatcactgcatccggttcctcctctttctgccgactctcccgggcaaccgttctgattcctggcatggagttgggggcgagctcatcagtacccagagcgcctggtgtgcagccaaaggcccccattttattagtcggtgtgttcagtatcacgctcaagacaagggccaacctattacttcacacacctcaaatacaaaaagtgcctgggaacgtcgatgaggtattaaaggaaaccactggtcttgtcagtcatgtacacacagaaaaaaaaaccagtcatttttatttttattttttgagacagagtttcgctcttgttgcccaggctggagtgcaatggtgcaatttcagctcactgcaatctctgccacccggattcaagcaattctcctgtctcagcctcccgagtagctggaattgcagacacccatcaccacgcccagctaattttatgtatttttagtagagatggggtttcaccatgttggtcaggctggtcttgaactcctgacctcaggtgatccacccacgtcaggctcccaaagtgctgagattacaggcatgaaccactgtgcccagccgaaaacaaccaagaattttttaacaataaaatgaccagcaagtaaacttgaaacaaaaatggacaaatatctaaaatatttttaaatgtatgtattttaattggcaaataatacttgtatatattgtttacaacttgttttaaagtatgaatacattgtggaatggctaaatcaagttaattaacatgcattaactcacatactttttgttttttggtgtggtgaggacacttaacatctactctcttagcaattttccagtcaccatgtcctactatagatccctagaacatattcctccaatgtaactgaaatgtatcccttgaccaacatcactgcccggccccagccccaggtaaacaccattctaccctctgcttctgtgagttcagcttttctagatttcacctgtgagtgagattgtgcagcatttgtctttctgtgcctgggttttttcacataatgcccttctggttcatctatattgtcatatatggtagcattgtcttcctttgtaaggctgactggtataccattgcgtatatacaccacattgtttacctaaaatattttttaatacaatcgctgaaaactgcca

SEQ ID NO: 39271 - DNA, 2631 bp, Homo sapiens
  misc_feature (2631)..(2631): n is a, c, g, or t
gcagccctgcagagatctaagaaaaaattccagaaaaatgagcagcaacctccaaggccaggcatcggtgcaggggacaaggggtcgtagctggaggggcctaggtgaggctgccgggaagggacgatgtggttggtggagtgcacaggcagggacctcactggactttcctgtctgctcggcatggacaggcagcccaggagaaggcagcacgtggccgggtgcagggacgtaccacccccacttccccaggggagctggggcagacgagtcccaggcactccatcctctgcagcaagtcaggttgtgatttactagggggtggtgaatataatggagagacttctggggaggaattcctggctcccgcgtggacttgcagagctcaacaggcagccacgtggctgagtgtccagcaaacatcacataaggctttgggtcctgcaggtggggctgccatgagcagcaagctcagtccagaagaacagttcctctccaggatccacttcctgcgcacttttatgtgcagtgtagctggagcagagctccccggaattccacaggcaactgagaacggagagggatgcaggccagccagggatccagcgtcttccccatcgtcactctccatggcctccgtctacacacagtgttcgtctgcacagcttgtcagcgcgttatcatgacttctatttggcaccggcccgtctgtccactgtcctggcttgttccaagcgctgccttctccaactggggtcctggctgcagagctgtctgctccccacgttgggcaactccagccaagattcctacacccaaatgtgaccgtgttgctcacgaagaaggctcagctttgcgtgtgcccagccgtgtgcacagctcgtcccaactcctgcgggtggcacctgcctctcccacctccagtctttcccctgtgatgagcagatgaccaccgccctccagggtcagcgtttggctgtttgtgtgcctgcccacccgcctccctgtgcctgggcctgccctgtgcctgcacacaggagtggctcatggcgtttgccctacacggatgggctgtcctgggagctactggacagtcaccttggtgggaatgccagaggcatgggcattaggtccccccggccagcctccgttgccacatgggctatttttgtccatcgcgtgggacaacctagtattgggggaaaactcagtccactctaaagaagcatcggcgttttggatggacgaatgctgcttcatgcgactccatgtcaatggactattttattcaactcgggtatttatgagtgtctcctctgtgccagccacgtgtgaaagaagaactccaagttactggacaccaggacaaaccaggtagatcactgcatccggttcctcctctttctgccgactctcccgggcaaccgttctgattcctggcatggagttgggggcgagctcatcagtacccagagcgcctggtgtgcagccaaaggcccccattttattagtcggtgtgttcagtatcacgctcaagacaagggccaacctattacttcacacacctcaaatacaaaaagtgcctgggaacgtcgatgaggtattaaaggaaaccactggtcttgtcagtcatgtacacacagaaaaaaaaaccagtcatttttatttttattttttgagacagagtttcgctcttgttgcccaggctggagtgcaatggtgcaatttcagctcactgcaatctctgccacccggattcaagcaattctcctgtctcagcctcccgagtagctggaattgcagacacccatcaccacgcccagctaattttatgtatttttagtagagatggggtttcaccatgttggtcaggctggtcttgaactcctgacctcaggtgatccacccacgtcaggctcccaaagtgctgagattacaggcatgaaccactgtgcccagccgaaaacaaccaagaattttttaacaataaaatgaccagcaagtaaacttgaaacaaaaatggacaaatatctaaaatatttttaaatgtatgtattttaattggcaaataatacttgtatatattgtttacaacttgttttaaagtatgaatacattgtggaatggctaaaaaaaaaaaaaaaaaaaaaaaaaaaaaaaaaaaaaaaaaaaaaaaaaaaaaaaaaaaaaaaaaaaaggaggggggcgcgcgcccccaattcccccccggggggcgccccttgccccccccctttttttaagggggcgccccccaaatgggaggcgggttcataataaaaagcacagcagcagacgagcgcgccgggttaaaacaacgggcgcgggtggagtggggagaataccacgagctgttcatcggggtgaacttgtgatgtgggagagagacacccccattctggcggcggggggggcgacactaattgtgggaacgacaacacaccagcgagaaattataaaccctccgcggggagaatataataaaaccttgcgcaggagagttgcagtggctggctgacccaccaccgacaatgagtccgcggccagagaaaagctgggccacagacgaagatagtttaggaacacatatgtccaccggagcaggtagagaan

SEQ ID NO: 39272 - DNA, 848 bp, Homo sapiens
tatcttttagagaccggatctcactctgttgtccaggctggagtgcagtggtatgagcacagctcactgtagcctcaaactgggctcacgattctcacactccaccctccccagtagtgaggactgtaggcacacaccactacacttgcctaattaaaaaaaaatttttttttttagagatgggatctcactatattgcccaggctggtctcaaactcttggacctgaagtgatcctcccaactcagcctcacaaagtgctgggattataggcatgagccaccatatccagcccaaaaatcttttaatattttttgcatattaataacctagcatcaggctacactacttgaatgctgaaaagagctaaagttctcttcagcacagtttgcaatattgtgtgttcgaggagtcagttgaagttgtgtggtacatggcattaaacaaaaagggaacgtgtcaatatcatctaacatggttgtgttaaagaggaaaagtattcagtctttgctttcacacctctcttagataatgaacagttactgaacaatgcatttgtaagtaagtgtgctgtatttgttacacccaagacagctctagctgtgttcaagcccagctggatgctagaactgcgagccactgtgaccttgccgtgtgagggtaagtgctccacacaacctggcagttgattattttaatgttgtagtatcaggactcttcccctagaagagtcagaggctttcttcttactttcagatgacaacagaacaaatttttacgagtaaagcaaacaaacaatggtccgattagaaaatcaaataaaaatttacaagtagccaaaactcaaaa

SEQ ID NO: 39273 - DNA, 985 bp, Homo sapiens
cctagagggaggaggctgagcaggcagagaatgggacgtgtcccctcagaggagcctcgagcccagttccagccagcggcccactcagtgaggtgctcaagtacccacgtcccccgccagctgccagggttccctctcctccctccgtccctccccccatctggggagcccagcggtactgagggggcggaacgaggcggggccaccgagcggttatagctgggcctgcaggggacccacggctcgcctccagcctcctgcgctccggtacctgggcgtcccaactccactgcgcgcccaaacccagccgagccggttcgtggcccgccccgccgggcggccgtcgacgcgagcgccctggcgtggcgcccaggggagcggggggctcccgcgagccggccgcggctggcactgctgctgcttctgctcctgctgccgctgccctccggcgcgtggtacaagcacgtggcgagtccccgctaccacacggtgggccgcgccgctggcctgctcatggggctgcgtcgctcaccctatctgtggcgccgcgcgctgcgcgcggccgccgggcccctggccagggacaccctctcccccgaacccgcagcccgcgaggctcctctcctgctgccctcgtgggttcaggagctgtggcagacgcgacgcaggagctcccaggcagggatccccgtccgtgcgccccggagcccgcgcgccccagagcctgcgctggaaccggagtccctggacttcagcggagctggccagagacttcggagagacgtctcccgcccagcggtggaccccgcagcaaaccgccttggcctgccctgcctggcccccggaccgttctgacagcgtcccccgcccgcccgtggcgcctccgcgcctgacccaggaggagtggccgcgcgcttccaggagccgctcatagaccccgcctgccgtccggtcaataaaatccgcctgactcctgcgcccccgc

SEQ ID NO: 39274 - DNA, 555 bp, Homo sapiens
ggccgctctaccatgagccgaccgctcgaaggtccgcgcggccacgcggccagccccgggctcctctgggccacgcgtgtcacgtcaacactcgccgggctccacgaactggcgttgtcagatgaaacacggcacaactggtttgcatctcagatgaacaaggggtcatgtcttagtcccgcgaggctcctctcctgctgccctcgtgggttcaggagctgtggcagacgcgacgcaggagctcccaggcagggatccccgtccgtgcgccccggagcccgcgcgccccagagcctgcgctggaaccggagtccctggacttcagcggagctggccagagacttcggagagacgtctcccgcccagcggtggaccccgcagcaaaccgccttggcctgccctgcctggcccccggaccgttctgacagcgtcccccgcccgcccgtggcgcctccgcgcctgacccaggaggagtggccgcgcgcttccaggagccgctcatagaccccgcctgccgtccggtcaataaaatccgcctgactcctgcgcccccgc

SEQ ID NO: 39275 - DNA, 279 bp, Homo sapiens
tacaatgtagggtttttgttgttgttatttttgttgttttagcctactttgggaaggtggaatgcgtagtgggttcagaaaatttggagcaccgtgagtgacagatgtctactgcaataattaccctgcaaggctgggctgggtgcagtggctcacatctgcagtcccagcactttgggaggccaaggtgggtagatcacttcaggtcaagagaccagcctgagcaacatggtgaaaccctgtctctaccaaaaaatataaaaagtagctgggcatggt

SEQ ID NO: 39276 - DNA, 373 bp, Homo sapiens
acattaattctacagtaactcaagaactatcatgtgtagttacctggccatataaatgataataaaaatgtgatagtttttagttttgttaacaaattctttttttttgttgttgagacagagtcttgctctgttgcccaggctggaatgcagtcacatgatcttggctcactgcaacctccacctcttgggttcaggttattctcatgcctcaccctcccaagtagttgggactacaggtgcgtgccaccacacctggctaatttttgtattttcattagagacagggtttcaccaggttggccaggctgacctcgaactcccggcctcatgtgatctacacgcctcagcctcctaaagcactgggattaca

SEQ ID NO: 39277 - DNA, 783 bp, Homo sapiens
cacccgccacgatgcctagctaaatttttgtatatgtggtagagatggagttttgccatgtggcccaggctagtctcgaactcctgaactcaagtgatccacctgctttggcctcccaacgtgctaggattacaggcatgagccattacgtctggcctagttttctttaaatacaccgtgtttactagcttaaattttgtgttgtttattactaaagcagaaaataatttagggtcttatcctgggtaaaatagccttccatcagatgagtacaaagcaagaacttcataagaaattgaaatgaagattcaaactgttaaagaaatgatttagtttcactttcctattaattattgagtaaatataaaacatcattaacactttgtggcctctctcagatgcctacaaagaaggaatgggtaggcatttatggtttatagttgcctcatcatgtaacatattatatctcagctctaaaagaaagttctatagaagattatagatagagattttgataactggaatgtagtatggatatagggctggtgtacatatacattttgaaattgctcttacaagattaaatactattatagaccagatgatgtagtaaaatggaatttcacttgccattgtgaaataggtgaaacaaattccagtttccttagatttcttccctctactttatgcaattatcactgattttatttttcgttgtaacaagtagttatttgttgtgtggatttcttaaaattgacatttaaacaataaaatcctgaaaag

SEQ ID NO: 39278 - DNA, 160 bp, Homo sapiens
cagaactcaccaaaaccagctctacatgtcattcccatctgctcaagccttaatactgacttcttccaatagaataagccctgcatccaaacaatctaatgctcacattttcattttaccagggaggaaacaggcttggagaagtaacttgcctgtgagc

SEQ ID NO: 39279 - DNA, 418 bp, Homo sapiens
tgagacaagggctcactctgtcacccatgctggagtgcagtggtgctatcttggctcactgcaacctccgcctcacgggttcaagcaattgtcctgcctcagcctcccaagtagctgggcttacagatgcacgccaccacacccagctaattttttttgtattttttggtagacatggagtttcaccatgttgaccaggctggtctcaaactcctgacctcaagtaatctgcccacctcggcctcccaaagtgctaggattacaggcgtgagccacagcacccagccctgtttacatttcttgactgtgaacagtgctgtatatggtctgtaagtgtgtaggtatgaaagttttgttaccttctggacccaattttttgttaataaaaaaatcatttaattattaattaaatcattac

SEQ ID NO: 39280 - DNA, 869 bp, Homo sapiens
gtggaggtgacactgggcgccttagaggagagagctgcgtgatgtatcaccactcaccagcccttgccggagacctgtttagagtgagattacagtctcagcagagcctctcatttctcctggtcacggggttacagagcactttacaacttgtgctacaggaaggcagggagggatttaaatgagagactggaagagaccctccataaacctcagccagagcagccctgactcacagatgaggatatagcaagaagatggtcatctgcaaaccaggaggaggatcctcaccagaacccaaccctgctggtaccttgatcttgaacttctcagcctccataacagctatcaacagggtaatggagtatggagtcacgccgatggagatttgtcttagatagtatgattagggaagacccttctgaattgagacctaaaggacaagaatgagctgcccacaaacaaaacaagaagaggataccagacaaaggatagagtgaagaaagaacattctcattcttccttctatgctgatggtacaagaaagtcctggaatcctaaggatctaggaaaaatcaacttgagaagtttctatgtggaagaaaactggctattagcttgggacttcagcaaggcacttagcaaggtctctcataatatcctgtggtcaagaagaaaaatataggctggatgactgtacaattaacatgattcatagctggctggaacaacttatgccaaaaagtgccaattaatggacggatatcaaactgaaggagctctccagatgttctacagcaatttgcctcttgcccagtggtgcctggtacctattatcaataacttggataaatatatagaatagttat

SEQ ID NO: 39281 - DNA, 307 bp, Homo sapiens
gaaaaaatgatttaattcaatttttatcaactccagcactattttctctattagagactactgtcattatccttctggtttctgttttaaagatactgattaaggaattttctttatagttccacataacagttggtcttctggtctgaaagtagtattacaggttttgttaggaaaacctataatacagtgttgcctgtcaccgtcattatagtgagtttgtgtttgtttggttttaaataaggctgaagcatcaatggctctttctgaaaaaattgttctccaaaagtaaagtgtgagctataga

SEQ ID NO: 39282 - DNA, 390 bp, Homo sapiens
aagacaggacttaccagactaggcctcatagagaacataagattcaaacttgacattgaaagatggataagacagtaggacacatgaatatgtatttgcgggggctgcaattttggaacacccactttataccagttattttcatatattacaacatttaatatctgtaaagacttttgttgtgattgtagggaaaagttttaggctaggcacttaggttactttacaagcatgatatgattgggtgataattattgcatcattccccaaggtagaattatataggtttctctgacctcaagaattctttgatttccatagcataagaaaagatttgggggaaaaaaatgaagaaaagagaaaggagcgaggaaggacatgctgtggaga

SEQ ID NO: 39283 - DNA, 321 bp, Homo sapiens
ggttgattccatagactgaaacttttaaaaaataagtaggatggtgttctctagtggtttgcttatcaagggactgcctccataaatagggtgaccattagtctgattggtttgcaagagagtccctagtttatgcctcttgaaccagcatatttttaaagagctcctcatttcataattaagtatcctggtttggacaataagttctatggtcgctgtactaataacatatccaaggctcaaacaattatttagctttggtatctctattatcagatgaaacagaggttaaagcacatcagtttagaaacattttttatc

SEQ ID NO: 39284 - DNA, 173 bp, Homo sapiens
taatagaatagacaaaaatagaaaaggaaaccataaatcattttcttaaacgatcaagaaaattaaacattcagctaaactgagcacaaaaaagggagagaagactcaaattactaaaatcaggaatgaatgaggggacattacttctgaccttccagtagttaaaaaaaaaa

SEQ ID NO: 39285 - DNA, 381 bp, Homo sapiens
tccaggcgcgagatgatgtggactgaaatggtgtggagacagtcggagggaactgcgagatcattgggtgtcagactgggtttgcaaacctacgacttcactgagaagtgagcaaaatgagtaacctgttcccctcaagcaatacagataatgtggagagatacttgtttccactggaacttcctcctccaccgaatccgactgctgtacctgtgtggataggtaacctacagaccgactgccccacctcaggagtcctgtgtgcttcacgactaaaatcctctggcactttcagcctcattgaagagagatgaaatccagttggctgtaaccagggacctggagtaatgtgatggtgtctattaccagggaatggtggtg

SEQ ID NO: 39286 - DNA, 479 bp, Homo sapiens
aaaatcactcataaacccaatttactaaattagaattgtagatattttccagtggcaataccctcttgtttaatcttgagccacccctcctcagagttagggcacctggaacaaagtattgtcatcaaatgtctgcaggtgaacaacaaaagaacagtggggggtgtatggcagggtattccatccaggcccgaaaagtcctgcctcaccccagaatactcacctctgtgtatccattcatccaacaagtatgaattgtgcaggtaccatgtattcagcaaactccgtcaggtcgaccttcaaaagaaatctcagtccagtacttcacgccacctgcacagtaatcatctaattcaggcaccatcttctcatgcctagagaaatggaacaggcccctaactggtctccctgtttccacctactgttcattcttcagccagcagtcagtctgatccttctaaaatgtaagtcagattacg

SEQ ID NO: 39287 - DNA, 362 bp, Homo sapiens
ggtaaaatggggtaacagttttgctgaaatcccccatttattatagaacggtgactctgggatgtattttctagaagctgaatagaatttacttttgagtttgggttattttacagtcttgtgctggcattattcatcagtatgactagtatcacacattgctttttctagtacagtaaattattaagagttacaagttcagggaatagctttatcctaaagacgaaagtggtaagagttttaaaaacagccaggcagcttttgccactgttttactggagaacattcagatgtctgtcattgagctttagaatgggtgtgggtggcagatggagttttccaggttgactttgttcagaatc

SEQ ID NO: 39288 - DNA, 430 bp, Homo sapiens
aaattctctcagcaatgagttgtgacaacacgtggaaaatgttgccaatcagagaagctcactagagactcagcacccaaagttttaactgggggctgatcatgtaggcagtctctacctggcaagtaccaatattccagactcccagagataaaccacattgttttagtataaaccatgttgtttgcacagacaatttaggcacagagagccactcttactcattccaggaatggtaggaaccctcccaaaacccaagttacaaatactagtcaaaggctaaccttatcagcaggcctttcaaagaataacagccagacctgctatgttaactcttttctacattatcagttataatttttaaattttattttattttattttattattttttttggagacaggatcttgctctgttgaccaggctgga

SEQ ID NO: 39289 - DNA, 308 bp, Homo sapiens
taggttgactaaaaatgcacatatccatggctgagacaagaatctgtaactgacaaagcagagaataatagcacccgggaatgtgttggtgggaagttttagttcttacatgttgccataaacccccaggagctgtgttgcagcccctgctttttccctgtgcatagaagcacagctgtgtctagataacagatagaaatctcttgtttttgggaaggtaagcccctcagtcatctctatggcataattcctgatcaagctgggccagtcatggcaattctagcccactttgcttctgattggcctac

SEQ ID NO: 39290 - DNA, 421 bp, Homo sapiens
tcagagctggtttctgcgaccatcagaatgcatcagcactgtctgtgttatctatattgtgggatttctcaaggctttcaatatgccaatgttaactgtgactctccaaaaagggtgtagtgtttcccaaatgtatttaaccatggaacttaactcttattttcttttgtcagagcatctctcagaacaagtctctagggacatatagcttgggaaactctgaaacacagagtcacaaaaagcataatgtttataatctagaatatctctgaggatcttaatccaaactatgttgctaatattaccatgaagtaactggtgagagtaatgagatgtaatgattttcatattttgccgatgaggaaactgagatgtagaaaattcaagcagatttcccatgattgctccgttgagaaatgtt

SEQ ID NO: 39291 - DNA, 881 bp, Homo sapiens
ctgatgaacattcttatcagttgaggacccacatgttaccttgtcctatttttgtctgttgtcccagggtagcagcctgtgtacatgggtatgtggcacttttgtaagaattagaaaaaggtatccccactctcaccttagctgaaggattaggaaaaagtgaccccttacgcctagatgcagctccaaacagacagcagatgagctttgtctattggatgtctttgctctactgtaatattgtcaaaaaacaaaggaaatgactacttagtgaattgtggttcatgtctacaaaattgtgtcttccttttctaagtatccagatgtcattttaataataggtttattcatttgttcagtatctgtgaaaagtttcttgcctcggtttcagactaaggcaaaaactggaactccatctgtccacctccagttttttagtgttcatctccctctgctgattctagctgagagtccttattggtaaactctccttgctgagatggaaatttactaggcaagaagaagttaagctttagacagctaggacatattttcttacaagcttcttcacctatcttttcagttaactctttgaaagcttattttatcccttacatttaatggtttatttttacataatagagaagacaaaaaaaagggaattagttttgtttagtcatccattttatctcaagcagaggcatcccttccatgttcttcttgtctgaacaaaacaaaatgttattttttgttgttgtcgtccttagtttattcttggctttagcctaaaataacagagtaacaatattacagggctgttacaggtatgcggcttctgttctcctcttgagtttaattcattaaactaaattttaaaaaaa

SEQ ID NO: 39292 - DNA, 669 bp, Homo sapiens
gcggccgcctactactactaaattcgcggccgcgtcgacgatttttacgtctattaaaagtacataaaggctctggaagcaaaatgcctagtttgcaagttcttctatttagcagctatataatctttagatagatgaatgatttttgtatgtcttagtttccttatctgtaatatgggactagtaatacaggtatttatattaaagatgagttcagataatcatagatggagagactcctggctctgttggtttgaagaggtaggcagatctttctgcaaaaagcaagtataaaactggaatgtattgtcaaaaacattacatcagggctctggaaattcaccaaagattaaaaaaaaaacacacattgggaaatattttttcctgaaaaattgatagagcttcaggtaaaagcagcggaagtctgtggccttcttgccaatacacatgtacccacatgcttggtcgataagatctgtagtttgttaccagagtggcactgcgtgcaaaaaccagaagctttgttgtcagagagaatggattaagtggctcatgcctgtaatcctagcacttatgaggcctaggtgggggattacttgaagtcaggagttcaagaccagcctggccaacatagtgaaaccccgtctctactaaaaatacaaaaatgag

SEQ ID NO: 39293 - DNA, 10007 bp, Homo sapiens
atggctgagagcgcctccccgccctcctcatctgcagcagccccagccgctgagccaggagtcaccacggagcagcccggaccccggagccccccatcctccccgccaggcctggaggagcctctggatggagctgatcctcatgtcccacacccagacctggcgcctattgccttcttctgcctgcgacagaccaccagcccccggaactggtgcatcaagatggtgtgcaacccgtggtttgaatgtgtcagcatgctggtgatcctgctgaactgcgtgacacttggcatgtaccagccgtgcgacgacatggactgcctgtccgaccgctgcaagatcctgcaggtctttgatgacttcatctttatcttctttgccatggagatggtgctcaagatggtggccctggggatttttggcaagaagtgctacctcggggacacatggaaccgcctggatttcttcatcgtcatggcagggatggtcgagtactccctggaccttcagaacatcaacctgtcagccatccgcaccgtgcgcgtcctgaggcccctcaaagccatcaaccgcgtgcccagtatgcggatcctggtgaacctgctcctggacacactgcccatgctggggaatgtcctgctgctctgcttctttgtcttcttcatctttggcatcataggtgtgcagctctgggcgggcctgctgcgtaaccgctgcttcctggaggagaacttcaccatacaaggggatgtggccttgcccccatactaccagccggaggaggatgatgagatgcccttcatctgctccctgtcgggcgacaatgggataatgggctgccatgagatccccccgctcaaggagcagggccgtgagtgctgcctgtccaaggacgacgtctacgactttggggcggggcgccaggacctcaatgccagcggcctctgtgtcaactggaaccgttactacaatgtgtgccgcacgggcagcgccaacccccacaagggtgccatcaactttgacaacatcggttatgcttggattgtcatcttccaggtgatcactctggaaggctgggtggagatcatgtactacgtgatggatgctcactccttctacaacttcatctacttcatcctgcttatcatagtgggctccttcttcatgatcaacctgtgcctcgttgtcatagcgacccagttctcggagaccaagcaacgggagcaccggctgatgctggagcagcggcagcgctacctgtcctccagcacggtggccagctacgccgagcctggcgactgctacgaggagatcttccagtatgtctgccacatcctgcgcaaggccaagcgccgcgccctgggcctctaccaggccctgcagagccggcgccaggccctgggcccggaggccccggcccccgccaaacctgggccccacgccaaggagccccggcactaccatgggaagactaagggtcagggagatgaagggagacatctcggaagccggcattgccagactttgcatgggcctgcctcccctggaaatgatcactcgggaagagagctgtgcccgcaacatagccccctggatgcgacgccccacaccctggtgcagcccatccccgccacgctggcttccgatcccgccagctgcccttgctgccagcatgaggacggccggcggccctcgggcctgggcagcaccgactcgggccaggagggctcgggctccgggagctccgctggtggcgaggacgaggcggatggggacggggcccggagcagcgaggacggagcctcctcagaactggggaaggaggaggaggaggaggagcaggcggatggggcggtctggctgtgcggggatgtgtggcgggagacgcgagccaagctgcgcggcatcgtggacagcaagtacttcaaccggggcatcatgatggccatcctggtcaacaccgtcagcatgggcatcgagcaccacgagcagccggaggagctgaccaacatcctggagatctgcaatgtggtcttcaccagcatgtttgccctggagatgatcctgaagctggctgcatttgggctcttcgactacctgcgtaacccctacaacatcttcgacagcatcattgtcatcatcagcatctgggagatcgtggggcaggcggacggtgggctgtcggtgctgcggaccttccggctgctgcgcgtgctgaaactggtgcgcttcatgcctgccctgcggcgccagctcgtggtgctcatgaagaccatggacaacgtggccaccttctgcatgctgctcatgctcttcatcttcatcttcagcatccttgggatgcatatttttggctgcaagttcagcctccgcacggacactggagacacggtgcccgacaggaagaacttcgactccctgctgtgggccatcgtcactgtgttccagatcctcacccaggaggactggaacgtcgttctctacaatggcatggcctccacttctccctgggcctccctctactttgtcgccctcatgaccttcggcaactatgtgctcttcaacctgctggtggccatcctggtggagggcttccaggcggagggtgacgccaatcgctcctactcggacgaggaccagagctcatccaacatagaagagtttgataagctccaggaaggcctggacagcagcggagatcccaagctctgcccaatccccatgacccccaatgggcacctggaccccagtctcccactgggtgggcacctaggtcctgctggggctgcgggacctgccccccgactctcactgcagccggaccccatgctggtggccctgggctcccgaaagagcagtgtcatgtctctagggaggatgagctatgaccagcgctccctgtccagctcccggagctcctactacgggccatggggccgcagcgcggcctgggccagccgtcgctccagctggaacagcctcaagcacaagccgccgtcggcggagcatgagtccctgctctctgcggagcgcggcggcggcgcccgggtctgcgaggttgccgcggacgaggggccgccgcgggccgcacccctgcacaccccacacgcccaccacattcatcacgggccccatctggcgcaccgccaccgccaccaccgccggacgctgtccctcgacaacagggactcggtggacctggccgagctggtgcccgcggtgggcgcccacccccgggccgcctggagggcggcaggcccggcccccgggcatgaggactgcaatggcaggatgcccagcatcgccaaagacgtcttcaccaagatgggcgaccgcggggatcgcggggaggatgaggaggaaatcgactacaccctgtgcttccgcgtccgcaagatgatcgacgtctataagcccgactggtgcgaggtccgcgaagactggtctgtctacctcttctctcccgagaacaggttccgggtcctgtgtcagaccattattgcccacaaactcttcgactacgtcgtcctggccttcatctttctcaactgcatcaccatcgccctggagcggcctcagatcgaggccggcagcaccgaacgcatctttctcaccgtgtccaactacatcttcacggccatcttcgtgggcgagatgacattgaaggtagtctcgctgggcctgtacttcggcgagcaggcgtacctacgcagcagctggaacgtgctggatggctttcttgtcttcgtgtccatcatcgacatcgtggtgtccctggcctcagccgggggagccaagatcttgggggtcctccgagtcttgcggctcctgcgcaccctacgccccctgcgtgtcatcagccgggcgccgggcctgaagctggtggtggagacactcatctcctccctcaagcccatcggcaacatcgtgctcatctgctgtgccttcttcatcatctttggcatcctgggagtgcagctcttcaagggcaagttctaccactgtctgggcgtggacacccgcaacatcaccaaccgctcggactgcatggccgccaactaccgctgggtccatcacaaatacaacttcgacaacctgggccaggctctgatgtccctctttgtcctggcatccaaggatggttgggtgaacatcatgtacaatggactggatgctgttgctgtggaccagcagcctgtgaccaaccacaacccctggatgctgctgtacttcatctccttcctgctcatcgtcagcttctttgtgctcaacatgtttgtgggtgtcgtggtggagaacttccacaagtgccggcagcaccaggaggctgaagaggcacggcggcgtgaggagaagcggctgcggcgcctggagaagaagcgccggaaggcccagcggctgccctactatgccacctattgtcacacccggctgctcatccactccatgtgcaccagccactacctggacatcttcatcaccttcatcatctgcctcaacgtggtcaccatgtccctggagcactacaatcagcccacgtccctggagacagccctcaagtactgcaactatatgttcaccactgtctttgtgctggaggctgtgctgaagctggtggcatttggtctgaggcgcttcttcaaggaccgatggaaccagctggacctggccattgtgctactgtcagtcatgggcatcaccctggaggagatcgagatcaatgcggccctgcccatcaatcccaccatcatccgcatcatgagggttctgcgcattgcccgagtgctgaagctgttgaagatggccacaggaatgcgggccctgctggacacggtggtgcaagctttgccccaggtgggcaacctgggcctcctcttcatgctgctcttcttcatctatgctgctctcggggtggagctctttgggaagctggtctgcaacgacgagaacccgtgcgagggcatgagccggcatgccaccttcgagaacttcggcatggccttcctcacactcttccaggtctccacgggtgacaactggaacgggatcatgaaggacacgctgcgggactgcacccacgacgagcgcagctgcctgagcagcctgcagtttgtgtcgccgctgtacttcgtgagcttcgtgctcaccgcgcagttcgtgctcatcaacgtggtggtggctgtgctcatgaagcacctggacgacagcaacaaggaggcgcaggaggacgccgagatggatgccgagctcgagctggagatggcccatggcctgggccctggcccgaggctgcctaccggctccccgggcgcccctggccgagggccgggaggggcgggcggcgggggcgacaccgagggcggcttgtgccggcgctgctactcgcctgcccaggagaacctgtggctggacagcgtctctttaatcatcaaggactccttggagggggagctgaccatcatcgacaacctgtcgggctccatcttccaccactactcctcgcctgccggctgcaagaagtgtcaccacgacaagcaagaggtgcagctggctgagacggaggccttctccctgaactcagacaggtcctcgtccatcctgctgggtgacgacctgagtctcgaggaccccacagcctgcccacctggccgcaaagacagcaagggtgagctggacccacctgagcccatgcgtgtgggagacctgggcgaatgcttcttccccttgtcctctacggccgtctcgccggatccagagaacttcctgtgtgagatggaggagatcccattcaaccctgtccggtcctggctgaaacatgacagcagtcaagcacccccaagtcccttctccccggatgcctccagccctctcctgcccatgccagccgagttcttccaccctgcagtgtctgccagccagaaaggcccagaaaagggcactggcactggaaccctccccaagattgcgctgcagggctcctgggcatctctgcggtcaccaagggtcaactgtaccctcctccggcaggccaccgggagcgacacgtcgctggacgccagccccagcagctccgcgggcagcctgcagaccacgctcgaggacagcctgaccctgagcgacagcccccggcgtgccctggggccgcccgcgcctgctccaggaccccgggccggcctgtcccccgccgctcgccgccgcctgagcctgcgcggccggggcctcttcagcctgcgggggctgcgggcgcatcagcgcagccacagcagcgggggctccaccagcccgggctgcacccaccacgactccatggacccctcggacgaggagggccgcggtggcgcgggcggcgggggcgcgggcagcgagcactcggagaccctcagcagcctctcgctcacctccctcttctgcccgccgcccccgccgccagcccccggcctcacgcccgccaggaagttcagcagcaccagcagcctggccgcccccggccgcccccacgccgccgccctggcccacggcctggcccggagcccctcgtgggccgcggaccgcagcaaggacccccccggccgggcaccgctgcccatgggcctgggccccttggcgcccccgccgcaaccgctccccggagagctggagccgggagacgccgccagcaagaggaagagatgagggtcgcaggggcccccggccgcccaccgcccgccccgtctcaccttctttacctcaggagccaggagcagacagcaatacttcgtccacacctgggatcgcgcagggcccgcagggcacaggcgcccgacagccgggctgagcggagtctgggttagccaggcctgcgtggcccatggtggcccttccagtgcatatacatacatatatatatatatatgcatatatatatatatatatatatatatgtgtatacacacacacatagacagacatatatatatatatttattttttttactgagagcttatgacttccagaaagtgctaaaggtgggaggtgggccagggcctggacggggcttttgtctgatgctctgggattctggccagacccaccccagggcacatgtcctgcgggggcgtcccagctgtgttttttgatgtctcctccctggttaagagtagcttggagaggaccctcaggcctctgagggcaccaggccctggagaagaggtgcaattcagggtgtgtgtgtgttttttttcctttaaagaagaaacgctgctaagatcccacgtggctcccacgtgtcggggtgtctgtcctgtcatcctgactgtctcgttattgtgaagtctttcgtagacaccccagagcacacacatccccttagtccaccggttagatgtctctctttagaaaaatcaggggtgagtagctgtgtttccttaggcctggggtaggggatggagagcagctccaaggctgagctggggctctggccccaggtgaggtccccagctcctgagcacttctgagggggtgggttccacccccaggagggcgggggtgggtggagcaggagtggaggcagcctgcagaggaagggtgcgggagactgagccggcagtggcttgcttggaggggctagggtacccgcctggtctcggctggctccagctgccctgcaggtgcccctgggctcaggtagttagttgttcagccactaatgccttttatcccccatatgggcgctgagctgtggctgttcctggacactgtgctgtccccgtcctgagcaactatgcccccgccccagtaggttcaaggcaaagcagctctgaccgaattctaggcaggggtgggggcacctgcctgggccctgggtccagccgcatccccatgcccagcctttcgcgtcacctggaggccacatcttcccaccccacctgccagcccctgtctctcctccccgctgcccctaactgcagctcagctttcactatagcagtgcttcccaaacgggttctagacttgggtgtttgatttgaagagttacgcatttatttcactatttattgggaaaaaaatgcattgaacccgtgatttcacagacattttgcttaggtcaaggctactttttaaaaagggagtgactttcatgaagtcagtttgaagaaggaggttgggagcatgttggtggcagtgatctggagaggctgcaggggccacgagtttgcagatgctgtacttcagcaataaccttgcctttgctaagaccccctccgagggcttcaggggggcctgccaagggggggccttgttcttgttcccaaactctgacttggaagaactcagcttgtggccgggctggtgagggtgtggggtgcgcccttcccttttgggctgagggagagggggccgggaggggttgtcaagcccacccgggaaactgagccctggagaggggaagcagccagcccaggatgcttcagggccctggcagcaaagaagctggggtggtgtggagggccctactccacaccctagagctgtgatgctgagcaaggtgcctgtggcggaaggaactgcccagtcctccctgggggcaggtagacctgtggggatggctcggtccaagcccaacactgcccgctccagagagcctcagccctgcctccctttccacagaggtggttttatgtggaacgaggtaccttgtctggggaagaagtggagctgggcaggcttgactgctcctggctgaccctgagctctcgcagttggagggaagcagacagacttgactttttgcaagtccgcgtgttgctggagggacacgtgtattggagcccagaagaggggctgtgtggcctgggaataccatgtggaaggttgggcttcaagttaacaggatcagacaccagtcaagcagcctcaggtcatcttgcgactccactgagcagcctttcctgttgtcacatgggttcagagcagctgagcagggaacacgtcctaggcaggtctgacgtgaaacctccccttaccctgaaccgtgtgactctgcaagcagacacctcgaggcaggtgttctaggcaaagggatgggcatgagcgaaggctccagggtccacagagcagggagtgtggagaaggtggaagagctgagctcagaggcagagaagctccttgcagggagcactgggagatggcctggcccgtcccaggctcctggaggccccacctgccgatcccaggcacttgaccttgttcctgtgggtgacagagatgagaaccagggaagctgtgatccactggccaggacaagtcaacatgggtgagggttgggcaaagggcccttccttcctccccaaccctgtggtctggggccatggcctcaggcttgtgtctatcacaaaagcacaaacttgccctaacccacatgggcctggctgtggggaaagtggggacccaggtccctgagctgtctgctgggctccgtagagcggtggtgggcaggcaccttggcatctgtgcagagacggcccagtctggccaaatcctcttcctctcccctgctctaccttctccggcaccaggcagccccttaaaggaggacaaagtgtgtaaagcccgtctgctgtcttcccccaaatcctcagctcagagccttccgcttccagggccaaccccagccccgtttgctgcgttgtgtaagggcttggggtcttagaagctgctctttagcccagatacacatactcttttttgtctttgtgcaataatcagtgttcctggcagagcctgggccaagctgcagcctactgaggaggcagaggccacctcctccagaaagccctcggcctgggccgccgccgtgactctagcactctcagtcgctgtacagtttctatggtgtgaatgaacttccctcctagttgctgatggcgctggtacctgctggcccatggcccgggtgtagagaaaccaagcggcagccaccaccagtgttgttttgaataaaagcccagaagcctatttaagaatttct

SEQ ID NO: 39294 - DNA, 6740 bp, Homo sapiens
atggctgagagcgcctccccgccctcctcatctgcagcagccccagccgctgagccaggagtcaccacggagcagcccggaccccggagccccccatcctccccgccaggcctggaggagcctctggatggagctgatcctcatgtcccacacccagacctggcgcctattgccttcttctgcctgcgacagaccaccagcccccggaactggtgcatcaagatggtgtgcaacccgtggtttgaatgtgtcagcatgctggtgatcctgctgaactgcgtgacacttggcatgtaccagccgtgcgacgacatggactgcctgtccgaccgctgcaagatcctgcaggtctttgatgacttcatctttatcttctttgccatggagatggtgctcaagatggtggccctggggatttttggcaagaagtgctacctcggggacacatggaaccgcctggatttcttcatcgtcatggcagggatggtcgagtactccctggaccttcagaacatcaacctgtcagccatccgcaccgtgcgcgtcctgaggcccctcaaagccatcaaccgcgtgcccagtatgcggatcctggtgaacctgctcctggacacactgcccatgctggggaatgtcctgctgctctgcttctttgtcttcttcatctttggcatcataggtgtgcagctctgggcgggcctgctgcgtaaccgctgcttcctggaggagaacttcaccatacaaggggatgtggccttgcccccatactaccagccggaggaggatgatgagatgcccttcatctgctccctgtcgggcgacaatgggataatgggctgccatgagatccccccgctcaaggagcagggccgtgagtgctgcctgtccaaggacgacgtctacgactttggggcggggcgccaggacctcaatgccagcggcctctgtgtcaactggaaccgttactacaatgtgtgccgcacgggcagcgccaacccccacaagggtgccatcaactttgacaacatcggttatgcttggattgtcatcttccaggtgatcactctggaaggctgggtggagatcatgtactacgtgatggatgctcactccttctacaacttcatctacttcatcctgcttatcatagtgggctccttcttcatgatcaacctgtgcctcgttgtcatagcgacccagttctcggagaccaagcaacgggagcaccggctgatgctggagcagcggcagcgctacctgtcctccagcacggtggccagctacgccgagcctggcgactgctacgaggagatcttccagtatgtctgccacatcctgcgcaaggccaagcgccgcgccctgggcctctaccaggccctgcagagccggcgccaggccctgggcccggaggccccggcccccgccaaacctgggccccacgccaaggagccccggcactaccatgggaagactaagggtcagggagatgaagggagacatctcggaagccggcattgccagactttgcatgggcctgcctcccctggaaatgatcactcgggaagagagctgtgcccgcaacatagccccctggatgcgacgccccacaccctggtgcagcccatccccgccacgctggcttccgatcccgccagctgcccttgctgccagcatgaggacggccggcggccctcgggcctgggcagcaccgactcgggccaggagggctcgggctccgggagctccgctggtggcgaggacgaggcggatggggacggggcccggagcagcgaggacggagcctcctcagaactggggaaggaggaggaggaggaggagcaggcggatggggcggtctggctgtgcggggatgtgtggcgggagacgcgagccaagctgcgcggcatcgtggacagcaagtacttcaaccggggcatcatgatggccatcctggtcaacaccgtcagcatgggcatcgagcaccacgagcagccggaggagctgaccaacatcctggagatctgcaatgtggtcttcaccagcatgtttgccctggagatgatcctgaagctggctgcatttgggctcttcgactacctgcgtaacccctacaacatcttcgacagcatcattgtcatcatcagcatctgggagatcgtggggcaggcggacggtgggctgtcggtgctgcggaccttccggctgctgcgcgtgctgaaactggtgcgcttcatgcctgccctgcggcgccagctcgtggtgctcatgaagaccatggacaacgtggccaccttctgcatgctgctcatgctcttcatcttcatcttcagcatccttgggatgcatatttttggctgcaagttcagcctccgcacggacactggagacacggtgcccgacaggaagaacttcgactccctgctgtgggccatcgtcactgtgttccagatcctcacccaggaggactggaacgtcgttctctacaatggcatggcctccacttctccctgggcctccctctactttgtcgccctcatgaccttcggcaactatgtgctcttcaacctgctggtggccatcctggtggagggcttccaggcggagggtgacgccaatcgctcctactcggacgaggaccagagctcatccaacatagaagagtttgataagctccaggaaggcctggacagcagcggagatcccaagctctgcccaatccccatgacccccaatgggcacctggaccccagtctcccactgggtgggcacctaggtcctgctggggctgcgggacctgccccccgactctcactgcagccggaccccatgctggtggccctgggctcccgaaagagcagtgtcatgtctctagggaggatgagctatgaccagcgctccctgtccagctcccggagctcctactacgggccatggggccgcagcgcggcctgggccagccgtcgctccagctggaacagcctcaagcacaagccgccgtcggcggagcatgagtccctgctctctgcggagcgcggcggcggcgcccgggtctgcgaggttgccgcggacgaggggccgccgcgggccgcacccctgcacaccccacacgcccaccacattcatcacgggccccatctggcgcaccgccaccgccaccaccgccggacgctgtccctcgacaacagggactcggtggacctggccgagctggtgcccgcggtgggcgcccacccccgggccgcctggagggcggcaggcccggcccccgggcatgaggactgcaatggcaggatgcccagcatcgccaaagacgtcttcaccaagatgggcgaccgcggggatcgcggggaggatgaggaggaaatcgactacaccctgtgcttccgcgtccgcaagatgatcgacgtctataagcccgactggtgcgaggtccgcgaagactggtctgtctacctcttctctcccgagaacaggttccgggtcctgtgtcagaccattattgcccacaaactcttcgactacgtcgtcctggccttcatctttctcaactgcatcaccatcgccctggagcggcctcagatcgaggccggcagcaccgaacgcatctttctcaccgtgtccaactacatcttcacggccatcttcgtgggcgagatgacattgaaggtagtctcgctgggcctgtacttcggcgagcaggcgtacctacgcagcagctggaacgtgctggatggctttcttgtcttcgtgtccatcatcgacatcgtggtgtccctggcctcagccgggggagccaagatcttgggggtcctccgagtcttgcggctcctgcgcaccctacgccccctgcgtgtcatcagccgggcgccgggcctgaagctggtggtggagacactcatctcctccctcaagcccatcggcaacatcgtgctcatctgctgtgccttcttcatcatctttggcatcctgggagtgcagctcttcaagggcaagttctaccactgtctgggcgtggacacccgcaacatcaccaaccgctcggactgcatggccgccaactaccgctgggtccatcacaaatacaacttcgacaacctgggccaggctctgatgtccctctttgtcctggcatccaaggatggttgggtgaacatcatgtacaatggactggatgctgttgctgtggaccagcagcctgtgaccaaccacaacccctggatgctgctgtacttcatctccttcctgctcatcgtcagcttctttgtgctcaacatgtttgtgggtgtcgtggtggagaacttccacaagtgccggcagcaccaggaggctgaagaggcacggcggcgtgaggagaagcggctgcggcgcctggagaagaagcgccggaaggcccagcggctgccctactatgccacctattgtcacacccggctgctcatccactccatgtgcaccagccactacctggacatcttcatcaccttcatcatctgcctcaacgtggtcaccatgtccctggagcactacaatcagcccacgtccctggagacagccctcaagtactgcaactatatgttcaccactgtctttgtgctggaggctgtgctgaagctggtggcatttggtctgaggcgcttcttcaaggaccgatggaaccagctggacctggccattgtgctactgtcagtcatgggcatcaccctggaggagatcgagatcaatgcggccctgcccatcaatcccaccatcatccgcatcatgagggttctgcgcattgcccgagtgctgaagctgttgaagatggccacaggaatgcgggccctgctggacacggtggtgcaagctttgccccaggtgggcaacctgggcctcctcttcatgctgctcttcttcatctatgctgctctcggggtggagctctttgggaagctggtctgcaacgacgagaacccgtgcgagggcatgagccggcatgccaccttcgagaacttcggcatggccttcctcacactcttccaggtctccacgggtgacaactggaacgggatcatgaaggacacgctgcgggactgcacccacgacgagcgcagctgcctgagcagcctgcagtttgtgtcgccgctgtacttcgtgagcttcgtgctcaccgcgcagttcgtgctcatcaacgtggtggtggctgtgctcatgaagcacctggacgacagcaacaaggaggcgcaggaggacgccgagatggatgccgagctcgagctggagatggcccatggcctgggccctggcccgaggctgcctaccggctccccgggcgcccctggccgagggccgggaggggcgggcggcgggggcgacaccgagggcggcttgtgccggcgctgctactcgcctgcccaggagaacctgtggctggacagcgtctctttaatcatcaaggactccttggagggggagctgaccatcatcgacaacctgtcgggctccatcttccaccactactcctcgcctgccggctgcaagaagtgtcaccacgacaagcaagaggtgcagctggctgagacggaggccttctccctgaactcagacaggtcctcgtccatcctgctgggtgacgacctgagtctcgaggaccccacagcctgcccacctggccgcaaagacagcaagggtgagctggacccacctgagcccatgcgtgtgggagacctgggcgaatgcttcttccccttgtcctctacggccgtctcgccggatccagagaacttcctgtgtgagatggaggagatcccattcaaccctgtccggtcctggctgaaacatgacagcagtcaagcacccccaagtcccttctccccggatgcctccagccctctcctgcccatgccagccgagttcttccaccctgcagtgtctgccagccagaaaggcccagaaaagggcactggcactggaaccctccccaagattgcgctgcagggctcctgggcatctctgcggtcaccaagggtcaactgtaccctcctccggcaggtaccgacacctcccaggccctagagcactggtctgtgggcaaggggcaggatctaagccaggcctggaagtccaagggactgggaggggaaggacccaaccaaaggccgagggcaccaccgtgcaagggggtttgggaacgctggggtgacgctgagactggagggggaggtggcactggggcggatggagtgggcggggctgggtcctggggacagcagagtgtggggaggaccccaaggcgggtctggaagaggcctgtgatccctagcttgaggggaggggaggagaggaggaggagtactggaggttttgcagggtggcggggtgctggcagtggggaggacaccctgggtgctctgggtgggtgtgagtgggggcttgattactaggaatggaggtgggagggcgggtctggtggatgagaagcctcgggctgcagggtcccccgtactggattggccagggccacagccctcctacccacgggcacacagaggtctgaagcactgagggctccgctgtgggggtggggaaatggggccgggccggctcccacagtgagtgcagttgattcactgggtgactgtctgacccgtcacaccaggctgtgtgctctggcgggcaggacacaaactccctgcctgccgggctcactgtttagtgctgagagtgagctgcctgggtgcaggagggatgataaccaaaataaa

SEQ ID NO: 39295 - DNA, 6635 bp, Homo sapiens
atggctgagagcgcctccccgccctcctcatctgcagcagccccagccgctgagccaggagtcaccacggagcagcccggaccccggagccccccatcctccccgccaggcctggaggagcctctggatggagctgatcctcatgtcccacacccagacctggcgcctattgccttcttctgcctgcgacagaccaccagcccccggaactggtgcatcaagatggtgtgcaacccgtggtttgaatgtgtcagcatgctggtgatcctgctgaactgcgtgacacttggcatgtaccagccgtgcgacgacatggactgcctgtccgaccgctgcaagatcctgcaggtctttgatgacttcatctttatcttctttgccatggagatggtgctcaagatggtggccctggggatttttggcaagaagtgctacctcggggacacatggaaccgcctggatttcttcatcgtcatggcagggatggtcgagtactccctggaccttcagaacatcaacctgtcagccatccgcaccgtgcgcgtcctgaggcccctcaaagccatcaaccgcgtgcccagtatgcggatcctggtgaacctgctcctggacacactgcccatgctggggaatgtcctgctgctctgcttctttgtcttcttcatctttggcatcataggtgtgcagctctgggcgggcctgctgcgtaaccgctgcttcctggaggagaacttcaccatacaaggggatgtggccttgcccccatactaccagccggaggaggatgatgagatgcccttcatctgctccctgtcgggcgacaatgggataatgggctgccatgagatccccccgctcaaggagcagggccgtgagtgctgcctgtccaaggacgacgtctacgactttggggcggggcgccaggacctcaatgccagcggcctctgtgtcaactggaaccgttactacaatgtgtgccgcacgggcagcgccaacccccacaagggtgccatcaactttgacaacatcggttatgcttggattgtcatcttccaggtgatcactctggaaggctgggtggagatcatgtactacgtgatggatgctcactccttctacaacttcatctacttcatcctgcttatcatagtgggctccttcttcatgatcaacctgtgcctcgttgtcatagcgacccagttctcggagaccaagcaacgggagcaccggctgatgctggagcagcggcagcgctacctgtcctccagcacggtggccagctacgccgagcctggcgactgctacgaggagatcttccagtatgtctgccacatcctgcgcaaggccaagcgccgcgccctgggcctctaccaggccctgcagagccggcgccaggccctgggcccggaggccccggcccccgccaaacctgggccccacgccaaggagccccggcactaccagctgtgcccgcaacatagccccctggatgcgacgccccacaccctggtgcagcccatccccgccacgctggcttccgatcccgccagctgcccttgctgccagcatgaggacggccggcggccctcgggcctgggcagcaccgactcgggccaggagggctcgggctccgggagctccgctggtggcgaggacgaggcggatggggacggggcccggagcagcgaggacggagcctcctcagaactggggaaggaggaggaggaggaggagcaggcggatggggcggtctggctgtgcggggatgtgtggcgggagacgcgagccaagctgcgcggcatcgtggacagcaagtacttcaaccggggcatcatgatggccatcctggtcaacaccgtcagcatgggcatcgagcaccacgagcagccggaggagctgaccaacatcctggagatctgcaatgtggtcttcaccagcatgtttgccctggagatgatcctgaagctggctgcatttgggctcttcgactacctgcgtaacccctacaacatcttcgacagcatcattgtcatcatcagcatctgggagatcgtggggcaggcggacggtgggctgtcggtgctgcggaccttccggctgctgcgcgtgctgaaactggtgcgcttcatgcctgccctgcggcgccagctcgtggtgctcatgaagaccatggacaacgtggccaccttctgcatgctgctcatgctcttcatcttcatcttcagcatccttgggatgcatatttttggctgcaagttcagcctccgcacggacactggagacacggtgcccgacaggaagaacttcgactccctgctgtgggccatcgtcactgtgttccagatcctcacccaggaggactggaacgtcgttctctacaatggcatggcctccacttctccctgggcctccctctactttgtcgccctcatgaccttcggcaactatgtgctcttcaacctgctggtggccatcctggtggagggcttccaggcggagggtgacgccaatcgctcctactcggacgaggaccagagctcatccaacatagaagagtttgataagctccaggaaggcctggacagcagcggagatcccaagctctgcccaatccccatgacccccaatgggcacctggaccccagtctcccactgggtgggcacctaggtcctgctggggctgcgggacctgccccccgactctcactgcagccggaccccatgctggtggccctgggctcccgaaagagcagtgtcatgtctctagggaggatgagctatgaccagcgctccctgtccagctcccggagctcctactacgggccatggggccgcagcgcggcctgggccagccgtcgctccagctggaacagcctcaagcacaagccgccgtcggcggagcatgagtccctgctctctgcggagcgcggcggcggcgcccgggtctgcgaggttgccgcggacgaggggccgccgcgggccgcacccctgcacaccccacacgcccaccacattcatcacgggccccatctggcgcaccgccaccgccaccaccgccggacgctgtccctcgacaacagggactcggtggacctggccgagctggtgcccgcggtgggcgcccacccccgggccgcctggagggcggcaggcccggcccccgggcatgaggactgcaatggcaggatgcccagcatcgccaaagacgtcttcaccaagatgggcgaccgcggggatcgcggggaggatgaggaggaaatcgactacaccctgtgcttccgcgtccgcaagatgatcgacgtctataagcccgactggtgcgaggtccgcgaagactggtctgtctacctcttctctcccgagaacaggttccgggtcctgtgtcagaccattattgcccacaaactcttcgactacgtcgtcctggccttcatctttctcaactgcatcaccatcgccctggagcggcctcagatcgaggccggcagcaccgaacgcatctttctcaccgtgtccaactacatcttcacggccatcttcgtgggcgagatgacattgaaggtagtctcgctgggcctgtacttcggcgagcaggcgtacctacgcagcagctggaacgtgctggatggctttcttgtcttcgtgtccatcatcgacatcgtggtgtccctggcctcagccgggggagccaagatcttgggggtcctccgagtcttgcggctcctgcgcaccctacgccccctgcgtgtcatcagccgggcgccgggcctgaagctggtggtggagacactcatctcctccctcaagcccatcggcaacatcgtgctcatctgctgtgccttcttcatcatctttggcatcctgggagtgcagctcttcaagggcaagttctaccactgtctgggcgtggacacccgcaacatcaccaaccgctcggactgcatggccgccaactaccgctgggtccatcacaaatacaacttcgacaacctgggccaggctctgatgtccctctttgtcctggcatccaaggatggttgggtgaacatcatgtacaatggactggatgctgttgctgtggaccagcagcctgtgaccaaccacaacccctggatgctgctgtacttcatctccttcctgctcatcgtcagcttctttgtgctcaacatgtttgtgggtgtcgtggtggagaacttccacaagtgccggcagcaccaggaggctgaagaggcacggcggcgtgaggagaagcggctgcggcgcctggagaagaagcgccggaaggcccagcggctgccctactatgccacctattgtcacacccggctgctcatccactccatgtgcaccagccactacctggacatcttcatcaccttcatcatctgcctcaacgtggtcaccatgtccctggagcactacaatcagcccacgtccctggagacagccctcaagtactgcaactatatgttcaccactgtctttgtgctggaggctgtgctgaagctggtggcatttggtctgaggcgcttcttcaaggaccgatggaaccagctggacctggccattgtgctactgtcagtcatgggcatcaccctggaggagatcgagatcaatgcggccctgcccatcaatcccaccatcatccgcatcatgagggttctgcgcattgcccgagtgctgaagctgttgaagatggccacaggaatgcgggccctgctggacacggtggtgcaagctttgccccaggtgggcaacctgggcctcctcttcatgctgctcttcttcatctatgctgctctcggggtggagctctttgggaagctggtctgcaacgacgagaacccgtgcgagggcatgagccggcatgccaccttcgagaacttcggcatggccttcctcacactcttccaggtctccacgggtgacaactggaacgggatcatgaaggacacgctgcgggactgcacccacgacgagcgcagctgcctgagcagcctgcagtttgtgtcgccgctgtacttcgtgagcttcgtgctcaccgcgcagttcgtgctcatcaacgtggtggtggctgtgctcatgaagcacctggacgacagcaacaaggaggcgcaggaggacgccgagatggatgccgagctcgagctggagatggcccatggcctgggccctggcccgaggctgcctaccggctccccgggcgcccctggccgagggccgggaggggcgggcggcgggggcgacaccgagggcggcttgtgccggcgctgctactcgcctgcccaggagaacctgtggctggacagcgtctctttaatcatcaaggactccttggagggggagctgaccatcatcgacaacctgtcgggctccatcttccaccactactcctcgcctgccggctgcaagaagtgtcaccacgacaagcaagaggtgcagctggctgagacggaggccttctccctgaactcagacaggtcctcgtccatcctgctgggtgacgacctgagtctcgaggaccccacagcctgcccacctggccgcaaagacagcaagggtgagctggacccacctgagcccatgcgtgtgggagacctgggcgaatgcttcttccccttgtcctctacggccgtctcgccggatccagagaacttcctgtgtgagatggaggagatcccattcaaccctgtccggtcctggctgaaacatgacagcagtcaagcacccccaagtcccttctccccggatgcctccagccctctcctgcccatgccagccgagttcttccaccctgcagtgtctgccagccagaaaggcccagaaaagggcactggcactggaaccctccccaagattgcgctgcagggctcctgggcatctctgcggtcaccaagggtcaactgtaccctcctccggcaggtaccgacacctcccaggccctagagcactggtctgtgggcaaggggcaggatctaagccaggcctggaagtccaagggactgggaggggaaggacccaaccaaaggccgagggcaccaccgtgcaagggggtttgggaacgctggggtgacgctgagactggagggggaggtggcactggggcggatggagtgggcggggctgggtcctggggacagcagagtgtggggaggaccccaaggcgggtctggaagaggcctgtgatccctagcttgaggggaggggaggagaggaggaggagtactggaggttttgcagggtggcggggtgctggcagtggggaggacaccctgggtgctctgggtgggtgtgagtgggggcttgattactaggaatggaggtgggagggcgggtctggtggatgagaagcctcgggctgcagggtcccccgtactggattggccagggccacagccctcctacccacgggcacacagaggtctgaagcactgagggctccgctgtgggggtggggaaatggggccgggccggctcccacagtgagtgcagttgattcactgggtgactgtctgacccgtcacaccaggctgtgtgctctggcgggcaggacacaaactccctgcctgccgggctcactgtttagtgctgagagtgagctgcctgggtgcaggagggatgataaccaaaataaa

SEQ ID NO: 39296 - DNA, 4560 bp, Homo sapiens
gaagtcactaactgcctggggcatccagtgggcattcggaggtggattcctttcacgggattttggaagatggtcaggtagaggaggtgagaggaaggtcagactagacatgagggtagcctagttaagcaaggggccgtggagcaggtcatgaggtacccttcatgagctgtcccccttcccagtcctgccccatcctacctccctttccttgcagggtgagctggacccacctgagcccatgcgtgtgggagacctgggcgaatgcttcttccccttgtcctctacggccgtctcgccggatccagagaacttcctgtgtgagatggaggagatcccattcaaccctgtccggtcctggctgaaacatgacagcagtcaagcacccccaagtcccttctccccggatgcctccagccctctcctgcccatgccagccgagttcttccaccctgcagtgtctgccagccagaaaggcccagaaaagggcactggcactggaaccctccccaagattgcgctgcagggctcctgggcatctctgcggtcaccaagggtcaactgtaccctcctccggcaggccaccgggagcgacacgtcgctggacgccagccccagcagctccgcgggcagcctgcagaccacgctcgaggacagcctgaccctgagcgacagcccccggcgtgccctggggccgcccgcgcctgctccaggaccccgggccggcctgtcccccgccgctcgccgccgcctgagcctgcgcggccggggcctcttcagcctgcgggggctgcgggcgcatcagcgcagccacagcagcgggggctccaccagcccgggctgcacccaccacgactccatggacccctcggacgaggagggccgcggtggcgcgggcggcgggggcgcgggcagcgagcactcggagaccctcagcagcctctcgctcacctccctcttctgcccgccgcccccgccgccagcccccggcctcacgcccgccaggaagttcagcagcaccagcagcctggccgcccccggccgcccccacgccgccgccctggcccacggcctggcccggagcccctcgtgggccgcggaccgcagcaaggacccccccggccgggcaccgctgcccatgggcctgggccccttggcgcccccgccgcaaccgctccccggagagctggagccgggagacgccgccagcaagaggaagagatgagggtcgcaggggcccccggccgcccaccgcccgccccgtctcaccttctttacctcaggagccaggagcagacagcaatacttcgtccacacctgggatcgcgcagggcccgcagggcacaggcgcccgacagccgggctgagcggagtctgggttagccaggcctgcgtggcccatggtggcccttccagtgcatatacatacatatatatatatatatgcatatatatatatatatatatatatatgtgtatacacacacacatagacagacatatatatatatatttattttttttactgagagcttatgacttccagaaagtgctaaaggtgggaggtgggccagggcctggacggggcttttgtctgatgctctgggattctggccagacccaccccagggcacatgtcctgcgggggcgtcccagctgtgttttttgatgtctcctccctggttaagagtagcttggagaggaccctcaggcctctgagggcaccaggccctggagaagaggtgcaattcagggtgtgtgtgtgttttttttcctttaaagaagaaacgctgctaagatcccacgtggctcccacgtgtcggggtgtctgtcctgtcatcctgactgtctcgttattgtgaagtctttcgtagacaccccagagcacacacatccccttagtccaccggttagatgtctctctttagaaaaatcaggggtgagtagctgtgtttccttaggcctggggtaggggatggagagcagctccaaggctgagctggggctctggccccaggtgaggtccccagctcctgagcacttctgagggggtgggttccacccccaggagggcgggggtgggtggagcaggagtggaggcagcctgcagaggaagggtgcgggagactgagccggcagtggcttgcttggaggggctagggtacccgcctggtctcggctggctccagctgccctgcaggtgcccctgggctcaggtagttagttgttcagccactaatgccttttatcccccatatgggcgctgagctgtggctgttcctggacactgtgctgtccccgtcctgagcaactatgcccccgccccagtaggttcaaggcaaagcagctctgaccgaattctaggcaggggtgggggcacctgcctgggccctgggtccagccgcatccccatgcccagcctttcgcgtcacctggaggccacatcttcccaccccacctgccagcccctgtctctcctccccgctgcccctaactgcagctcagctttcactatagcagtgcttcccaaacgggttctagacttgggtgtttgatttgaagagttacgcatttatttcactatttattgggaaaaaaatgcattgaacccgtgatttcacagacattttgcttaggtcaaggctactttttaaaaagggagtgactttcatgaagtcagtttgaagaaggaggttgggagcatgttggtggcagtgatctggagaggctgcaggggccacgagtttgcagatgctgtacttcagcaataaccttgcctttgctaagaccccctccgagggcttcaggggggcctgccaagggggggccttgttcttgttcccaaactctgacttggaagaactcagcttgtggccgggctggtgagggtgtggggtgcgcccttcccttttgggctgagggagagggggccgggaggggttgtcaagcccacccgggaaactgagccctggagaggggaagcagccagcccaggatgcttcagggccctggcagcaaagaagctggggtggtgtggagggccctactccacaccctagagctgtgatgctgagcaaggtgcctgtggcggaaggaactgcccagtcctccctgggggcaggtagacctgtggggatggctcggtccaagcccaacactgcccgctccagagagcctcagccctgcctccctttccacagaggtggttttatgtggaacgaggtaccttgtctggggaagaagtggagctgggcaggcttgactgctcctggctgaccctgagctctcgcagttggagggaagcagacagacttgactttttgcaagtccgcgtgttgctggagggacacgtgtattggagcccagaagaggggctgtgtggcctgggaataccatgtggaaggttgggcttcaagttaacaggatcagacaccagtcaagcagcctcaggtcatcttgcgactccactgagcagcctttcctgttgtcacatgggttcagagcagctgagcagggaacacgtcctaggcaggtctgacgtgaaacctccccttaccctgaaccgtgtgactctgcaagcagacacctcgaggcaggtgttctaggcaaagggatgggcatgagcgaaggctccagggtccacagagcagggagtgtggagaaggtggaagagctgagctcagaggcagagaagctccttgcagggagcactgggagatggcctggcccgtcccaggctcctggaggccccacctgccgatcccaggcacttgaccttgttcctgtgggtgacagagatgagaaccagggaagctgtgatccactggccaggacaagtcaacatgggtgagggttgggcaaagggcccttccttcctccccaaccctgtggtctggggccatggcctcaggcttgtgtctatcacaaaagcacaaacttgccctaacccacatgggcctggctgtggggaaagtggggacccaggtccctgagctgtctgctgggctccgtagagcggtggtgggcaggcaccttggcatctgtgcagagacggcccagtctggccaaatcctcttcctctcccctgctctaccttctccggcaccaggcagccccttaaaggaggacaaagtgtgtaaagcccgtctgctgtcttcccccaaatcctcagctcagagccttccgcttccagggccaaccccagccccgtttgctgcgttgtgtaagggcttggggtcttagaagctgctctttagcccagatacacatactcttttttgtctttgtgcaataatcagtgttcctggcagagcctgggccaagctgcagcctactgaggaggcagaggccacctcctccagaaagccctcggcctgggccgccgccgtgactctagcactctcagtcgctgtacagtttctatggtgtgaatgaacttccctcctagttgctgatggcgctggtacctgctggcccatggcccgggtgtagagaaaccaagcggcagccaccaccagtgttgttttgaataaaagcccagaagcctatttaagaatttct

SEQ ID NO: 39297 - DNA, 1224 bp, Homo sapiens
atggctgagagcgcctccccgccctcctcatctgcagcagccccagccgctgagccaggagtcaccacggagcagcccggaccccggagccccccatcctccccgccaggcctggaggagcctctggatggagctgatcctcatgtcccacacccagacctggcgcctattgccttcttctgcctgcgacagaccaccagcccccggaactggtgcatcaagatggtgtgcaacccgtggtttgaatgtgtcagcatgctggtgatcctgctgaactgcgtgacacttggcatgtaccagccgtgcgacgacatggactgcctgtccgaccgctgcaagatcctgcaggtctttgatgacttcatctttatcttctttgccatggagatggtgctcaagatggtggccctggggatttttggcaagaagtgctacctcggggacacatggaaccgcctggatttcttcatcgtcatggcagggatggtcgagtactccctggaccttcagaacatcaacctgtcagccatccgcaccgtgcgcgtcctgaggcccctcaaagccatcaaccgcgtgcccagtatgcggatcctggtgaacctgctcctggacacactgcccatgctggggaatgtcctgctgctctgcttctttgtcttcttcatctttggcatcataggtgtgcagctctgggcgggcctgctgcgtaaccgctgcttcctggaggagaacttcaccatacaaggggatgtggccttgcccccatactaccagccggaggaggatgatgagatgcccttcatctgctccctgtcgggcgacaatgggataatgggctgccatgagatccccccgctcaaggagcagggccgtgagtgctgcctgtccaaggacgacgtctacgactttggggcggggcgccaggacctcaatgccagcggcctctgtgtcaactggaaccgttactacaatgtgtgccgcacgggcagcgccaacccccacaagggtgccatcaactttgacaacatcggttatgcttggattgtcatcttccaggtgatcactctggaaggctgggtggagatcatgtactacgtgatggatgctcactccttctacaacttcatctacttcatcctgcttatcatacccctcttgcctgcacccccatatggtcttcccagagtgagctcatccacctcgtcatgcctgactgcagcttca

SEQ ID NO: 39298 - DNA, 456 bp, Homo sapiens
gaaaaagatagttagtttcacattgtcattcctctgcttttcagttctgccattcttagggtgtgatatctagcctccagagcactttagggtccatgataactgctggacctccagccatcacatctgtattccagaaaggaagtaggagatggatgctcatctctcctactgttgtaggagaacaggctcatctcattctcttgtgttcattgttccaaaaggacatacacagaagatgttatagaaggtttgggggcaagatgtcaggacacgtggtcagagccctaatggatgagaaggtgctgggcaaagagccagggaaagggaatctcagcagggcaaacagcacatgcaaacgccctgaggtgtcagagagtgacctggcaggggcacaagaaaggagaaggggagtagaggtgggcagggctgggccacaggctgtgttgggcactg

SEQ ID NO: 39299 - DNA, 440 bp, Homo sapiens
tttttttttttgagacggagtctcgctctgtcacccaggctggagcgcagtggcgtaacatcggctcactgcaacttccgcctcctgggttcatgccattctcctgcctcagcctcccaagtagctggaactacaggtgcctgccaccacgcctggctaattttttgtatttttagtagagatggggtttcactgtgttagccaggatggtctcgatctcttgaccttgtgatccgcctgcctcggcctcccaaagtgctgggattacaggcgtgactgtccaacattttctatattcttcttccagtttagaggggctcctttccctgtctatttagatcccattttcctcaaggcctggctcaaaatattaccaagaagcctctgccaactagcagaacccacattaattcccctctcctttgaattcccacagttct

SEQ ID NO: 39300 - DNA, 524 bp, Homo sapiens
tcaaaaatgtggtgatactgtggtgctggcataaggattgacaagtagatcaatgaaacaaatagtccagaaataatcccacactaccattgtttgttttttttgaaaaaggcaccaaagcaacccaataaggaaaggagactgttttcaacaaatggtgctagaataacttgatatccacatagaaaaagaatgaacctcaaccactacctcataccataacaaaaattaattcatgatggatcatagaacagtatgtaaaagtcaaaaccacaaagcttttagacaagagattatatccatgacttaggaattaacaaagctttctcagacagatagaagaaaataatcataaaaagaaagaaatggtaagttagacttcatcaaaattaaaaacttctcatcaaaagattccattaagacaatgaaaaggcaaaccacagattgggagaaaatattcaaagaacatgtatctggcaaaggacatataaagaagtcctataattaaatatatattaaaaaaa

SEQ ID NO: 39301 - DNA, 344 bp, Homo sapiens
gacgacgactgattttgctgagtggtttgaaaagcctaggggaggccaagtaggggagacttactgccaggactatctctccaagctcagttcctggggcttccaccctcacattctagaggaaagcatattgccactcagccaagttgtgtgatgtgattactagtgaaacgtgatcagctctgggggccctcggctcttggctgtcaatgcaggatgatactgggctacaggagaaagaggtaaggaagacagagtattcccccatgaataggatggaatggattaaagtagaagagaaagtaaagtgaactacctcatttgtcatgtggggaagttcaggc

SEQ ID NO: 39302 - DNA, 346 bp, Homo sapiens
tcagtattgaggccccaagcctggaagttatcctccatttctcttttcctctttggcccctcctccaatttattaacaagttctgtcagctataactccaaaatatatttttaaaatatgaccttttttcctaccctagctcaagtcctcattatctttcttgcttagatgtcgcattagcctccaaactgtcccccggggccactcttacccttagtaccatcttccttccacacaatgggcagggtgggtttttttagttgttgttgtttgtttgttttttgagacagggtctaagtctattgcccaggctgcagtgcagtggtgtggtcatagctcattgcag

SEQ ID NO: 39303 - DNA, 595 bp, Homo sapiens
caaactatgaatttcaactatttccgaggcagtcgttcagaatttgaatataattacactctttgggtgaaaattgtggtttttgctacataaaaaactaatggaaatgatctgcctgttcctgtagtttacagattatatgcttcagaactgacgatatatatttaggctgcttttctgtgtggcacatttaaatgaaaatgaactcggggtgagccaccatggttgctaggcaatagagcgggttgatagagcacggtattaaactgaacccacattggtgttttacttaacatctatttgcttagcacctttgtcatctgtggtgtcatagaagggaaaggaggaggagacaggcagagtctggttatctgcagagactcaaacaagtaggagaaataatcatcccaaacaccaaagtgacatgagcattttcaaaaatttgaggttgcagcacagtcaactcatttaatgaagaacatgcaagacctgaagaaatgcataagcatagcagacatattcatggatgtggtagcaagaggaactaaagagattccccaggctgggttttgctctggtggttccagaaaaaaaa

SEQ ID NO: 39304 - DNA, 428 bp, Homo sapiens
tgcaattatttattttcttttaatgtatcctaattgtatataatcattgctgtccaggcaaacttctctgttgtgtcccttctttcctttgtgtgtgtgtgtaatttagttattcatgctaagggaggctccctaaactccacctctttaaattaatagggatttttctcatcttaattctcatggttagaagatatgaatcaatataattctttcctaatacttacatgccttcgaaagagaagatttgacagttgcatgaagtgattggttttacacacgtaataccttgatgaagagagtttcttggttggtcgcagtggctcacacctgtaatcccagtactttgggaagccaaggtgggtggatcgcttgagtccaggagtctgagaccaatgtgggcacgatggtgaaaccctgtctttaca

SEQ ID NO: 39305 - DNA, 394 bp, Homo sapiens
ttatcaggtgactggacagaagagctggtgatactcaggtgggggttgaatggggcagttgtgaggcacttgtggacattagagaggtagagatagagagaggagagaaagggctgcataaggacaacttagtttattttggaaggctgttacactttgacctccatttaaaaaacaaacaaaaaaatctaaaaaccccaaaacgttgagggactgttcccaagccccagcatctttgccccatcctcaagccttccaggaccctctctccattcttgggattgcagctcctaacgtagttctcctcttcagctcaaggacaattctaactgtcttcttgcctggtatggcttaatgagcctcaagctcacttagcatcatctggatttaattt

SEQ ID NO: 39306 - DNA, 4189 bp, Homo sapiens
cgcgggcggcggtgctaggctcgcctctgcctccctcgtggcgggcccggacatggggtcccgtggcctgagtccctcggccggcgcgcagggctcggggccgcgcgcaccttccccgcactgactgtcgcgccgtgccctgcgccaggaggagcggaggccgcgcgcggcccgccgagcgccttcaggatgctcatcaaggaataccacattctgctgcccatgagcctggacgagtaccaggtggcccagctctacatgatccagaaaaagagccgggaggagtctagtggtgagggcagcggcgtggagatcctggccaaccggccctacacggatgggcccgggggcagcgggcaatacacacacaaggtgtaccacgtgggctcccacatcccaggctggttccgggcactgctgcccaaggctgccctgcaggtagaagaggaatcctggaatgcctacccctacacccgaacccggtacacctgccctttcgtggagaaattctccattgaaattgagacctattacctgcctgatggggggcagcagccaaacgtcttcaacctgagcggggccgagaggagacagcgcatcctggacaccatcgacatcgtgcgggatgcagtggccccaggcgagtacaaagcagaagaggacccccggctttatcactcggtcaagacgggccgagggccactgtctgatgactgggcacggacggcggcacagacggggccccttatgtgtgcctataagctgtgcaaggttgagttccgctactggggcatgcaagccaagatcgagcagttcatccatgatgtaggtctgcgtcgggtgatgctgcgggcccaccgccaggcctggtgctggcaggatgagtggacagagctgagcatggctgacatccgggcactggaagaggagactgctcgcatgctggcccagcgcatggccaagtgcaacacaggcagtgaggggtccgaggcccagccccccgggaaaccgagcaccgaggcccggtctgcggccagcaacactggcacccccgatgggcctgaggcccccccaggcccagatgcctcccccgatgccagctttgggaagcagtggtcctcatcctcccgttcctcctactcatcccaacatggaggggctgtgtctccccagagcttgtctgagtggcgcatgcagaacattgcccgagactctgagaacagctccgaggaagagttctttgatgcccacgaaggcttctcggacagtgaggaggtcttccccaaggagatgaccaagtggaactccaatgacttcattgatgcctttgcctccccagtggaggcagagggaacgccagagcctggagccgaggcagctaaaggcattgaggatggggcccaagcacccagggactcagagggcctggatggagccggggagctgggggctgaggcatgcgcagtccacgccctcttccttatcctgcacagcggcaacatcctggactcaggccctggagacgccaactccaagcaggcggatgtgcagacgctgagctccgccttcgaggccgtcacccgcatccacttccctgaggccttgggccacgtggcgctgcgactggtgccctgtccacccatctgcgccgccgcctatgcccttgtctccaacctgagcccttacagccacgatggggacagcctgtctcgctcccaagaccacattccactggctgccctgccactgctggccacctcatcctcccgctaccagggcgccgtggccaccgtcattgcccgcaccaaccaggcctactcagccttcctgcgctcacctgagggtgccggcttctgtgggcaggtcgcactgattggagatggtgttggtggcatcctgggctttgatgcactctgccacagtgctaacgcgggcaccgggagtcggggcagcagccgccgtgggagcatgaacaatgagctgctctctccggagtttggcccagtgcgggaccccctggcagatggtgtggaaggcctgggtcggggcagcccagaaccctcggccttgcctccccagcgcatccccagcgacatggccagtcctgagcccgagggctctcagaacagccttcaggcagcccccgcaaccacctcctcctgggagccccggcgggcaagcacggccttctgcccacccgctgccagttccgaggcacctgacggccccagcagcactgcccgccttgacttcaaggtctctggcttcttcctcttcggctccccactgggcctggtgctggctctgcgcaaaactgtgatgcccgccctggaggcagcccagatgcgcccagcctgtgaacagatctacaacctcttccacgcggccgacccctgcgcctcacgcctcgagcccctgctggccccgaagttccaggccatcgccccactgaccgtgccccgctaccagaagttccccctgggagatggctcatccctgctgctggccgacactctgcagacgcactccagcctctttctggaggagctggagatgctggtgccctcaacacccacctctactagcggtgccttctggaagggcagtgagttggccactgaccccccggcccagccagccgcccccagcaccaccagtgaggtggttaagatcctggagcgctggtgggggaccaagcggatcgactactcgctgtactgccccgaggcgctcaccgcctttcccaccgtcacgctgccccacctcttccacgccagctactgggagtccgccgacgtggtggcgttcatcctgcgccaggtgatcgagaaggagcggccacagctggcggaatgcgaggagccgtccatctacagcccggccttccccagggagaagtggcagcgaaaacgcacgcaggtcaagatccggaacgtcacttccaaccaccgggcgagcgacacggtggtgtgcgagggccgcccccaggtgctaagcgggcgcttcatgtacgggcccctggacgtcgtcacgctcactggagagaaggtggatgtctacatcatgacgcagccgctgtcgggcaagtggatccactttggcaccgaagtcaccaatagctcgggccgcctcaccttcccagttcccccagaacgcgcgctgggcattggtgtctaccccgtgcgcatggtggtcaggggcgaccacacctatgccgaatgctgcctgactgtggtggcccgcggcacggaggctgtggtcttcagcatcgacggctccttcaccgccagcgtctccatcatgggcagcgaccccaaggtgcgagctggcgccgtggacgtggtcaggcactggcaggactccggctacctgatcgtgtatgtcacaggccggccggatatgcagaagcaccgcgtggtggcatggctgtcgcagcacaacttcccccacggcgtcgtctccttctgcgacggcctcacccacgacccactacgccagaaggcaatgtttctgcagagcctggtgcaggaggtagaactgaacatcgtggccggttatgggtctcccaaagatgtggctgtatacgcggcgctggggctgtccccgagccagacctacatcgtgggccgtgccgtgcggaagctacaggcgcagtgccagttcctgtcagacggctatgtggcccacctgggccagctggaagcgggctcgcactcgcatgcctcctcgggacccccgagagctgccttgggcaagagcagctatggtgtggctgcccccgtggacttcctgcgcaaacagagccagctgcttcgctcgaggggccccagccaggcggagcgtgagggcccgggaacaccacccaccaccctggcacggggcaaagcacggagcatcagcctgaagctggacagcgaggagtgaggcccacaccagcctggacctgggttatttattgacacacccaaggggcccgaggggctgcgtgtgggaggctggggacccagacttttggccccagcgctggcccccccagccccacaccctatatctccgtgtgctcctcggtgttacttccctttcatatgaggggacccagcgccggggggagggaggagggcgtgggcatgggcgcagaggcttttccagtgtgtataaatccatgaaaataaacgccacctgcacccca

SEQ ID NO: 39307 - DNA, 4531 bp, Homo sapiens
ggcgtcggggagggactgcaggggcgccggcgggcggatcgagaggaaggtcggggccatgggccggcactgcgcctcgggagggtccggccaccgctggaacccgaggccggggctgggggcgctccgggctccgacccacgggccggccggccctgcccgggctgggtgaggggcgcccgcctcaagctagaggaggagcggaggccgcgcgcggcccgccgagcgccttcaggatgctcatcaaggaataccacattctgctgcccatgagcctggacgagtaccaggtggcccagctctacatgatccagaaaaagagccgggaggagtctagtggtgagggcagcggcgtggagatcctggccaaccggccctacacggatgggcccgggggcagcgggcaatacacacacaaggtgtaccacgtgggctcccacatcccaggctggttccgggcactgctgcccaaggctgccctgcaggtagaagaggaatcctggaatgcctacccctacacccgaacccggtgaatgggtgagctgggcatggtccgaggccaggaggggagcggccctggtgggtacagcagtgagcctcacccgtgccttctgcccaggtacacctgccctttcgtggagaaattctccattgaaattgagacctattacctgcctgatggggggcagcagccaaacgtcttcaacctgagcggggccgagaggagacagcgcatcctgggtgaggcctggagctatggggggaccctggcgcccctctcaggctcctggctgcctcagtgggcagcctctgagaagtcccagccctctccaggcctcatgtcctgtctgcaaaaggacgggaactgtcatccagtcccaagagggtgccaggagcgggggctcaaaggggctggcgctgctcaatgcttgccgaactccctcagacaccatcgacatcgtgcgggatgcagtggccccaggcgagtacaaagcagaagaggacccccggctttatcactcggtcaagacgggccgagggccactgtctgatgactgggcacggacggcggcacagacggggccccttatgtgtgcctataagctgtgcaaggttgagttccgctactggggcatgcaagccaagatcgagcagttcatccatgatgtaggtctgcgtcgggtgatgctgcgggcccaccgccaggcctggtgctggcaggatgagtggacagagctgagcatggctgacatccgggcactggaagaggagactgctcgcatgctggcccagcgcatggccaagtgcaacacaggcagtgaggggtccgaggcccagccccccgggaaaccgagcaccgaggcccggtctgcggccagcaacactggcacccccgatgggcctgaggcccccccaggcccagatgcctcccccgatgccagctttgggaagcagtggtcctcatcctcccgttcctcctactcatcccaacatggaggggctgtgtctccccagagcttgtctgagtggcgcatgcagaacattgcccgagactctgagaacagctccgaggaagagttctttgatgcccacgaaggcttctcggacagtgaggaggtcttccccaaggagatgaccaagtggaactccaatgacttcattgatgcctttgcctccccagtggaggcagagggaacgccagagcctggagccgaggcagctaaaggcattgaggatggggcccaagcacccagggactcagagggcctggatggagccggggagctgggggctgaggcatgcgcagtccacgccctcttccttatcctgcacagcggcaacatcctggactcaggccctggagacgccaactccaagcaggcggatgtgcagacgctgagctccgccttcgaggccgtcacccgcatccacttccctgaggccttgggccacgtggcgctgcgactggtgccctgtccacccatctgcgccgccgcctatgcccttgtctccaacctgagcccttacagccacgatggggacagcctgtctcgctcccaagaccacattccactggctgccctgccactgctggccacctcatcctcccgctaccagggcgccgtggccaccgtcattgcccgcaccaaccaggcctactcagccttcctgcgctcacctgagggtgccggcttctgtgggcaggtcgcactgattggagatggtgttggtggcatcctgggctttgatgcactctgccacagtgctaacgcgggcaccgggagtcggggcagcagccgccgtgggagcatgaacaatgagctgctctctccggagtttggcccagtgcgggaccccctggcagatggtgtggaaggcctgggtcggggcagcccagaaccctcggccttgcctccccagcgcatccccagcgacatggccagtcctgagcccgagggctctcagaacagccttcaggcagcccccgcaaccacctcctcctgggagccccggcgggcaagcacggccttctgcccacccgctgccagttccgaggcacctgacggccccagcagcactgcccgccttgacttcaaggtctctggcttcttcctcttcggctccccactgggcctggtgctggctctgcgcaaaactgtgatgcccgccctggaggcagcccagatgcgcccagcctgtgaacagatctacaacctcttccacgcggccgacccctgcgcctcacgcctcgagcccctgctggccccgaagttccaggccatcgccccactgaccgtgccccgctaccagaagttccccctgggagatggctcatccctgctgctggccgacactctgcagacgcactccagcctctttctggaggagctggagatgctggtgccctcaacacccacctctactagcggtgccttctggaagggcagtgagttggccactgaccccccggcccagccagccgcccccagcaccaccagtgaggtggttaagatcctggagcgctggtgggggaccaagcggatcgactactcgctgtactgccccgaggcgctcaccgcctttcccaccgtcacgctgccccacctcttccacgccagctactgggagtccgccgacgtggtggcgttcatcctgcgccaggtgatcgagaaggagcggccacagctggcggaatgcgaggagccgtccatctacagcccggccttccccagggagaagtggcagcgaaaacgcacgcaggtcaagatccggaacgtcacttccaaccaccgggcgagcgacacggtggtgtgcgagggccgcccccaggtgctaagcgggcgcttcatgtacgggcccctggacgtcgtcacgctcactggagagaaggtggatgtctacatcatgacgcagccgctgtcgggcaagtggatccactttggcaccgaagtcaccaatagctcgggccgcctcaccttcccagttcccccagaacgcgcgctgggcattggtgtctaccccgtgcgcatggtggtcaggggcgaccacacctatgccgaatgctgcctgactgtggtggcccgcggcacggaggctgtggtcttcagcatcgacggctccttcaccgccagcgtctccatcatgggcagcgaccccaaggtgcgagctggcgccgtggacgtggtcaggcactggcaggactccggctacctgatcgtgtatgtcacaggccggccggatatgcagaagcaccgcgtggtggcatggctgtcgcagcacaacttcccccacggcgtcgtctccttctgcgacggcctcacccacgacccactacgccagaaggcaatgtttctgcagagcctggtgcaggaggtagaactgaacatcgtggccggttatgggtctcccaaagatgtggctgtatacgcggcgctggggctgtccccgagccagacctacatcgtgggccgtgccgtgcggaagctacaggcgcagtgccagttcctgtcagacggctatgtggcccacctgggccagctggaagcgggctcgcactcgcatgcctcctcgggacccccgagagctgccttgggcaagagcagctatggtgtggctgcccccgtggacttcctgcgcaaacagagccagctgcttcgctcgaggggccccagccaggcggagcgtgagggcccgggaacaccacccaccaccctggcacggggcaaagcacggagcatcagcctgaagctggacagcgaggagtgaggcccacaccagcctggacctgggttatttattgacacacccaaggggcccgaggggctgcgtgtgggaggctggggacccagacttttggccccagcgctggcccccccagccccacaccctatatctccgtgtgctcctcggtgttacttccctttcatatgaggggacccagcgccggggggagggaggagggcgtgggcatgggcgcagaggcttttccagtgtgtataaatccatgaaaataaacgccacctgcacccca

SEQ ID NO: 39308 - DNA, 4334 bp, Homo sapiens
ggcgtcggggagggactgcaggggcgccggcgggcggatcgagaggaaggtcggggccatgggccggcactgcgcctcgggagggtccggccaccgctggaacccgaggccggggctgggggcgctccgggctccgacccacgggccggccggccctgcccgggctgggtgaggggcgcccgcctcaagctagaggaggagcggaggccgcgcgcggcccgccgagcgccttcaggatgctcatcaaggaataccacattctgctgcccatgagcctggacgagtaccaggtggcccagctctacatgatccagaaaaagagccgggaggagtctagtggtgagggcagcggcgtggagatcctggccaaccggccctacacggatgggcccgggggcagcgggcaatacacacacaaggtgtaccacgtgggctcccacatcccaggctggttccgggcactgctgcccaaggctgccctgcaggtagaagaggaatcctggaatgcctacccctacacccgaacccggtacacctgccctttcgtggagaaattctccattgaaattgagacctattacctgcctgatggggggcagcagccaaacgtcttcaacctgagcggggccgagaggagacagcgcatcctggacaccatcgacatcgtgcgggatgcagtggccccaggcgagtacaaagcagaagaggacccccggctttatcactcggtcaagacgggccgagggccactgtctgatgactgggcacggacggcggcacagacggggccccttatgtgtgcctataagctgtgcaaggttgagttccgctactggggcatgcaagccaagatcgagcagttcatccatgatgtaggtctgcgtcgggtgatgctgcgggcccaccgccaggcctggtgctggcaggatgagtggacagagctgagcatggctgacatccgggcactggaagaggagactgctcgcatgctggcccagcgcatggccaagtgcaacacaggcagtgaggggtccgaggcccagccccccgggaaaccgagcaccgaggcccggtctgcggccagcaacactggcacccccgatgggcctgaggcccccccaggcccagatgcctcccccgatgccagctttgggaagcagtggtcctcatcctcccgttcctcctactcatcccaacatggaggggctgtgtctccccagagcttgtctgagtggcgcatgcagaacattgcccgagactctgagaacagctccgaggaagagttctttgatgcccacgaaggcttctcggacagtgaggaggtcttccccaaggagatgaccaagtggaactccaatgacttcattgatgcctttgcctccccagtggaggcagagggaacgccagagcctggagccgaggcagctaaaggcattgaggatggggcccaagcacccagggactcagagggcctggatggagccggggagctgggggctgaggcatgcgcagtccacgccctcttccttatcctgcacagcggcaacatcctggactcaggccctggagacgccaactccaagcaggcggatgtgcagacgctgagctccgccttcgaggccgtcacccgcatccacttccctgaggccttgggccacgtggcgctgcgactggtgccctgtccacccatctgcgccgccgcctatgcccttgtctccaacctgagcccttacagccacgatggggacagcctgtctcgctcccaagaccacattccactggctgccctgccactgctggccacctcatcctcccgctaccagggcgccgtggccaccgtcattgcccgcaccaaccaggcctactcagccttcctgcgctcacctgagggtgccggcttctgtgggcaggtcgcactgattggagatggtgttggtggcatcctgggctttgatgcactctgccacagtgctaacgcgggcaccgggagtcggggcagcagccgccgtgggagcatgaacaatgagctgctctctccggagtttggcccagtgcgggaccccctggcagatggtgtggaaggcctgggtcggggcagcccagaaccctcggccttgcctccccagcgcatccccagcgacatggccagtcctgagcccgagggctctcagaacagccttcaggcagcccccgcaaccacctcctcctgggagccccggcgggcaagcacggccttctgcccacccgctgccagttccgaggcacctgacggccccagcagcactgcccgccttgacttcaaggtctctggcttcttcctcttcggctccccactgggcctggtgctggctctgcgcaaaactgtgatgcccgccctggaggcagcccagatgcgcccagcctgtgaacagatctacaacctcttccacgcggccgacccctgcgcctcacgcctcgagcccctgctggccccgaagttccaggccatcgccccactgaccgtgccccgctaccagaagttccccctgggagatggctcatccctgctgctggccgacactctgcagacgcactccagcctctttctggaggagctggagatgctggtgccctcaacacccacctctactagcggtgccttctggaagggcagtgagttggccactgaccccccggcccagccagccgcccccagcaccaccagtgaggtggttaagatcctggagcgctggtgggggaccaagcggatcgactactcgctgtactgccccgaggcgctcaccgcctttcccaccgtcacgctgccccacctcttccacgccagctactgggagtccgccgacgtggtggcgttcatcctgcgccaggtgatcgagaaggagcggccacagctggcggaatgcgaggagccgtccatctacagcccggccttccccagggagaagtggcagcgaaaacgcacgcaggtcaagatccggaacgtcacttccaaccaccgggcgagcgacacggtggtgtgcgagggccgcccccaggtgctaagcgggcgcttcatgtacgggcccctggacgtcgtcacgctcactggagagaaggtggatgtctacatcatgacgcagccgctgtcgggcaagtggatccactttggcaccgaagtcaccaatagctcgggccgcctcaccttcccagttcccccagaacgcgcgctgggcattggtgtctaccccgtgcgcatggtggtcaggggcgaccacacctatgccgaatgctgcctgactgtggtggcccgcggcacggaggctgtggtcttcagcatcgacggctccttcaccgccagcgtctccatcatgggcagcgaccccaaggtgcgagctggcgccgtggacgtggtcaggcactggcaggactccggctacctgatcgtgtatgtcacaggccggccggatatgcagaagcaccgcgtggtggcatggctgtcgcagcacaacttcccccacggcgtcgtctccttctgcgacggcctcacccacgacccactacgccagaaggcaatgtttctgcagagcctggtgcaggaggtagaactgaacatcgtggccggttatgggtctcccaaagatgtggctgtatacgcggcgctggggctgtccccgagccagacctacatcgtgggccgtgccgtgcggaagctacaggcgcagtgccagttcctgtcagacggctatgtggcccacctgggccagctggaagcgggctcgcactcgcatgcctcctcgggacccccgagagctgccttgggcaagagcagctatggtgtggctgcccccgtggacttcctgcgcaaacagagccagctgcttcgctcgaggggccccagccaggcggagcgtgagggcccgggaacaccacccaccaccctggcacggggcaaagcacggagcatcagcctgaagctggacagcgaggagtgaggcccacaccagcctggacctgggttatttattgacacacccaaggggcccgaggggctgcgtgtgggaggctggggacccagacttttggccccagcgctggcccccccagccccacaccctatatctccgtgtgctcctcggtgttacttccctttcatatgaggggacccagcgccggggggagggaggagggcgtgggcatgggcgcagaggcttttccagtgtgtataaatcattgagctttacgccactgggccccaatcaatacctcaggggggccggaccaattcgcctataggagtctattcattaatggcgtgtttacagtttgatgggaacctgggtccttattctggtgtc

SEQ ID NO: 39309 - DNA, 1572 bp, Homo sapiens
gtgcagatgggtgtggggcaggaggccatcctgactcgctgccatgccgcgcagtcctggagcgctggtgggggaccaagcggatcgactactcgctgtactgccccgaggcgctcaccgcctttcccaccgtcacgctgccccacctcttccacgccagctactgggagtccgccgacgtggtggcgttcatcctgcgccaggtgatcgagaaggagcggccacagctggcggaatgcgaggagccgtccatctacagcccggccttccccagggagaagtggcagcgaaaacgcacgcaggtcaagatccggaacgtcacttccaaccaccgggcgagcgacacggtggtgtgcgagggccgcccccaggtgctaagcgggcgcttcatgtacgggcccctggacgtcgtcacgctcactggagagaaggtggatgtctacatcatgacgcagccgctgtcgggcaagtggatccactttggcaccgaagtcaccaatagctcgggccgcctcaccttcccagttcccccagaacgcgcgctgggcattggtgtctaccccgtgcgcatggtggtcaggggcgaccacacctatgccgaatgctgcctgactgtggtggcccgcggcacggaggctgtggtcttcagcatcgacggctccttcaccgccagcgtctccatcatgggcagcgaccccaaggtgcgagctggcgccgtggacgtggtcaggcactggcaggactccggctacctgatcgtgtatgtcacaggccggccggatatgcagaagcaccgcgtggtggcatggctgtcgcagcacaacttcccccacggcgtcgtctccttctgcgacggcctcacccacgacccactacgccagaaggcaatgtttctgcagagcctggtgcaggaggtagaactgaacatcgtggccggttatgggtctcccaaagatgtggctgtatacgcggcgctggggctgtccccgagccagacctacatcgtgggccgtgccgtgcggaagctacaggcgcagtgccagttcctgtcagacggctatgtggcccacctgggccagctggaagcgggctcgcactcgcatgcctcctcgggacccccgagagctgccttgggcaagagcagctatggtgtggctgcccccgtggacttcctgcgcaaacagagccagctgcttcgctcgaggggccccagccaggcggagcgtgagggcccgggaacaccacccaccaccctggcacggggcaaagcacggagcatcagcctgaagctggacagcgaggagtgaggcccacaccagcctggacctgggttatttattgacacacccaaggggcccgaggggctgcgtgtgggaggctggggacccagacttttggccccagcgctggcccccccagccccacaccctatatctccgtgtgctcctcggtgttacttccctttcatatgaggggacccagcgccggggggagggaggagggcgtgggcatgggcgcagaggcttttccagtgtgtataaatccatgaaaataaacgccacctgcacccca

SEQ ID NO: 39310 - DNA, 1566 bp, Homo sapiens
ggcgtcggggagggactgcaggggcgccggcgggcggatcgagaggaaggtcggggccatgggccggcactgcgcctcgggagggtccggccaccgctggaacccgaggccggggctgggggcgctccgggctccgacccacgggccggccggccctgcccgggctgggtgaggggcgcccgcctcaagctagaggaggagcggaggccgcgcgcggcccgccgagcgccttcaggatgctcatcaaggaataccacattctgctgcccatgagcctggacgagtaccaggtggcccagctctacatgatccagaaaaagagccgggaggagtctagtggtgagggcagcggcgtggagatcctggccaaccggccctacacggatgggcccgggggcagcgggcaatacacacacaaggtgtaccacgtgggctcccacatcccaggctggttccgggcactgctgcccaaggctgccctgcaggtagaagaggaatcctggaatgcctacccctacacccgaacccggtacacctgccctttcgtggagaaattctccattgaaattgagacctattacctgcctgatggggggcagcagccaaacgtcttcaacctgagcggggccgagaggagacagcgcatcctggacaccatcgacatcgtgcgggatgcagtggccccaggcgagtacaaagcagaagaggacccccggctttatcactcggtcaagacgggccgagggccactgtctgatgactgggcacggacggcggcacagacggggccccttatgtgtgcctataagctgtgcaaggttgagttccgctactggggcatgcaagccaagatcgagcagttcatccatgatgtaggtctgcgtcgggtgatgctgcgggcccaccgccaggcctggtgctggcaggatgagtggacagagctgagcatggctgacatccgggcactggaagaggagactgctcgcatgctggcccagcgcatggccaagtgcaacacaggcagtgaggggtccgaggcccagccccccgggaaaccgagcaccgaggcccggtctgcggccagcaacactggcacccccgatgggcctgaggcccccccaggcccagatgcctcccccgatgccagctttgggaagcagtggtcctcatcctcccgttcctcctactcatcccaacatggaggggctgtgtctccccagagcttgtctgagtggcgcatgcagaacattgcccgagactctgagaacagctccgaggaagagttctttgatgcccacgaaggcttctcggacagtgaggaggtcttccccaaggagatgaccaagtggaactccaatgacttcattgatgcctttgcctccccagtggaggcagagggaacgccagagcctggagccgaggcagctaaaggcattgaggatggggcccaagcacccagggactcagagggcctggatggagccggggagctgggggctgaggcatgggcgcagaggcttttccagtgtgtataaatccatgaaaataaacgccacctgcacccca

SEQ ID NO: 39311 - DNA, 321 bp, Homo sapiens
gtgaggcccaagtgaaggccaggaacaggaccccaccagggggcagggccctcagtcccaggccttgggaaccacggactctggggaagatgtgagaaggcctaaccggcctccagggaacctgggatcctccgaggcacaagggccatgagcagcttgagctgccagctgccaggcaagccagaggggacagcccacactggaaagtgctcaagaccctaggcgctggttccactcggccatggctttccactgtgacctttctgagcctcagcttcccatctgtaaatggaaatgatcatggaactgcccatagtcagc

SEQ ID NO: 39312 - DNA, 4236 bp, Homo sapiens
ggcgtcggggagggactgcaggggcgccggcgggcggatcgagaggaaggtcggggccatgggccggcactgcgcctcgggagggtccggccaccgctggaacccgaggccggggctgggggcgctccgggctccgacccacgggccggccggccctgcccgggctgggtgaggggcgcccgcctcaagctagaggaggagcggaggccgcgcgcggcccgccgagcgccttcaggatgctcatcaaggaataccacattctgctgcccatgagcctggacgagtaccaggtggcccagctctacatgatccagaaaaagagccgggaggagtctagtggtgagggcagcggcgtggagatcctggccaaccggccctacacggatgggcccgggggcagcgggcaatacacacacaaggtgtaccacgtgggctcccacatcccaggctggttccgggcactgctgcccaaggctgccctgcaggtagaagaggaatcctggaatgcctacccctacacccgaacccggtacacctgccctttcgtggagaaattctccattgaaattgagacctattacctgcctgatggggggcagcagccaaacgtcttcaacctgagcggggccgagaggagacagcgcatcctggacaccatcgacatcgtgcgggatgcagtggccccaggcgagtacaaagcagaagaggacccccggctttatcactcggtcaagacgggccgagggccactgtctgatgactgggcacggacggcggcacagacggggccccttatgtgtgcctataagctgtgcaaggttgagttccgctactggggcatgcaagccaagatcgagcagttcatccatgatgtaggtctgcgtcgggtgatgctgcgggcccaccgccaggcctggtgctggcaggatgagtggacagagctgagcatggctgacatccgggcactggaagaggagactgctcgcatgctggcccagcgcatggccaagtgcaacacaggcagtgaggggtccgaggcccagccccccgggaaaccgagcaccgaggcccggtctgcggccagcaacactggcacccccgatgggcctgaggcccccccaggcccagatgcctcccccgatgccagctttgggaagcagtggtcctcatcctcccgttcctcctactcatcccaacatggaggggctgtgtctccccagagcttgtctgagtggcgcatgcagaacattgcccgagactctgagaacagctccgaggaagagttctttgatgcccacgaaggcttctcggacagtgaggaggtcttccccaaggagatgaccaagtggaactccaatgacttcattgatgcctttgcctccccagtggaggcagagggaacgccagagcctggagccgaggcagctaaaggcattgaggatggggcccaagcacccagggactcagagggcctggatggagccggggagctgggggctgaggcatgcgcagtccacgccctcttccttatcctgcacagcggcaacatcctggactcaggccctggagacgccaactccaagcaggcggatgtgcagacgctgagctccgccttcgaggccgtcacccgcatccacttccctgaggccttgggccacgtggcgctgcgactggtgccctgtccacccatctgcgccgccgcctatgcccttgtctccaacctgagcccttacagccacgatggggacagcctgtctcgctcccaagaccacattccactggctgccctgccactgctggccacctcatcctcccgctaccagggcgccgtggccaccgtcattgcccgcaccaaccaggcctactcagccttcctgcgctcacctgagggtgccggcttctgtgggcaggtcgcactgattggagatggtgttggtggcatcctgggctttgatgcactctgccacagtgctaacgcgggcaccgggagtcggggcagcagccgccgtgggagcatgaacaatgagctgctctctccggagtttggcccagtgcgggaccccctggcagatggtgtggaaggcctgggtcggggcagcccagaaccctcggccttgcctccccagcgcatccccagcgacatggccagtcctgagcccgagggctctcagaacagccttcaggcagcccccgcaaccacctcctcctgggagccccggcgggcaagcacggccttctgcccacccgctgccagttccgaggcacctgacggccccagcagcactgcccgccttgacttcaaggtctctggcttcttcctcttcggctccccactgggcctggtgctggctctgcgcaaaactgtgatgcccgccctggaggcagcccagatgcgcccagcctgtgaacagatctacaacctcttccacgcggccgacccctgcgcctcacgcctcgagcccctgctggccccgaagttccaggccatcgccccactgaccgtgccccgctaccagaagttccccctgggagatggctcatccctgctgctggccgacactctgcagacgcactccagcctctttctggaggagctggagatgctggtgccctcaacacccacctctactagcggtgccttctggaagggcagtgagttggccactgaccccccggcccagccagccgcccccagcaccaccagtgaggtggttaagatcctggagcgctggtgggggaccaagcggatcgactactcgctgtactgccccgaggcgctcaccgcctttcccaccgtcacgctgccccacctcttccacgccagctactgggagtccgccgacgtggtggcgttcatcctgcgccaggtgatcgagaaggagcggccacagctggcggaatgcgaggagccgtccatctacagcccggccttccccagggagaagtggcagcgaaaacgcacgcaggtcaagatccggaacgtcacttccaaccaccgggcgagcgacacggtggtgtgcgagggccgcccccaggtgctaagcgggcgcttcatgtacgggcccctggacgtcgtcacgctcactggagagaaggtggatgtctacatcatgacgcagccgctgtcgggcaagtggatccactttggcaccgaagtcaccaatagctcgggccgcctcaccttcccagttcccccagaacgcgcgctgggcattggtgtctaccccgtgcgcatggtggtcaggggcgaccacacctatgccgaatgctgcctgactgtggtggcccgcggcacggaggctgtggtcttcagcatcgacggctccttcaccgccagcgtctccatcatgggcagcgaccccaaggtgcgagctggcgccgtggacgtggtcaggcactggcaggactccggctacctgatcgtgtatgtcacaggccggccggatatgcagaagcaccgcgtggtggcatggctgtcgcagcacaacttcccccacggcgtcgtctccttctgcgacggcctcacccacgacccactacgccagaaggcaatgtttctgcagagcctggtgcaggaggtagaactgaacatcgtggccggttatgggtctcccaaagatgtggctgtatacgcggcgctggggctgtccccgagccagacctacatcgtgggccgtgccgtgcggaagctacaggcgcagtgccagttcctgtcagacggctatgtggcccacctgggccagctggaagcgggctcgcactcgcatgcctcctcgggacccccgagagctgccttgggcaagagcagctatggtgtggctgcccccgtggacttcctgcgcaaacagagccagctgcttcgctcgaggggccccagccaggcggagcgtgagggcccgggaacaccacccaccaccctggcacggggcaaagcacggagcatcagcctgaagctggacagcgaggagtgaggcccacaccagcctggacctgggttatttattgacacacccaaggggcccgaggggctgcgtgtgggaggctggggacccagacttttggccccagcgctggcccccccagccccacaccctatatctccgtgtgctcctcggtgttacttccctttcatatgaggggacccagcgccggggggagggaggagggcgtgggcatgggcgcagaggcttttccagtgtgtataaatccatgaaaataaacgccacctgcacccca

SEQ ID NO: 39313 - DNA, 4077 bp, Homo sapiens
ggcgtcggggagggactgcaggggcgccggcgggcggatcgagaggaaggtcggggccatgggccggcactgcgcctcgggagggtccggccaccgctggaacccgaggccggggctgggggcgctccgggctccgacccacgggccggccggccctgcccgggctgggtgaggggcgcccgcctcaagctagaggaggagcggaggccgcgcgcggcccgccgagcgccttcaggatgctcatcaaggaataccacattctgctgcccatgagcctggacgagtaccaggtggcccagctctacatgatccagaaaaagagccgggaggagtctagtggtgagggcagcggcgtggagatcctggccaaccggccctacacggatgggcccgggggcagcgggcaatacacacacaaggtgtaccacgtgggctcccacatcccaggctggttccgggcactgctgcccaaggctgccctgcaggtagaagaggaatcctggaatgcctacccctacacccgaacccggtacacctgccctttcgtggagaaattctccattgaaattgagacctattacctgcctgatggggggcagcagccaaacgtcttcaacctgagcggggccgagaggagacagcgcatcctggacaccatcgacatcgtgcgggatgcagtggccccaggcgagtacaaagcagaagaggacccccggctttatcactcggtcaagacgggccgagggccactgtctgatgactgggcacggacggcggcacagacggggccccttatgtgtgcctataagctgtgcaaggttgagttccgctactggggcatgcaagccaagatcgagcagttcatccatgatgtaggtctgcgtcgggtgatgctgcgggcccaccgccaggcctggtgctggcaggatgagtggacagagctgagcatggctgacatccgggcactggaagaggagactgctcgcatgctggcccagcgcatggccaagtgcaacacaggcagtgaggggtccgaggcccagccccccgggaaaccgagcaccgaggcccggtctgcggccagcaacactggcacccccgatgggcctgaggcccccccaggcccagatgcctcccccgatgccagctttgggaagcagtggtcctcatcctcccgttcctcctactcatcccaacatggaggggctgtgtctccccagagcttgtctgagtggcgcatgcagaacattgcccgagactctgagaacagctccgaggaagagttctttgatgcccacgaaggcttctcggacagtgaggaggtcttccccaaggagatgaccaagtggaactccaatgacttcattgatgcctttgcctccccagtggaggcagagggaacgccagagcctggagccgaggcagctaaaggcattgaggatggggcccaagcacccagggactcagagggcctggatggagccggggagctgggggctgaggcatgcgcagtccacgccctcttccttatcctgcacagcggcaacatcctggactcaggccctggagacgccaactccaagcaggcggatgtgcagacgctgagctccgccttcgaggccgtcacccgcatccacttccctgaggccttgggccacgtggcgctgcgactggtgccctgtccacccatctgcgccgccgcctatgcccttgtctccaacctgagcccttacagccacgatggggacagcctgtctcgctcccaagaccacattccactggctgccctgccactgctggccacctcatcctcccgctaccagggcgccgtggccaccgtcattgcccgcaccaaccaggcctactcagccttcctgcgctcacctgagggtgccggcttctgtgggcaggtcgcactgattggagatggtgttggtggcatcctgggctttgatgcactctgccacagtgctaacgcgggcaccgggagtcggggcagcagccgccgtgggagcatgaacaatgagctgctctctccggagtttggcccagtgcgggaccccctggcagatggtgtggaaggcctgggtcggggcagcccagaaccctcggccttgcctccccagcgcatccccagcgacatggccagtcctgagcccgagggctctcagaacagccttcaggcagcccccgcaaccacctcctcctgggagccccggcgggcaagcacggccttctgcccacccgctgccagttccgaggcacctgacggccccagcagcactgcccgccttgacttcaaggtctctggcttcttcctcttcggctccccactgggcctggtgctggctctgcgcaaaactgtgatgcccgccctggaggcagcccagatgcgcccagcctgtgaacagatctacaacctcttccacgcggccgacccctgcgcctcacgcctcgagcccctgctggccccgaagttccaggccatcgccccactgaccgtgccccgctaccagaagttccccctgggagatggctcatccctgctgctggccgacactctgcagacgcactccagcctctttctggaggagctggagatgctggtgccctcaacacccacctctactagcggtgccttctggaagggcagtgagttggccactgaccccccggcccagccagccgcccccagcaccaccagtgaggtggttaagatcctggagcgctggtgggggaccaagcggatcgactactcgctgtactgccccgaggcgctcaccgcctttcccaccgtcacgctgccccacctcttccacgccagctactgggagtccgccgacgtggtggcgttcatcctgcgccaggtgatcgagaaggagcggccacagctggcggaatgcgaggagccgtccatctacagcccggccttccccagggagaagtggcagcgaaaacgcacgcaggtcaagatccggaaccactttggcaccgaagtcaccaatagctcgggccgcctcaccttcccagttcccccagaacgcgcgctgggcattggtgtctaccccgtgcgcatggtggtcaggggcgaccacacctatgccgaatgctgcctgactgtggtggcccgcggcacggaggctgtggtcttcagcatcgacggctccttcaccgccagcgtctccatcatgggcagcgaccccaaggtgcgagctggcgccgtggacgtggtcaggcactggcaggactccggctacctgatcgtgtatgtcacaggccggccggatatgcagaagcaccgcgtggtggcatggctgtcgcagcacaacttcccccacggcgtcgtctccttctgcgacggcctcacccacgacccactacgccagaaggcaatgtttctgcagagcctggtgcaggaggtagaactgaacatcgtggccggttatgggtctcccaaagatgtggctgtatacgcggcgctggggctgtccccgagccagacctacatcgtgggccgtgccgtgcggaagctacaggcgcagtgccagttcctgtcagacggctatgtggcccacctgggccagctggaagcgggctcgcactcgcatgcctcctcgggacccccgagagctgccttgggcaagagcagctatggtgtggctgcccccgtggacttcctgcgcaaacagagccagctgcttcgctcgaggggccccagccaggcggagcgtgagggcccgggaacaccacccaccaccctggcacggggcaaagcacggagcatcagcctgaagctggacagcgaggagtgaggcccacaccagcctggacctgggttatttattgacacacccaaggggcccgaggggctgcgtgtgggaggctggggacccagacttttggccccagcgctggcccccccagccccacaccctatatctccgtgtgctcctcggtgttacttccctttcatatgaggggacccagcgccggggggagggaggagggcgtgggcatgggcgcagaggcttttccagtgtgtataaatccatgaaaataaacgccacctgcacccca

SEQ ID NO: 39314 - DNA, 2263 bp, Homo sapiens
ggcgtcggggagggactgcaggggcgccggcgggcggatcgagaggaaggtcggggccatgggccggcactgcgcctcgggagggtccggccaccgctggaacccgaggccggggctgggggcgctccgggctccgacccacgggccggccggccctgcccgggctgggtgaggggcgcccgcctcaagctagaggaggagcggaggccgcgcgcggcccgccgagcgccttcaggatgctcatcaaggaataccacattctgctgcccatgagcctggacgagtaccaggtggcccagctctacatgatccagaaaaagagccgggaggagtctagtggtgagggcagcggcgtggagatcctggccaaccggccctacacggatgggcccgggggcagcgggcaatacacacacaaggtgtaccacgtgggctcccacatcccaggctggttccgggcactgctgcccaaggctgccctgcaggtagaagaggaatcctggaatgcctacccctacacccgaacccggtacacctgccctttcgtggagaaattctccattgaaattgagacctattacctgcctgatggggggcagcagccaaacgtcttcaacctgagcggggccgagaggagacagcgcatcctggacaccatcgacatcgtgcgggatgcagtggccccaggcgagtacaaagcagaagaggacccccggctttatcactcggtcaagacgggccgagggccactgtctgatgactgggcacggacggcggcacagacggggccccttatgtgtgcctataagctgtgcaaggttgagttccgctactggggcatgcaagccaagatcgagcagttcatccatgatgtaggtctgcgtcgggtgatgctgcgggcccaccgccaggcctggtgctggcaggatgagtggacagagctgagcatggctgacatccgggcactggaagaggagactgctcgcatgctggcccagcgcatggccaagtgcaacacaggcagtgaggggtccgaggcccagccccccgggaaaccgagcaccgaggcccggtctgcggccagcaacactggcacccccgatgggcctgaggcccccccaggcccagatgcctcccccgatgccagctttgggaagcagtggtcctcatcctcccgttcctcctactcatcccaacatggaggggctgtgtctccccagagcttgtctgagtggcgcatgcagaacattgcccgagactctgagaacagctccgaggaagagttctttgatgcccacgaaggcttctcggacagtgaggaggtcttccccaaggagatgaccaagtggaactccaatgacttcattgatgcctttgcctccccagtggaggcagagggaacgccagagcctggagccgaggcagctaaaggcattgaggatggggcccaagcacccagggactcagagggcctggatggagccggggagctgggggctgaggcatgcgcagtccacgccctcttccttatcctgcacagcggcaacatcctggactcaggccctggagacgccaactccaagcaggcggatgtgcagacgctgagctccgccttcgaggccgtcacccgcatccacttccctgaggccttgggccacgtggcgctgcgactggtgccctgtccacccatctgcgccgccgcctatgcccttgtctccaacctgagcccttacagccacgatggggacagcctgtctcgctcccaagaccacattccactggctgccctgccactgctggccacctcatcctcccgctaccagggcgccgtggccaccgtcattgcccgcaccaaccaggcctactcagccttcctgcgctcacctgagggtgccggcttctgtgggcaggtcgcactgattggagatggtgttggtggcatcctgggctttgatgcactctgccacagtgctaacgcgggcaccgggagtcggggcagcagccgccgtgggagcatgaacaatgagctgctctctccggagtttggcccagtgcgggaccccctggcagatggtgtggaaggcctgggtcggggcagcccagaaccctcggccttgcctccccagcgcatccccagcgacatggccagtcctgagcccgagggctctcagaacagggcagtttcacttcacacctgctgctctcaagggacacagtctgttctgcctgaaatagactcccaggcacatgtgtagaatccccc

SEQ ID NO: 39315 - DNA, 1499 bp, Homo sapiens
ggcgtcggggagggactgcaggggcgccggcgggcggatcgagaggaaggtcggggccatgggccggcactgcgcctcgggagggtccggccaccgctggaacccgaggccggggctgggggcgctccgggctccgacccacgggccggccggccctgcccgggctgggtgaggggcgcccgcctcaagctagaggaggagcggaggccgcgcgcggcccgccgagcgccttcaggatgctcatcaaggaataccacattctgctgcccatgagcctggacgagtaccaggtggcccagctctacatgatccagaaaaagagccgggaggagtctagtggtgagggcagcggcgtggagatcctggccaaccggccctacacggatgggcccgggggcagcgggcaatacacacacaaggtgtaccacgtgggctcccacatcccaggctggttccgggcactgctgcccaaggctgccctgcaggtagaagaggaatcctggaatgcctacccctacacccgaacccggtacacctgccctttcgtggagaaattctccattgaaattgagacctattacctgcctgatggggggcagcagccaaacgtcttcaacctgagcggggccgagaggagacagcgcatcctggacaccatcgacatcgtgcgggatgcagtggccccaggcgagtacaaagcagaagaggacccccggctttatcactcggtcaagacgggccgagggccactgtctgatgactgggcacggacggcggcacagacggggccccttatgtgtgcctataagctgtgcaaggttgagttccgctactggggcatgcaagccaagatcgagcagttcatccatgatgtaggtctgcgtcgggtgatgctgcgggcccaccgccaggcctggtgctggcaggatgagtggacagagctgagcatggctgacatccgggcactggaagaggagactgctcgcatgctggcccagcgcatggccaagtgcaacacaggcagtgaggggtccgaggcccagccccccgggaaaccgagcaccgaggcccggtctgcggccagcaacactggcacccccgatgggcctgaggcccccccaggcccagatgcctcccccgatgccagctttgggaagcagtggtcctcatcctcccgttcctcctactcatcccaacatggaggggctgtgtctccccagagcttgtctgagtggcgcatgcagaacattgcccgagactctgagaacagctccgaggaagagttctttgatgcccacgaaggcttctcggacagtgaggaggtcttccccaaggagatgaccaagtggaactccaatgacttcattgatgcctttgcctccccagtggaggcagagggaacgccaggtaaagataccgcctaggacaccggcccccagcacccgtgtacagcaggtcatgagtttaatggcatcttaagatgagaggcaatctgaaga

SEQ ID NO: 39316 - DNA, 398 bp, Homo sapiens
acccatcacttctctgggggtgacatcaaaaagggctgttctattccccctgtcaagtccccctgaaggccttgtccccaactcttcttgggttgggttagctatagttaatacttccacaatatctgatgcatatctttgtcttggaacttctatatagtttatatttacccatttaatagccttttcttcctaaaaatgtaatatgtaggttgatgtggaatattagcaaattatagataaccaaaactttttaaaaaaatggctagtattggccaggcatggtggctctcacctgtaatcccagcactttgggaggccaaggcgggccgatcatgaggtcaggagatcgagaccatattggccaatatggtgaaactccgtctctactaaaaata

SEQ ID NO: 39317 - DNA, 407 bp, Homo sapiens
gttgccagaccaatcatatttccctggtcctctcactgtcccattctgatgattgctttataaagtttcttctatcttcaaacctccaacatctctcccatcctttgaatcagaagagaacttctacagtctcccactacctcatttacccacctatcaacatgtttgctttctcttttgttggtgagaatgagtggcttcttgctcctagctagagccagtccttccatatgtgctttagattcttcctgttttgttcaagaatattgctcaagctattcttcctcctgtttcctgcatcagcatttcccctctctactagatcatctctgtcagtaaatgaacatgttgttgtttctcctagaagtactgtttctatatctagatagtactctagctagagttaa

SEQ ID NO: 39318 - DNA, 156 bp, Homo sapiens
aacagaaaaaaaagtgttatttaagtgaatgctgaatttcatgccataaaggcattaatgtttaagcttacttcatatttttataaagaaaatatcagaaatataagaactacagatcaagaagataaagattgataacttaatagaaaaaaaaag

SEQ ID NO: 39319 - DNA, 315 bp, Homo sapiens
aatggctcttctttcaaggttctaaagtgtaagaacagatcactcaccaggtaactgctggactcactcactcaagcagtctcataatacgcatgtgatcccttaggcgtacatagttcatctattttcttcttcccacaattcttcaagtccattataatcttctatcttgcctgtggtctaattagagtaatacatctccctacttgcccttaattcacaaattaccccattttacagggggagacaccaaggccaagagaaacacaaatgccctgccatacagtaaacccatctcacatctggtatcagaac

SEQ ID NO: 39320 - DNA, 280 bp, Homo sapiens
tgaattgttctctgtttaggacattagcctgggtatagaatttaacaataaaaataacagtaatagtaataatagtagctagcattccttcagcacttcctatgtgctagatactgtgctaagcacttggcaacctcctaatttaatactcatgacaaacctgggagatacgtactattactatcaccattttacagacaagaagagagagaagctgagaggattttaaaaacttggcccaagataattatggggcaaagagaaaatataatagctataa

SEQ ID NO: 39321 - DNA, 142 bp, Homo sapiens
gactgagaaactgtcacaaaccagaggagactggggagagatgacaactaaatgcattgtgctaccttgggtaaaatcccggactagaaagaggacattaatgaaaaaacagatgaaaaccaaataaagcctggaattcagt

SEQ ID NO: 39322 - DNA, 536 bp, Homo sapiens
gtgtgggcctttcctatatccccgtcttttataagagcatgtcatttagttgagaccttctgcattacttctgaaggggtacaaaagacatttctgatgattttctcatctcgtgtcatttaaatggtgctcagaaagtttggataggactggaactctagggctcaagccccaggctctgtccctatctaagcaatagggcagctgtcctgccagttgggttcttgcttctttgtgaaatgttgagcagaagctccaagtctctctgctgtggcttgtgtggcaagaaccatcctgaggttctgtgcagagagccagcctcacctttgagctcagtggcctctggcacagggaaattacagctgggcagtgtcctttgccttctctggcactgctagtgcaggaggcagtgttagctgctacaggaatagcatggagcgggcctgcaggccagaggggctgagacaagccagtgttcccaccagacctagaacgttcaccagaaagcaggcctgcagtgacacagctgcagaagt

SEQ ID NO: 39323 - DNA, 301 bp, Homo sapiens
gcagtagagcgaggaccagcttagcctagggagcccgactgggtctcgtcctcttgcacccatgttcagaccagagctgccagcctcacctttgagctcagtggcctctggcacagggaaattacagctgggcagtgtcctttgccttctctggcactgctagtgcaggaggcagtgttagctgctacaggaatagcatggagcgggcctgcaggccagaggggctgagacaagccagtgttcccaccagacctagaacgttcaccagaaagcaggcctgcagtgacacagctgcagaagt

SEQ ID NO: 39324 - DNA, 499 bp, Homo sapiens
ggtttttattagcaattatttgcctttcccctgtaatgaaaatgatcacaataaaattcactttgtgtcatactgaaacagtattcttctgctgttgacatttgtttggttaagccttactgtatctccactatatttgagatgatggtattagtatacattgctagaagagtttcagccagtctagacagttaaagagtgtgtctttcttccttgacagatattatctaagaacctcctcaattcgtaacagcacacatagagatttatggctttagctgactaaatgaatgttgcttcagcctgtgatttgtggtctagcgaacaaccgcagagcatgtcctttacaattgattgacctttgcatagcttattttgggccttactaagaacatcttaaactggaaatgatcctattaagaaagtgtcctgtgctaacttcagaagaagttattcttccttaaagacttaattttctaactgcattttgagtctcacc

SEQ ID NO: 39325 - DNA, 686 bp, Homo sapiens
gtggattcacgaacctcgagctggcagtgagttatgggcaagccaggcctcagccactcacagggcctcagttttcccatctgcacagggagaagggaaggttcagtggccctgtgagctttgctagcaggtggtgatggggtgggtcatctgaatctgagtcaggtggaatcttccccaacctgggctttggtttcattttgttgttatcctttaaccttacctgctttccaagagagattttatgttttcttggttttttttttttggtttgtttgtttggtttttaggggtagggtcttgtagaatgcaatggtgcaattatagctcactgcagcctccaacttctgggttcaagtgatcctcccaccttgttttttgttttttgttttgtcttgtttttttggtagagacagggttttgctgtgttccccaggctgctgtcaaactcctgggctcacccatctcggcctcctaaagcgctgggattacaggcacgagccactatacctggccaagattttatattttctaattgcttcacatactgaatggaaaatagcatgacagttataacagaagtaaagaaagtcacatgagagtccaccacctaaaatataacttcctttttctttgttctggcctggtttgggccgtatgtatttgttattgtatctcttaaaaaa

SEQ ID NO: 39326 - DNA, 296 bp, Homo sapiens
tagatgattcaataaatgatcgactgtgtactcatttggggataaaatgtggagatcttctcaagaaaattacaaattgatttaaaaagaatcatgtaattcttggtgaaacaccgtctctactaaatatacaaaaaaaaattagccaggcgtggtggcgggcgcttgtagtcccagctacttgggaggctgaggcaggagaatcgcttgaacccaggaggcggaggttgtagtgagccaagatcgttccactgcactccagcctgggcgacagagcgagactccatctcaaaaaa

SEQ ID NO: 39327 - DNA, 497 bp, Homo sapiens
catgacagccatgagagctctgagggggtgtgtttctccaggcatgtggcctacccacccacaccaatgggagaagctgctgctgcactaagcagtggatcatctgattacttctactggcttcggtctccccctcaaatacacagccatccaggccccaaaaaccctagggggaagggtcccttggctcttactcaataatccacaaaatctcattgcaggcggagtccttaataatgccatctgatgaataatggttctgtattctggctgcacattggaattatctgtgtaactttaaaaactaaacatttctcacatattatatgattctattcagcagatcagcagttgccattgcctatgagggaagctacagggaatgactgctaatgggtgcagagtttctttttgagatgttgaaaatgttctggaatgaaacagtgatgttggctgtacaaccttatgaataaaaaaattgaattgtatactttaaa

SEQ ID NO: 39328 - DNA, 272 bp, Homo sapiens
acaccccatctctactaaaaatacaaaaattagccaggcgtggtggtggacacctgtaaggtgaggcaggagaatcgcttgaacccaggaggcagaggttgcagtggatcgcgccactgcatactagcctgggcgacagagcaagactctgtctcaaaagaaagaaaatcttcccttttttgcatacagttgttcacatttcaagaaacatatatagtcacgtaaccaaaaccacaatcaagatgcagaatggttccatcgccaaaaaaaaa

SEQ ID NO: 39329 - DNA, 574 bp, Homo sapiens
tcaattaggtagataagacatgaacatgcataactgtaatgcaaggtcagaactactaagggacatacaaataaaaatactgtagtgtttcagaggaaatacaattagagattgagaggggagggtattaatgtaagagaacggtaggctaaaatcacataaatagaaaaatgtgaagagtgtgtaggaaagaacaagcaattcagtgtagttatagtgtgggcattatgaaaggaaatggtgggcagttggagaatgacaaatgtaacttgaatcatgtgggttaacatttgtatgaattatgtgggtctacattatggaacagcatttttttcaactcaaataattattggtgagtgttactaaaataattatttgtgtgtttaccccccttgtggtatataggactcttggatgcaggtgttggaaatatgatttcagtaaccttaagcaaaaaaaccaagttaatgtgtgtaataattggcaagtctggttagggcttaggctgagctggatctgggagctcagataatgtctctccatctttgaatccagtggtctctgttcaacagat

SEQ ID NO: 39330 - DNA, 396 bp, Homo sapiens
caccaactattatccctgagatgaccttggctgtggaacccagattctgttcagggccgagagcgccacctggtgattccagtttgtaaacggaggctggtgggacctcaaccccagctggtatccaggctcttgacaccatctggagaaggaattcaagagtgtgtcagaaaatgatgaaagtacaaagatttattgcaaagcgaaaaatacacactcaagaaaggggagtatgggtggactcaagacagagtccgatgggacttggggtttctaccttttgggtttcttttttttttttttttgatatggagtctcgcacttccagcctgggctacgaaggaagactctgtctcaaaataaaataaaataaaaataaagctgctatcaaaaaaa

SEQ ID NO: 39331 - DNA, 277 bp, Homo sapiens
tccagatttttgcttagctgggtagtttctaaactcaacagactctccaggtaggtagttcctgcacggggctttcctgtcactggatctatgacttttccaactttgaaaatgatcttggcctgttcatgtttcacatgcttcgttcatgggacaggtaaagctctgagaagcacgatatccccagctgtgcactgccgaaggccatcgtgaacaaaggaggttttccacttattataatactttaataaatagggatccagaacaagcccggtca

SEQ ID NO: 39332 - DNA, 462 bp, Homo sapiens
  misc_feature (461)..(462): n is a, c, g, or t
tctcaaaccgacagtgtgctctgtgacccaaggcaagtcttggagcctttcaaggcctcaatttcttctgtaaccttgtggtttcacaattgtcaaccttttgttctgccgaccattgtcgtcatagtcttacttgcagagggcatagtgctgatgggacaagtgacatgggtatgagccccatgtaaactaaaacataattacctttcctttaggtgttggctacagttatcccaaacttggacttgaggtcttgtatatgcatgccattggtcacataccatcagaatagaattctcaaaaactctttagtaaataagataaacatcctacttataacagctcattatggattttatttttattgtctggctctttcagaccccagcaactgcaattctgacttaataatcaattgtttctaatcattaaaaatgtatatagaaaaactgaaaaaaaann

SEQ ID NO: 39333 - DNA, 1027 bp, Homo sapiens
gatcatgaaggtggggtgaattattagagtggagaagattcacaggggaggtggcttttgagccaggcctttttaataaagcttatcgagcatcattcaagacttccaatcagtggagtgacacaatcatgtcattatgaaataaacgtgacaaatgaactggagaggaaaggggcaaaaggaaaggatctaagatgtagctatttaaacaaaacaagagatgacaaggctaatggtagtgggaaacaaaagaaactaatccatgaaccaatattacaaatgaatggaactgccatgacttgacaaatgattggatgtggtgcatatgtgggaagagagaatcaaagacaatttgaggtctttagccctgatgaatagaaggatggtgaagcacttaaatgagataaggtatacagtaaggaacagcaaattttcaatgggagtgggggaatagaatgagctcagtcctagacatgttgagactatgtgtccatggtccacctatagaagaaaaataaggttctagagcttaggagagtatgcaaagctggaactgctatagtttagggaactgagggatccttacagccaacagtagaagatgtaattgtccagatatgagcaagagtgtacaggcagactcctggggagtgcctacattccagggtagatacaggaatcgcaggtggggacccagacttacatggaactagagcagtcaggaaagacatgttcagtgtagtattaaactccatacagaggagaaagtttcaagaaggaggagggtcaaaatgcccctcaaaactgcaggaagtttaaatgcagtgagtgatgagaagaaactattggattagcaattagtaggaacttgatgttccatagagtaggcattttaagggaatgaagggaacagaaataataaaaaaataaaagagtaaagaggataacttgagtttgaaattatacacgtacacatgtgcacacacacgcacacacacacagagttgccatgtccttcgtcttcacc

SEQ ID NO: 39334 - DNA, 381 bp, Homo sapiens
actgagagctcacaaaggagctggaatgagcacaggcagaagttctgaaattatagttcggttgccataatgagtgggctccattacacccagaaaaccatgtcccctttttcagtttttatctctgtgaagtagacacattctgacctgtgataaaatgcaatcagcggccaggcacagtggctcacacctgtaatcccagcactttgggaggctgaggcgggcagatcacgacgtcaggagttcaagaccagcctgaccaacatggtgaaaccccacctctactaaaattacaaaaattatccgggcatggtggcacatgcctgtagtcccagttactcaggaggcttgaggcaggagaatcgcttgaacccgggaggc

SEQ ID NO: 39335 - DNA, 328 bp, Homo sapiens
ggttaaaagattactattgaagggatctttaaaaaaacaattaagaagggctgggtgtggtggctcacgcctgtaatcccagcactttgggaggccgaggcgggtggatcacgaggtgaggagatcaagaccatcctagctaacacggtgaaaccccatctctactaaaaatataaaaaattagctgggcgtgttggtgggcacctgtagtcccagctactcaggaggctgaggcaggagaatagcgtgaacccgggaggcggagcttgcagtgagctgagatggcgccactacactccagcctgggtgacaaagcgagactccgtct

SEQ ID NO: 39336 - DNA, 986 bp, Homo sapiens
ccagtacactcttctgtgtttccgtattatcttgttggtatttctatcccagctgtagagtttttaataattctattataaataatggaatcaggccagcacagtggctcacgtcacataatcccactctccttaagagctttttttgtcactgcatatcaactcagttgacaaggactggcccccaaaagaagctgcatactcacttggcagtcactccccattctccctagctcctggcaacaacttaacctgtctctgtggatttgcctattctggacatttcatataaattgaatcataatttatgtagtcttttgtgactggcttcttttacttaggatgtttttaaggttcttactgttgtaggatgtatcaggagtttgtttttatgatgaatgttccatcttatggacgtaccacatttgtccattcattagttgacagacatttgaattgcttccacttcctggcttctatgaataatgctgccataaacatttgtgataagtttttgagtgaatatgtgtttttgtttctcttgggcacatacagggaatggaattgttgggtgctgtgataaccttttgaggaactgccagacttacggaaagcagttgcactattttgcattcccaccaagcaatatgagggttccagtttccctccatcctcattaacactttattatctttttgattataggcatcctagtgtcaagtggcatcttattgtggttttgatttgcatttccatgatggttaacgatgttaagcatcttttcatgtgctcgttggccatctatatatctctggagaaatgtcttttgaaatactttgcccatttaaaaatgttatttgttgtttagccacccctccttaaaaaataaataatataataatccatcatcccttgccttttcaggaccatccgggaggcaaatctttcttagtctgaacttcatacatccctttagttcccagcct

SEQ ID NO: 39337 - DNA, 3380 bp, Homo sapiens
cggtgcgcattctaatccgtttcacacacggtgctgctacctcgtttgcttcgtgcgtgcgtgcgcgcgcagatgtgggccccgcgggagcagctactgggctggactgcggaagctctgcctgccaaggattctgcctggccctgggaagagaagcctagatatctgggaccagtgactttcgaggatgtggctgtgcttttcactgaggcagagtggaagagactgagccttgagcagaggaacctatacaaagaagtgatgctggaaaatctcaggaatctggtctcattggcagaatcaaagccagaagtccatacctgcccttcttgccctctggcctttggcagtcagcagttcctcagccaagatgagctacacaatcatcctattccaggtttccatgcaggaaatcaactccacccaggaaatccctgcccagaggatcagccacagtcacaacatccttctgataaaaatcacaggggggctgaagcagaagatcaacgagtggaaggaggcgtcagacccttgttttggagtacaaatgaaaggggggctttagtgggtttctctagcctgttccagagaccaccaataagctcttggggaggcaacagaatattagagatacagctcagtccagcccagaatgcaagctctgaggaagtagacagaatttccaagagggcagaaaccccagggtttggagcagtcacgtttggggagtgtgcactagcttttaaccagaagtcaaacctgttcagacagaaggcagtcacagcagaaaaatcttcagacaaaaggcagtcacaggtgtgcagggagtgtgggcgaggctttagcaggaagtcacagctcatcatacaccagaggacacacacaggagaaaagccttatgtctgcggagagtgtgggcgaggctttatagttgagtcagtcctccgcaaccacctgagtacacactccggggagaaaccttatgtgtgcagccattgtgggcgaggctttagctgcaagccatacctcatcagacatcagaggacacacacaagggagaaatcgtttatgtgcacagtgtgtgggcgaggctttcgtgaaaagtcagagctcattaagcaccagagaattcacacgggggataagccttatgtgtgcagagattgaggccgaggctttgtaaggagatcatgtctcaacacacaccagaggatacattcagatgagaagccttttgtttgcagagagtgtgggcgaggctttcgtgctaaatcaactctcctcctacaccagtggacacattcagaggtgaaacctcacgtgtgtgaggagtgtgggcatggatttagccagaagtcgtcgctcaaatcacatcggagaacacactcaggggagaagccttatgtgtgtggggaatgtgggcggggatttagccggaggatagtcctcaatggacactggaggacacacacgggagagaagccttacacgtgctttgagtgtgggcgaaactttagcctcaagtccgctcttagtgtacatcagaggatacactctggggagaagccttatgcatgcacggagtgtgggcaaggctttatcacgaaatcacagctcatcagacaccagaggacacacacaggagaaaagccttatgtctgcggagagtgtgggcgaggctttatagctcagtcaaccctccactaccaccggagtacacactccaaggaaaaaccttatgtgtgcagccagtgtgggcgaggcttttgtgataaatcaactctcctcgcacacgagcagacacattcaggggagaagccttatgtgtgtggggaatgtgggcggggatttggccggaagatactcctcaacagacactggaggacacacacaggagagaaaccttacgcatgcatcgagtgtgggcgaaactttagccacaagtccactctcagcttacatcagaggatacactcgggggagaagccttatgcatgcgtggagtgtgggcaaagctttaggagaaagtcacagctcatcatacaccagaagatacactcggggaaaagctttagaggtgcaaggagtgaggatgtgattttagcaacaagtcagccatcagccacaccagcggaaatgcttagggagaagccttgtttgtaaggtaatgtggacagagctgtacgtggacatcattacttgtcacgtgtcagaggacacactcgggagaaaccttcatggagtgagagtaaggtgttggctggaagtggccccttaagagatacttggagtcaaatctatccactgtacgcccaccccactcttgttctaagagctttggggacagtcttttgaccccttacattcctttagatgtgaagatgacagagatctaacttctgagagcagaggtgtcaagtgacggtccccttggaggaatggtctttgcatctgactacttccttctgcaactgtgttcttccattagcttccatgacactctcctgctttatttttttctacatctctagcctttgctgtttcctctcctaccccacctttagattttactcagagttcagtctccagccctacaatctgagggacacctttaccaggtccccttcctaaccctccagtcccaaatccaagattctttaaccacactctaaaagttcttcagactcaggacttaaacatagccacgccaccttggccttcaatgacagggatctagcaatgctgcatcatcagccttccaataccaggtttaagggtattttaaacacagctcctcttaaatcctccaatctcagtacccagtgttttagccatgctcgggtggctaaattacatccaggaatggtgccagggcctttagccatttgtctctcctcacactccagggcccatatggcccaggttctgacagtttgccttactcccttgggctggggctagccctacctgataccctgtgtcaatgagtgtaccttggagagctatccactcaggccccagtgcctctatttgctaagggactctgccacagaaaagaaggggagagatgttcatgtaacctcaaaatacttaggcttggttttgatgctagagaggaaaaaggacttggagagagagaaggaatggctggtccagaggcttttgtccactccctctcactggaagtggttgatctccagggaatccccaaggttagcctgcttaggggaagggctaggggtacctggaatgtaggatctcccccatgcctggcctaccaccctaatgtgtctggaattggtgggttcttggtcttgctgacttcaagaatgaagccgtggaccctcacggtgagtgttacaattcttaaaaaaaatgtg

SEQ ID NO: 39338 - DNA, 2441 bp, Homo sapiens
cggtgcgcattctaatccgtttcacacacggtgctgctacctcgtttgcttcgtgcgtgcgtgcgcgcgcagatgtgggccccgcgggagcagctactgggctggactgcggaagctctgcctgccaaggattctgcctggccctgggaagagaagcctagatatctggttccagtggcagatggggcactggccagaggggttaggaggatttggactctccttgggagtcgctgtgatacggccttcaattatagttgtctttccttcttggatttccaccacttccctgaaaccacgagctggaagctgagaccagctggtcactgctgggcctgctaggagcccacacggaagctgcccacagccagacaccagagcctcaaaggccgccatcttgaaaaaccaaccctgacctccacaatgattgattttcaaatgttgaaccagctttgcagaactataataaacccaagtgtgataccctgtctcaagtattgcggtgatcaaataggaccagtgactttcgaggatgtggctgtgcttttcactgaggcagagtggaagagactgagccttgagcagaggaacctatacaaagaagtgatgctggaaaatctcaggaatctggtctcattggcagaatcaaagccagaagtccatacctgcccttcttgccctctggcctttggcagtcagcagttcctcagccaagatgagctacacaatcatcctattccaggtttccatgcaggaaatcaactccacccaggaaatccctgcccagaggatcagccacagtcacaacatccttctgataaaaatcacaggggggctgaagcagaagatcaacgagtggaaggaggcgtcagacccttgttttggagtacaaatgaaaggggggctttagtgggtttctctagcctgttccagagaccaccaataagctcttggggaggcaacagaatattagagatacagctcagtccagcccagaatgcaagctctgaggaagtagacagaatttccaagagggcagaaaccccagggtttggagcagtcacgtttggggagtgtgcactagcttttaaccagaagtcaaacctgttcagacagaaggcagtcacagcagaaaaatcttcagacaaaaggcagtcacaggtgtgcagggagtgtgggcgaggctttagcaggaagtcacagctcatcatacaccagaggacacacacaggagaaaagccttatgtctgcggagagtgtgggcgaggctttatagttgagtcagtcctccgcaaccacctgagtacacactccggggagaaaccttatgtgtgcagccattgtgggcgaggctttagctgcaagccatacctcatcagacatcagaggacacacacaagggagaaatcgtttatgtgcacagtgtgtgggcgaggctttcgtgaaaagtcagagctcattaagcaccagaggtgtcaagtgacggtccccttggaggaatggtctttgcatctgactacttccttctgcaactgtgttcttccattagcttccatgacactctcctgctttatttttttctacatctctagcctttgctgtttcctctcctaccccacctttagattttactcagagttcagtctccagccctacaatctgagggacacctttaccaggtccccttcctaaccctccagtcccaaatccaagattctttaaccacactctaaaagttcttcagactcaggacttaaacatagccacgccaccttggccttcaatgacagggatctagcaatgctgcatcatcagccttccaataccaggtttaagggtattttaaacacagctcctcttaaatcctccaatctcagtacccagtgttttagccatgctcgggtggctaaattacatccaggaatggtgccagggcctttagccatttgtctctcctcacactccagggcccatatggcccaggttctgacagtttgccttactcccttgggctggggctagccctacctgataccctgtgtcaatgagtgtaccttggagagctatccactcaggccccagtgcctctatttgctaagggactctgccacagaaaagaaggggagagatgttcatgtaacctcaaaatacttaggcttggttttgatgctagagaggaaaaaggacttggagagagagaaggaatggctggtccagaggcttttgtccactccctctcactggaagtggttgatctccagggaatccccaaggttagcctgcttaggggaagggctaggggtacctggaatgtaggatctcccccatgcctggcctaccaccctaatgtgtctggaattggtgggttcttggtcttgctgacttcaagaatgaagccgtggaccctcacggtgagtgttacaattcttaaaaaaaatgtg

SEQ ID NO: 39339 - DNA, 840 bp, Homo sapiens
cggtgcgcattctaatccgtttcacacacggtgctgctacctcgtttgcttcgtgcgtgcgtgcgcgcgcagatgtgggccccgcgggagcagctactgggctggactgcggaagctctgcctgccaaggattctgcctggccctgggaagagaagcctagatatctgggaccagtgactttcgaggatgtggctgtgcttttcactgaggcagagtggaagagactgagccttgagcagaggaacctatacaaagaagtgatgctggaaaatctcaggaatctggtctcattggttctggaactgggaagtccaagatcagggctcctgcccctggacctgaacctggatctttggctttgatgttggaccttgtgtgtggatatgaactttgaacctgcaccttggaactaaacctctgacttggatttgttctgcattttggaactcaccttagacctgaaccttggtcatgaaatggatctgaatcattcttgggtcttggacatgggacttggacctccatgtgtatcttggacttaggaccatgatctggaccttgtaaaattgacttggactttggacttggaccttggactagaatttgtccctggctgtggacctcgtctttggatctggatctggacctggtcttggatgttggacctaagatgcaggccttgatttgatttggaacatggacttgggtccttgcacattggcccaacacccgcgtctttggaactgcatcttggaccttggatctgaaatttaaacaggggaggtgaccttcatttcttgtatttgactttataactgggaaatccaatctctacttgt

SEQ ID NO: 39340 - DNA, 3101 bp, Homo sapiens
atagaagcccagagagaggtaggtgtaggaggcctgcagctctgattgccactccaacctgggcaataagagctactccagcctgggcaatatgagctacacaatcatcctattccaggtttccatgcaggaaatcaactccacccaggaaatccctgcccagaggatcagccacagtcacaacatccttctgataaaaatcacaggggggctgaagcagaagatcaacgagtggaaggaggcgtcagacccttgttttggagtacaaatgaaaggggggctttagtgggtttctctagcctgttccagagaccaccaataagctcttggggaggcaacagaatattagagatacagctcagtccagcccagaatgcaagctctgaggaagtagacagaatttccaagagggcagaaaccccagggtttggagcagtcacgtttggggagtgtgcactagcttttaaccagaagtcaaacctgttcagacagaaggcagtcacagcagaaaaatcttcagacaaaaggcagtcacaggtgtgcagggagtgtgggcgaggctttagcaggaagtcacagctcatcatacaccagaggacacacacaggagaaaagccttatgtctgcggagagtgtgggcgaggctttatagttgagtcagtcctccgcaaccacctgagtacacactccggggagaaaccttatgtgtgcagccattgtgggcgaggctttagctgcaagccatacctcatcagacatcagaggacacacacaagggagaaatcgtttatgtgcacagtgtgtgggcgaggctttcgtgaaaagtcagagctcattaagcaccagagaattcacacgggggataagccttatgtgtgcagagattgaggccgaggctttgtaaggagatcatgtctcaacacacaccagaggatacattcagatgagaagccttttgtttgcagagagtgtgggcgaggctttcgtgctaaatcaactctcctcctacaccagtggacacattcagaggtgaaacctcacgtgtgtgaggagtgtgggcatggatttagccagaagtcgtcgctcaaatcacatcggagaacacactcaggggagaagccttatgtgtgtggggaatgtgggcggggatttagccggaggatagtcctcaatggacactggaggacacacacgggagagaagccttacacgtgctttgagtgtgggcgaaactttagcctcaagtccgctcttagtgtacatcagaggatacactctggggagaagccttatgcatgcacggagtgtgggcaaggctttatcacgaaatcacagctcatcagacaccagaggacacacacaggagaaaagccttatgtctgcggagagtgtgggcgaggctttatagctcagtcaaccctccactaccaccggagtacacactccaaggaaaaaccttatgtgtgcagccagtgtgggcgaggcttttgtgataaatcaactctcctcgcacacgagcagacacattcaggggagaagccttatgtgtgtggggaatgtgggcggggatttggccggaagatactcctcaacagacactggaggacacacacaggagagaaaccttacgcatgcatcgagtgtgggcgaaactttagccacaagtccactctcagcttacatcagaggatacactcgggggagaagccttatgcatgcgtggagtgtgggcaaagctttaggagaaagtcacagctcatcatacaccagaagatacactcggggaaaagctttagaggtgcaaggagtgaggatgtgattttagcaacaagtcagccatcagccacaccagcggaaatgcttagggagaagccttgtttgtaaggtaatgtggacagagctgtacgtggacatcattacttgtcacgtgtcagaggacacactcgggagaaaccttcatggagtgagagtaaggtgttggctggaagtggccccttaagagatacttggagtcaaatctatccactgtacgcccaccccactcttgttctaagagctttggggacagtcttttgaccccttacattcctttagatgtgaagatgacagagatctaacttctgagagcagaggtgtcaagtgacggtccccttggaggaatggtctttgcatctgactacttccttctgcaactgtgttcttccattagcttccatgacactctcctgctttatttttttctacatctctagcctttgctgtttcctctcctaccccacctttagattttactcagagttcagtctccagccctacaatctgagggacacctttaccaggtccccttcctaaccctccagtcccaaatccaagattctttaaccacactctaaaagttcttcagactcaggacttaaacatagccacgccaccttggccttcaatgacagggatctagcaatgctgcatcatcagccttccaataccaggtttaagggtattttaaacacagctcctcttaaatcctccaatctcagtacccagtgttttagccatgctcgggtggctaaattacatccaggaatggtgccagggcctttagccatttgtctctcctcacactccagggcccatatggcccaggttctgacagtttgccttactcccttgggctggggctagccctacctgataccctgtgtcaatgagtgtaccttggagagctatccactcaggccccagtgcctctatttgctaagggactctgccacagaaaagaaggggagagatgttcatgtaacctcaaaatacttaggcttggttttgatgctagagaggaaaaaggacttggagagagagaaggaatggctggtccagaggcttttgtccactccctctcactggaagtggttgatctccagggaatccccaaggttagcctgcttaggggaagggctaggggtacctggaatgtaggatctcccccatgcctggcctaccaccctaatgtgtctggaattggtgggttcttggtcttgctgacttcaagaatgaagccgtggaccctcacggtgagtgttacaattcttaaaaaaaatgtg

SEQ ID NO: 39341 - DNA, 3326 bp, Homo sapiens
cggtgcgcattctaatccgtttcacacacggtgctgctacctcgtttgcttcgtgcgtgcgtgcgcgcgcagatgtgggccccgcgggagcagctactgggctggactgcggaagctctgcctgccaaggattctgcctggccctgggaagagaagcctagatatctgggaccagtgactttcgaggatgtggctgtgcttttcactgaggcagagtggaagagactgagccttgagcagaggaacctatacaaagaagtgatgctggaaaatctcaggaatctggtctcattggcagaatcaaagccagaagtccatacctgcccttcttgccctctggcctttggcagtcagcagttcctcagccaagatgagctacacaatcatcctattccaggtttccatgcaggaaatcaactccacccaggaaatccctgcccagaggatcagccacagtcacaacatccttctgataaaaatcacaggggggctgaagcagaagatcaacgagtggaaggaggcgtcagacccttgttttggagtacaaatgaaaggggggctttagtgggtttctctagcctgttccagagaccaccaataagctcttggggaggcaacagaatattagagatacagctcagtccagcccagaatgcaagctctgaggaagtagacagaatttccaagagggcagaaaccccagggtttggagcagtcacgtttggggagtgtgcactagcttttaaccagaagtcaaacctgttcagacagaaggcagtcacagcagaaaaatcttcagacaaaaggcagtcacaggtgtgcagggagtgtgggcgaggctttagcaggaagtcacagctcatcatacaccagaggacacacacaggagaaaagccttatgtctgcggagagtgtgggcgaggctttatagttgagtcagtcctccgcaaccacctgagtacacactccggggagaaaccttatgtgtgcagccattgtgggcgaggctttagctgcaagccatacctcatcagacatcagaggacacacacaagggagaaatcgtttatgtgcacagtgtgtgggcgaggctttcgtgaaaagtcagagctcattaagcaccagagaattcacacgggggataagccttatgtgtgcagagattgaggccgaggctttgtaaggagatcatgtctcaacacacaccagaggatacattcagatgagaagccttttgtttgcagagagtgtgggcgaggctttcgtgctaaatcaactctcctcctacaccagtggacacattcagaggtgaaacctcacgtgtgtgaggagtgtgggcatggatttagccagaagtcgtcgctcaaatcacatcggagaacacactcaggggagaagccttatgtgtgtggggaatgtgggcggggatttagccggaggatagtcctcaatggacactggaggacacacacgggagagaagccttacacgtgctttgagtgtgggcgaaactttagcctcaagtccgctcttagtgtacatcagaggatacactctggggagaagccttatgcatgcacggagtgtgggcaaggctttatcacgaaatcacagctcatcagacaccagaggacacacacaggagaaaagccttatgtctgcggagagtgtgggcgaggctttatagctcagtcaaccctccactaccaccggagtacacactccaaggaaaaaccttatgtgtgcagccagtgtgggcgaggcttttgtgataaatcaactctcctcgcacacgagcagacacattcaggggagaagccttatgtgtgtggggaatgtgggcggggatttggccggaagatactcctcaacagacactggaggacacacacaggagagaaaccttacgcatgcatcgagtgtgggcgaaactttagccacaagtccactctcagcttacatcagaggatacactcgggggagaagccttatgcatgcgtggagtgtgggcaaagctttaggagaaagtcacagctcatcatacaccagaagatacactcggggaaaagctttagaggtgcaaggagtgaggatgtgattttagcaacaagtcagccatcagccacaccagcggaaatgcttagggagaagccttgtttgtaaggtaatgtggacagagctgtacgtggacatcattacttgtcacgtgtcagaggacacactcgggagaaaccttcatggagtgagagtaaggtgttggctggaagtggccccttaagagatacttggagtcaaatctatccactgtacgcccaccccactcttgttctaagagctttggggacagtcttttgaccccttacattcctttagatgtgaagatgacagagatctaacttctgagagcagaggtgtcaagtgacggtccccttggaggaatggtctttgcatctgactacttccttctgcaactgtgttcttccattagcttccatgacactctcctgctttatttttttctacatctctagcctttgctgtttcctctcctaccccacctttagattttactcagagttcagtctccagccctacaatctgagggacacctttaccaggtccccttcctaaccctccagtcccaaatccaagattctttaaccacactatgacagggatctagcaatgctgcatcatcagccttccaataccaggtttaagggtattttaaacacagctcctcttaaatcctccaatctcagtacccagtgttttagccatgctcgggtggctaaattacatccaggaatggtgccagggcctttagccatttgtctctcctcacactccagggcccatatggcccaggttctgacagtttgccttactcccttgggctggggctagccctacctgataccctgtgtcaatgagtgtaccttggagagctatccactcaggccccagtgcctctatttgctaagggactctgccacagaaaagaaggggagagatgttcatgtaacctcaaaatacttaggcttggttttgatgctagagaggaaaaaggacttggagagagagaaggaatggctggtccagaggcttttgtccactccctctcactggaagtggttgatctccagggaatccccaaggttagcctgcttaggggaagggctaggggtacctggaatgtaggatctcccccatgcctggcctaccaccctaatgtgtctggaattggtgggttcttggtcttgctgacttcaagaatgaagccgtggaccctcacggtgagtgttacaattcttaaaaaaaatgtg

SEQ ID NO: 39342 - DNA, 1999 bp, Homo sapiens
tcgaatggaacccgttcgtacgagaatcgctgtcctctccttgctcgagatccattgtgctctaaagcaatggacactggaggacacacacgggagagaagccttacacgtgctttgagtgtgggcgaaactttagcctcaagtccgctcttagtgtacatcagaggatacactctggggagaagccttatgcatgcacggagtgtgggcaaggctttatcacgaaatcacagctcatcagacaccagaggacacacacaggagaaaagccttatgtctgcggagagtgtgggcgaggctttatagctcagtcaaccctccactaccaccggagtacacactccaaggaaaaaccttatgtgtgcagccagtgtgggcgaggcttttgtgataaatcaactctcctcgcacacgagcagacacattcaggggagaagccttatgtgtgtggggaatgtgggcggggatttggccggaagatactcctcaacagacactggaggacacacacaggagagaaaccttacgcatgcatcgagtgtgggcgaaactttagccacaagtccactctcagcttacatcagaggatacactcgggggagaagccttatgcatgcgtggagtgtgggcaaagctttaggagaaagtcacagctcatcatacaccagaagatacactcggggaaaagctttagaggtgcaaggagtgaggatgtgattttagcaacaagtcagccatcagccacaccagcggaaatgcttagggagaagccttgtttgtaaggtaatgtggacagagctgtacgtggacatcattacttgtcacgtgtcagaggacacactcgggagaaaccttcatggagtgagagtaaggtgttggctggaagtggccccttaagagatacttggagtcaaatctatccactgtacgcccaccccactcttgttctaagagctttggggacagtcttttgaccccttacattcctttagatgtgaagatgacagagatctaacttctgagagcagaggtgtcaagtgacggtccccttggaggaatggtctttgcatctgactacttccttctgcaactgtgttcttccattagcttccatgacactctcctgctttatttttttctacatctctagcctttgctgtttcctctcctaccccacctttagattttactcagagttcagtctccagccctacaatctgagggacacctttaccaggtccccttcctaaccctccagtcccaaatccaagattctttaaccacactctaaaagttcttcagactcaggacttaaacatagccacgccaccttggccttcaatgacagggatctagcaatgctgcatcatcagccttccaataccaggtttaagggtattttaaacacagctcctcttaaatcctccaatctcagtacccagtgttttagccatgctcgggtggctaaattacatccaggaatggtgccagggcctttagccatttgtctctcctcacactccagggcccatatggcccaggttctgacagtttgccttactcccttgggctggggctagccctacctgataccctgtgtcaatgagtgtaccttggagagctatccactcaggccccagtgcctctatttgctaagggactctgccacagaaaagaaggggagagatgttcatgtaacctcaaaatacttaggcttggttttgatgctagagaggaaaaaggacttggagagagagaaggaatggctggtccagaggcttttgtccactccctctcactggaagtggttgatctccagggaatccccaaggttagcctgcttaggggaagggctaggggtacctggaatgtaggatctcccccatgcctggcctaccaccctaatgtgtctggaattggtgggttcttggtcttgctgacttcaagaatgaagccgtggaccctcacggtgagtgttacaattcttaaaaaaaatgtg

SEQ ID NO: 39343 - DNA, 1311 bp, Homo sapiens
ctaatggataatgagtgttatcttactgtggttttgatttgcatttacctaattactaatgatatgaagcatcttttcacgtgcttactggccattcgtgtattttctttggagaatgtctattcaatctctttgcccatttgtgaatcacactcgggagaaaccttcatggagtgagagtaaggtgttggctggaagtggccccttaagagatacttggagtcaaatctatccactgtacgcccaccccactcttgttctaagagctttggggacagtcttttgaccccttacattcctttagatgtgaagatgacagagatctaacttctgagagcagaggtgtcaagtgacggtccccttggaggaatggtctttgcatctgactacttccttctgcaactgtgttcttccattagcttccatgacactctcctgctttatttttttctacatctctagcctttgctgtttcctctcctaccccacctttagattttactcagagttcagtctccagccctacaatctgagggacacctttaccaggtccccttcctaaccctccagtcccaaatccaagattctttaaccacactctaaaagttcttcagactcaggacttaaacatagccacgccaccttggccttcaatgacagggatctagcaatgctgcatcatcagccttccaataccaggtttaagggtattttaaacacagctcctcttaaatcctccaatctcagtacccagtgttttagccatgctcgggtggctaaattacatccaggaatggtgccagggcctttagccatttgtctctcctcacactccagggcccatatggcccaggttctgacagtttgccttactcccttgggctggggctagccctacctgataccctgtgtcaatgagtgtaccttggagagctatccactcaggccccagtgcctctatttgctaagggactctgccacagaaaagaaggggagagatgttcatgtaacctcaaaatacttaggcttggttttgatgctagagaggaaaaaggacttggagagagagaaggaatggctggtccagaggcttttgtccactccctctcactggaagtggttgatctccagggaatccccaaggttagcctgcttaggggaagggctaggggtacctggaatgtaggatctcccccatgcctggcctaccaccctaatgtgtctggaattggtgggttcttggtcttgctgacttcaagaatgaagccgtggaccctcacggtgagtgttacaattcttaaaaaaaatgtg

SEQ ID NO: 39344 - DNA, 907 bp, Homo sapiens
cggtgcgcattctaatccgtttcacacacggtgctgctacctcgtttgcttcgtgcgtgcgtgcgcgcgcagatgtgggccccgcgggagcagctactgggctggactgcggaagctctgcctgccaaggattctgcctggccctgggaagagaagcctagatatctgggaccagtgactttcgaggatgtggctgtgcttttcactgaggcagagtggaagagactgagccttgagcagaggaacctatacaaagaagtgatgctggaaaatctcaggaatctggtctcattggtgctctcctatcaaatctagaatgtgcaaagattgtggacagcaactgaggtgctaccagtgataccaaaaagtctgctggataaacaccatctctattctaatattatggagagatcaggatctccgtgtgcccaaatcaaacctgttaatacactcagctgtcctcaggtggtaacactgaggtcaacacacaactccaaacatcaggaaacaagtcataaccattttgctctgaaacaggtgcctgaccacaacggtgttgactcacttttatttactaaattaagacctaatataggtttcattttccaaaaaaaaaagaacacagacagaacaaaaactgtgttgggcgcggccgttgcccttgaaaaaagcattcttagccactctgttggggcgggcggcaatgagtagaactggcaactgcggtgtccaagagactccggccacgaaggtgtgtgtctccccaaaaagcgcggggcccggcgtcgacacaccagtcgctgggcaaacggctataaaggccagagcgatgccaccccgccgggagggacggcaaagacagcgagagacgaagaggagacaaagcagcacagcaggcgcagagaat

SEQ ID NO: 39345 - DNA, 3725 bp, Homo sapiens
cggtgcgcattctaatccgtttcacacacggtgctgctacctcgtttgcttcgtgcgtgcgtgcgcgcgcagatgtgggccccgcgggagcagctactgggctggactgcggaagctctgcctgccaaggattctgcctggccctgggaagagaagcctagatatctggttccagtggcagatggggcactggccagaggggttaggaggatttggactctccttgggagtcgctgtgatacggccttcaattatagttgtctttccttcttggatttccaccacttccctgaaaccacgagctggaagctgagaccagctggtcactgctgggcctgctaggagcccacacggaagctgcccacagccagacaccagagcctcaaaggccgccatcttgaaaaaccaaccctgacctccacaatgattgattttcaaatgttgaaccagctttgcagaactataataaacccaagtgtgataccctgtctcaagtattgcggtgatcaaataggaccagtgactttcgaggatgtggctgtgcttttcactgaggcagagtggaagagactgagccttgagcagaggaacctatacaaagaagtgatgctggaaaatctcaggaatctggtctcattggcagaatcaaagccagaagtccatacctgcccttcttgccctctggcctttggcagtcagcagttcctcagccaagatgagctacacaatcatcctattccaggtttccatgcaggaaatcaactccacccaggaaatccctgcccagaggatcagccacagtcacaacatccttctgataaaaatcacaggggggctgaagcagaagatcaacgagtggaaggaggcgtcagacccttgttttggagtacaaatgaaaggggggctttagtgggtttctctagcctgttccagagaccaccaataagctcttggggaggcaacagaatattagagatacagctcagtccagcccagaatgcaagctctgaggaagtagacagaatttccaagagggcagaaaccccagggtttggagcagtcacgtttggggagtgtgcactagcttttaaccagaagtcaaacctgttcagacagaaggcagtcacagcagaaaaatcttcagacaaaaggcagtcacaggtgtgcagggagtgtgggcgaggctttagcaggaagtcacagctcatcatacaccagaggacacacacaggagaaaagccttatgtctgcggagagtgtgggcgaggctttatagttgagtcagtcctccgcaaccacctgagtacacactccggggagaaaccttatgtgtgcagccattgtgggcgaggctttagctgcaagccatacctcatcagacatcagaggacacacacaagggagaaatcgtttatgtgcacagtgtgtgggcgaggctttcgtgaaaagtcagagctcattaagcaccagagaattcacacgggggataagccttatgtgtgcagagattgaggccgaggctttgtaaggagatcatgtctcaacacacaccagaggatacattcagatgagaagccttttgtttgcagagagtgtgggcgaggctttcgtgctaaatcaactctcctcctacaccagtggacacattcagaggtgaaacctcacgtgtgtgaggagtgtgggcatggatttagccagaagtcgtcgctcaaatcacatcggagaacacactcaggggagaagccttatgtgtgtggggaatgtgggcggggatttagccggaggatagtcctcaatggacactggaggacacacacgggagagaagccttacacgtgctttgagtgtgggcgaaactttagcctcaagtccgctcttagtgtacatcagaggatacactctggggagaagccttatgcatgcacggagtgtgggcaaggctttatcacgaaatcacagctcatcagacaccagaggacacacacaggagaaaagccttatgtctgcggagagtgtgggcgaggctttatagctcagtcaaccctccactaccaccggagtacacactccaaggaaaaaccttatgtgtgcagccagtgtgggcgaggcttttgtgataaatcaactctcctcgcacacgagcagacacattcaggggagaagccttatgtgtgtggggaatgtgggcggggatttggccggaagatactcctcaacagacactggaggacacacacaggagagaaaccttacgcatgcatcgagtgtgggcgaaactttagccacaagtccactctcagcttacatcagaggatacactcgggggagaagccttatgcatgcgtggagtgtgggcaaagctttaggagaaagtcacagctcatcatacaccagaagatacactcggggaaaagctttagaggtgcaaggagtgaggatgtgattttagcaacaagtcagccatcagccacaccagcggaaatgcttagggagaagccttgtttgtaaggtaatgtggacagagctgtacgtggacatcattacttgtcacgtgtcagaggacacactcgggagaaaccttcatggagtgagagtaaggtgttggctggaagtggccccttaagagatacttggagtcaaatctatccactgtacgcccaccccactcttgttctaagagctttggggacagtcttttgaccccttacattcctttagatgtgaagatgacagagatctaacttctgagagcagaggtgtcaagtgacggtccccttggaggaatggtctttgcatctgactacttccttctgcaactgtgttcttccattagcttccatgacactctcctgctttatttttttctacatctctagcctttgctgtttcctctcctaccccacctttagattttactcagagttcagtctccagccctacaatctgagggacacctttaccaggtccccttcctaaccctccagtcccaaatccaagattctttaaccacactctaaaagttcttcagactcaggacttaaacatagccacgccaccttggccttcaatgacagggatctagcaatgctgcatcatcagccttccaataccaggtttaagggtattttaaacacagctcctcttaaatcctccaatctcagtacccagtgttttagccatgctcgggtggctaaattacatccaggaatggtgccagggcctttagccatttgtctctcctcacactccagggcccatatggcccaggttctgacagtttgccttactcccttgggctggggctagccctacctgataccctgtgtcaatgagtgtaccttggagagctatccactcaggccccagtgcctctatttgctaagggactctgccacagaaaagaaggggagagatgttcatgtaacctcaaaatacttaggcttggttttgatgctagagaggaaaaaggacttggagagagagaaggaatggctggtccagaggcttttgtccactccctctcactggaagtggttgatctccagggaatccccaaggttagcctgcttaggggaagggctaggggtacctggaatgtaggatctcccccatgcctggcctaccaccctaatgtgtctggaattggtgggttcttggtcttgctgacttcaagaatgaagccgtggaccctcacggtgagtgttacaattcttaaaaaaaatgtg

SEQ ID NO: 39346 - DNA, 2705 bp, Homo sapiens
tcatccccttcgtgactgcagaaacttaggtttggagcagtcacgtttggggagtgtgcactagcttttaaccagaagtcaaacctgttcagacagaaggcagtcacagcagaaaaatcttcagacaaaaggcagtcacaggtgtgcagggagtgtgggcgaggctttagcaggaagtcacagctcatcatacaccagaggacacacacaggagaaaagccttatgtctgcggagagtgtgggcgaggctttatagttgagtcagtcctccgcaaccacctgagtacacactccggggagaaaccttatgtgtgcagccattgtgggcgaggctttagctgcaagccatacctcatcagacatcagaggacacacacaagggagaaatcgtttatgtgcacagtgtgtgggcgaggctttcgtgaaaagtcagagctcattaagcaccagagaattcacacgggggataagccttatgtgtgcagagattgaggccgaggctttgtaaggagatcatgtctcaacacacaccagaggatacattcagatgagaagccttttgtttgcagagagtgtgggcgaggctttcgtgctaaatcaactctcctcctacaccagtggacacattcagaggtgaaacctcacgtgtgtgaggagtgtgggcatggatttagccagaagtcgtcgctcaaatcacatcggagaacacactcaggggagaagccttatgtgtgtggggaatgtgggcggggatttagccggaggatagtcctcaatggacactggaggacacacacgggagagaagccttacacgtgctttgagtgtgggcgaaactttagcctcaagtccgctcttagtgtacatcagaggatacactctggggagaagccttatgcatgcacggagtgtgggcaaggctttatcacgaaatcacagctcatcagacaccagaggacacacacaggagaaaagccttatgtctgcggagagtgtgggcgaggctttatagctcagtcaaccctccactaccaccggagtacacactccaaggaaaaaccttatgtgtgcagccagtgtgggcgaggcttttgtgataaatcaactctcctcgcacacgagcagacacattcaggggagaagccttatgtgtgtggggaatgtgggcggggatttggccggaagatactcctcaacagacactggaggacacacacaggagagaaaccttacgcatgcatcgagtgtgggcgaaactttagccacaagtccactctcagcttacatcagaggatacactcgggggagaagccttatgcatgcgtggagtgtgggcaaagctttaggagaaagtcacagctcatcatacaccagaagatacactcggggaaaagctttagaggtgcaaggagtgaggatgtgattttagcaacaagtcagccatcagccacaccagcggaaatgcttagggagaagccttgtttgtaaggtaatgtggacagagctgtacgtggacatcattacttgtcacgtgtcagaggacacactcgggagaaaccttcatggagtgagagtaaggtgttggctggaagtggccccttaagagatacttggagtcaaatctatccactgtacgcccaccccactcttgttctaagagctttggggacagtcttttgaccccttacattcctttagatgtgaagatgacagagatctaacttctgagagcagaggtgtcaagtgacggtccccttggaggaatggtctttgcatctgactacttccttctgcaactgtgttcttccattagcttccatgacactctcctgctttatttttttctacatctctagcctttgctgtttcctctcctaccccacctttagattttactcagagttcagtctccagccctacaatctgagggacacctttaccaggtccccttcctaaccctccagtcccaaatccaagattctttaaccacactctaaaagttcttcagactcaggacttaaacatagccacgccaccttggccttcaatgacagggatctagcaatgctgcatcatcagccttccaataccaggtttaagggtattttaaacacagctcctcttaaatcctccaatctcagtacccagtgttttagccatgctcgggtggctaaattacatccaggaatggtgccagggcctttagccatttgtctctcctcacactccagggcccatatggcccaggttctgacagtttgccttactcccttgggctggggctagccctacctgataccctgtgtcaatgagtgtaccttggagagctatccactcaggccccagtgcctctatttgctaagggactctgccacagaaaagaaggggagagatgttcatgtaacctcaaaatacttaggcttggttttgatgctagagaggaaaaaggacttggagagagagaaggaatggctggtccagaggcttttgtccactccctctcactggaagtggttgatctccagggaatccccaaggttagcctgcttaggggaagggctaggggtacctggaatgtaggatctcccccatgcctggcctaccaccctaatgtgtctggaattggtgggttcttggtcttgctgacttcaagaatgaagccgtggaccctcacggtgagtgttacaattcttaaaaaaaatgtg

SEQ ID NO: 39347 - DNA, 444 bp, Homo sapiens
gatgtacatgagattgccaaatattttctattctagttgtgctgcaagacattgaacaaaatgttaatgaataacattataaatcaaggaactaagtacataggcttgagtaagcaaccctaaggatgtgtagtaagattccaagtagagctgctacaggtgagatacttaatggaatgtgaaacttcactgttggactgttaaccgaaaaggtttgctggctgtgcccctccagtgctaactgtgacatgtgatatttaatacaggtggagaaaaactagtcttagaaatgggatttttgtgaaaatagattccattttgattctggggctggaaaaacacttcataaacaaagtaatagtctccaaggaaatgaataataaggtttaaaatggtaacagcagttattactacttttatattaagaaaaacagtagaaaagga

SEQ ID NO: 39348 - DNA, 112 bp, Homo sapiens
tctgttcagcagacccatggagtgaactcaataaatatggccaacacatgagagccactggagacatggtggagcaggagtcctgtgtgagttcacaaattattcatgacag

SEQ ID NO: 39349 - DNA, 252 bp, Homo sapiens
ttgtaaggaattgaaatatgtaatgccacacataaacatttctcttaaaagttacaatgaaaggtggagcacagtagctcatgcctataattccaacaatttgggaggctgaggtgggaggatcacttgagtccaggagtttgagaccagcctcagctatgcagcaagaccttatctctatgtacacacacaaaataagctgggcatggtggtgcatgcctgtagtcccagctatttgggaggctgaggtgg

SEQ ID NO: 39350 - DNA, 383 bp, Homo sapiens
aatttaagcttttttggtgacttgaggctattattacaattaccctttctattattttgtggaagtaaaataagggtattggatataagctttactcatctcagttccaaacgggagacttccttcttgaataattcctgatatatctaatttctggttgtaatgaatttattacattaatattacacttatacgttccttgcagatactccagaggtagagaccagatgtccagtacctttagggtattggaatatgaattagggatgcctgcattgtttttttttttttaatcagcagaatgatactgttattgttggctttatggccgcggctgctttcagccctgaggatatataagaatgaaaaaaaaaaaacctagc

SEQ ID NO: 39351 - DNA, 119 bp, Homo sapiens
gtttatttcaaaatataaataactaaattggtagctcatttattatgtgacttgaaaatacaaaagtacatttaatagagttagtgtgctcaaatacatttatttttgataatagaata

SEQ ID NO: 39352 - DNA, 689 bp, Homo sapiens
aatagaagtagtagtagtagtagtagtagtagtagtagtagtagtggtcactgctatatggtgagcacttactacaccagcagaaggcctcatcacagccctgaaagttatccccgttttacagatgaggacgagaagtctcagagaggtagaaatttacctgctgtggcacagctgctcagcaagtggtcagggccaagggctgcaagtgaattctttttaactatctttctgtctgttccttagcttactttcaggtttagattgactttgctttgttgaaaatactaatggctcacacacataaaggtcagacatgatggagccctttcctcgttttagaatttggtccttgttacagccctgtgaagatagtgacataattatcctatggtattagtgaaactgattttctttaagtgtgcccctgtcattacttgtcacttgccttttgaattaaaataatgctacaagaactgctttttaatctatatattccatcattcaaattcaagtgtcttaagccttttacataccaaaataggtatatttgaatacaggagaagtcaaagaaaggcaatctggaccagaattctgatttttctgggtagtaaagtttccttcagaatgctggtggccagcataggattgccagttctttattttgccaagtaagaacattaaaaaaa

SEQ ID NO: 39353 - DNA, 479 bp, Homo sapiens
aatagaagtagtagtagtagtagtagtagtagtagtagtagtagtggtcactgctatatggtgagcacttactacaccagcagaaggcctcatcacagccctgaaagttatccccgttttacagatgaggacgagaagtctcagagaggtagaaatttacctgctgtggcacagctgctcagcaagtggtcagggccaagggctgcaagtgaattctttttaactatctttctgtctgttccttagcttactttcaggtttagattgactttgctttgttgaaaatactaatggctcacacacataaaggtcagacatgatggagccctttcctcgttttagaatttggtccttgttacagccctgtgaagatagtgacataattatcctatggtattagtgaaactgattttctttaagtgtgcccctgtcattacttgtcacttgccttttgaattaaaataatgctacaagaactg

SEQ ID NO: 39354 - DNA, 388 bp, Homo sapiens
ttcaaccaagatgccagcagtctgactcatcattgtttctgaactatcagtctaaatgtcaccacaatgaaaataatttgatgtccagtataatggtgcatgcctataatcccagctacttaggaggctgagataagaagatcacctgagcctaagagttctggcctgtagtgtgctatgccagtcaggtgtctacactaagctcgacatcaatataattacctcccggaagtagggggaccaccaggttacctaaggaggggtgaactggcccaggttggaaacagaggtcaaaactcctgtgctgatcactagtgggatcacgcctgtgagcaaccactgcactccagcctggggcaacacagcaagaccccatcttgggaaaaaa

SEQ ID NO: 39355 - DNA, 478 bp, Homo sapiens
cagtctggaagcatcactctcaaaaagccattgtagagaatccaagccgagtttaagagtgctgtggaaatacactgctgctactgctgtttctattactgtttgatgctgggactcttatgctccaaccacgttttcacccagctgagtcgccttcgtatcacgcctctccactcagagaggaagaaaggaccgtgtgagagaagaagggaacagcctttcatccataggagaagttcgtctatgacaaagccactagctccatgtggccgctgagcactcaaaatgtggccagtctgaattgagatatgttgttagtataaagtccacatcggctttttgagcactttgtatgagaaaaaagaataccaaatatctccttaataattgttacattgattatatgttgaactgataacattatggatatattggattaaataaaatatattattaaaatcaaataaaaaataaaatc

SEQ ID NO: 39356 - DNA, 451 bp, Homo sapiens
tgtcacaccctgcaggttttgatagactagaaaaatgacaagactccaagtccttgaagaggaggaaaagtgtgaagaaaacaaaaaagggagatttatgtctgcttcaccattttgcccaagacttgacctgtcatacactgaagctcagagaggaagaaaggaccgtgtgagagaagaagggaacagcctttcatccataggagaagttcgtctatgacaaagccactagctccatgtggccgctgagcactcaaaatgtggccagtctgaattgagatatgttgttagtataaagtccacatcggctttttgagcactttgtatgagaaaaaagaataccaaatatctccttaataattgttacattgattatatgttgaactgataacattatggatatattggattaaataaaatatattattaaaatcaaataaaaaataaaatc

SEQ ID NO: 39357 - DNA, 416 bp, Homo sapiens
aagaaactcagacagaaaaatcctataatcatctcaaaagatcctgacatttctttttgataatttaatgcccctttctgatttttgtcaaatactaggaagctaataggtaaggaaaagtccctaacttgataaaaatacctaccagatgcccaaatcaaaaatcatatgaattaggaagttctggagtgcttctcattaaactcaggaacgtgtaatatcgttattaatgtattgttccaccctgttttggagggcctggccaatttaacaagttaggtgatttgataagttagtttaatacgcataacagcatggctgtcccgaggcatacaggaggcgatgggctgagtcctgactgcagctcccccaaggacctgccacgcatggattatacacaaagtctgttcaagtct

SEQ ID NO: 39358 - DNA, 613 bp, Homo sapiens
actaaaactaagacattggttggaactatatccattccagggtctatagattcacaagagcaacaagcccagaattcccttccttggctgtcctaggatagctgcgtatcaggcccacaaaagggtcgtaatgcagaaaatggggctgctcagtgccccaacagtctctggagccacagccagtatgccatccttgtttgacacatagtgcttctgttattttcatttaactgaaagcaacaaatctccttttttccctctaaaaataagagtttatgagggtttatatgatttcttttctagcctgcatttcatgtgcatagatcaaagttacttgtttgataagaagtgcttaacataggaaactattttggtatataggtctttagggaattttgactttgggcaagaaagaacacttggagtcgaaatgagaggacctggattctagttttttgtatcaagctggaaaggcacctaacctctcaagacatatttttctgaagtaaacttattggaataagtgatctgaagataactctcatctgcctcctttcaatgaataactttgctcccaaatctaatgagcttgaagctttgaaagaaactcctt

SEQ ID NO: 39359 - DNA, 1296 bp, Homo sapiens
atgtaaatgctatgtaaatagttgttatgctgtattgtctagggaattatgacaagaaaaaacatctgtatatgtttgtacagacagttttttccccaactttttttttttttttttgatttaaggttaattgaatccatggaggcagaacccatggatacagagggccgactgtactgtcaaatatttttagcacctccttcactaagatagagcttaaaatgagcaataaacacaacggtgaatattagaatactatatagagcatttatagaactaaaatgtttcaaccttcaattgaacaactattttcttgttattttggattttagtatttcagagtttaatttatgtaatgtctcctatgacttctttaggctatccttgccgtaagctctatctttggcttacatatttttaacatccaaccttattagagctggcttaagcaaatatattttcatgtatattatttaatagtgttctttgaaaactgggttaatatttgctttaaaacctacagattaagacaagtggaaagatatccataccaacttgatacaaaattttggaagaaaataggtttctacaacactaaagtgatgtcctaactaattactaatttggaactcttggggctgtttgaaaaaaaactatgaggagaatatttcaactttatatgtgaggcagtttatgagttctcacagtttcggtgtaatttacttaatagcttgctttcttccagccatccttccttgctttctttttaaacaacttcttttttctacttcaaaaaaggtacataagctttatagaaaacttagaaaatacaggtaagcaaaaataagaaaattaaaactacctataaatccaacatgcagagataaccactgttattaatctgttaatgactatatttttctaatatttttaagatttttatttctttttaaaagtaggatcatagtaaacatactgttttattagcctgctgtttttcactttacattatatcttggaaatacctccttgccatcagttactttcacgtaaccttttgatggttctcaccattgattgtaaatatttctttttatgtgtgagacttttgtggctttctcattttcgctgggggaatgtaacaagaagctcagttttcttttcaaaaataaaaatggcactgagtgcggtggctaatgcctgtaatcccagcactttgggaagccaaagtgggaggatcgcttgagcccaggagtttgagaccagcctgggcaacatagtgagacccgtctctgc

SEQ ID NO: 39360 - DNA, 363 bp, Homo sapiens
ctcatttgagcccaataatccatcaaaaataaaactgttgttatttcattttttagatgaggaaattgaagtccagagaataaaaatagtcaacttccagactaaattccaaattcagtgttgatcctttcacagcgagggaaaatgggtctgtttctctccctgtctctatataaccacaaatccctccctaggtgatcctccctggggatggagtcctagaaagccaaagacagtcttctaaagagccaacagcctaaattggcatttaatccagtcaacatctagtacttttagatctagtttctcctttgcaaggaatacaggcgatagaggaaggttagaggacactagcagtcacat

SEQ ID NO: 39361 - DNA, 451 bp, Homo sapiens
tcagaattatcaaattagaccgtgagaaggctccatatggaatcctgttaatatagtccctcactgaatcaccttaacaaaatttcatctgaatatttccctcatagctttaatcaaagttactttagtaaatatccatatggaacttacttctacatttttgcacaaatattaaaaacattgtccttcccgtcaacatatcactcatagttccccatattattaaaaaaactttattatgaaaatttagctacaatttatttcgggaaaagcgattctccttaggaattatcttttctgataatcaaaactacaatcgattatgatttctttttagcctgggcgacagagtgacagaccctgtctcaaaaaaacaaacaaaaacaaacaaacaaaaagatttgccaagaactacagaactctcgagagaaatggagagcttaaaaaaaaa

SEQ ID NO: 39362 - DNA, 363 bp, Homo sapiens
ctcatttgagcccaataatccatcaaaaataaaactgttgttatttcattttttagatgaggaaattgaagtccagagaataaaaatagtcaacttccagactaaattccaaattcagtgttgatcctttcacagcgagggtgatcctccctggggatggagtcctagaaagccaaagacagtcttctaaagagccaacagcctaaattggcatttaatccagtcaacatctagaaaatggattactacttcccagattatgttgtactttaattaaagctcgcaaattacttttagatctagtttctcctttgcaaggaatacaggcgatagaggaaggttagaggacactagcagtcacat

SEQ ID NO: 39363 - DNA, 417 bp, Homo sapiens
ctcatttgagcccaataatccatcaaaaataaaactgttgttatttcattttttagatgaggaaattgaagtccagagaataaaaatagtcaacttccagactaaattccaaattcagtgttgatcctttcacagcgagggaaaatgggtctgtttctctccctgtctctatataaccacaaatccctccctaggtgatcctccctggggatggagtcctagaaagccaaagacagtcttctaaagagccaacagcctaaattggcatttaatccagtcaacatctagaaaatggattactacttcccagattatgttgtactttaattaaagctcgcaaattacttttagatctagtttctcctttgcaaggaatacaggcgatagaggaaggttagaggacactagcagtcacat

SEQ ID NO: 39364 - DNA, 802 bp, Homo sapiens
gtttacatagaaagaattttctagggctgggcctggtggctcatgcgtgtaatcccagcacgttgatgaagctgaggcaggcagattgcttgagcccaggagttcaagagctgcatgtgtaacatggcaaacccttgtctctacaaaaaaacacaaaaattagccaggcatggtggcgcacacctgtagtcccagctactcggggggctggggcaggaggatcacctgagcccaggaggttgaagctgcagtgagatgtgactgtgacgctgcactccagcctgggcgacagagtgacagaccctgtctcaaaaaaacaaacaaaaacaaacaaacaaaaagatttgccaagaactacagaactctcgagagaaatggagagcttaaaaaaaaaattctaatctgttatctcatttgagcccaataatccatcaaaaataaaactgttgttatttcattttttagatgaggaaattgaagtccagagaataaaaatagtcaacttccagactaaattccaaattcagtgttgatcctttcacagcgagggaaaatgggtctgtttctctccctgtctctatataaccacaaatccctccctaggtgatcctccctggggatggagtcctagaaagccaaagacagtcttctaaagagccaacagcctaaattggcatttaatccagtcaacatctagaaaatggattactacttcccagattatgttgtactttaattaaagctcgcaaattacttttagatctagtttctcctttgcaaggaatacaggcgatagaggaag

SEQ ID NO: 39365 - DNA, 827 bp, Homo sapiens
atctctttccttgctgaactttccggtcattctcagctccaccctctaactgcagtatcaactgaatctcatgaaatgttttggcgaagcacttctttccaaggatgtcaaaaatcttctgagttaccaggaggaagtggttgcctgtcagggcagagtcttactcttgcatatattttagtgatatatactatatataaactcttggattacaatatggatgagttctacttttattctagtttgttcttcaggctacttattctgcttaatttcggtttggaattaaatatctcagtctgtgcaacctgttttttagtttcttgatttagaagaattattaatcccataagcaactgtcaatagaatgtatctaattcctgtgaatcttagtttcttcatgtctaaaatgggggatttttggcatagattcactatgacttcatgaaatttagctcagagtttgtatctgatatattcactattgaatccttggaatctgtctatatggtgcttggaacaaagtgggctgttaataaattattaaataaatgcaagaatttacttgaaattgttactttaacaatattagtaacattataagggagtggtatttgttttgataaagtttttttttgtagtagaagattttaaactttgtgttcaggcatattcttatttgaaatataaaattaaaatttgtgtgctgggcgtggtggctgatgcctgtaaacccagcactttgggaggctgaggcaagaggatcgcttgagctcaggagtttgagaccagcctgggcaaaatagcaagacccagtctcattaaat

SEQ ID NO: 39366 - DNA, 753 bp, Homo sapiens
tatcacagagcagctggacatgggggagcttgcagcgtcagcaaatcatggacactcaccctgctacccagagagaaaagggacccctggagacttgagcaaaagaaaaatgctggtacatttttaccccaggaggcacagccaccccagagccacacagcaatggatacttaagaataagactctctgcaggaggatcaaggagtaataaaaagagcagaatatctgcagctgccaagacctcggctctaattctagatttgcagcccatggctgcacaataggcacaagaatgaaccaacgtcaccaccaaggaaagtggcacagctgagctgcacccacgtctgactccaagggaccagctattgacagctattcaccatttggtttctgtgtgtcccagtcctcacgtggaaaatgggcaaatattatctgcttcatcggtattcctgggaacctagaggaagcactagccaatatcattcacttagcataccggagttatctttccattttcttaattcaagaaccttgctctttttgccaattatcttagtagtttttcagtgacctctcagtaaaagcaatgtattttgtagccttgtctttcacagaaatcgccttataaattgtttgatatacaattaaacaaaaactttatttctgcaaaaaaaaaaagcaaacgaatacattataacaaagatatctgaaaacagcgagcgaattaccgaaaattggccttctttggcctca

SEQ ID NO: 39367 - DNA, 653 bp, Homo sapiens
agtgaattgattgaagttgggataatggaattcattcttcccttttcagctgtttctcaaacatctctctggctgtgaacttttttcagagcttgaggttaatgcccaaaccctgtcttgctgtcacctcaaactcagtatatataaaattacattattttccttcctccagtctttcacttttgttaatgctgccatcactgacagtcctcaggcacaaaaccttggtgttatcttgcagtgttcactccccccgatccctagggtgctgtatattcccatttatgtgtttgaggaagttttctggttactgtttcacctctgctttttgcctattgacattttagccagccctcagggccctgcctcagtctttctcttctgagcacgaagctgaatttccatccaagcaccccttttgtacttatgtttatagtttgttttgttttgtttttgagacaagcctggggaacatggtgagacactgtctctacagaaaataagaaaaaaattagctgggtgtggtggcacgcaagcgtgactccagctacttaggaggctgaggtgtgggaggaccgcttgagcccaggaggtcatcgctgcagtgagctgagattgtgcccactgcactccagcctgggcgactgcgcaag

SEQ ID NO: 39368 - DNA, 399 bp, Homo sapiens
gatacaattttgaagaatttcaaagtaatcctggaaacttctaaatatgattgtaggagactctgcttgaatagaggtgatgactattaaataggcatatcaaatgatttgccttgagacaggaaccaaagtatagtgacaggattgattagatggcgaaacaataaaagcaccaggagctaagctacattgatggggtatgtcctgtttgataacagggttttgttcctaactagcattctggttcaaaatccataaggtttagctattttcctatctctttcactccatccccatccactcactgatttcttttgtttctatggacgttattatgtgacccagtttattacatttgactgatatggttttgaataaatgtataaatatacacagaca

SEQ ID NO: 39369 - DNA, 254 bp, Homo sapiens
agttgtaggatattataagattgcatatcagcatagggaatttaatttgtgacaatttagctttatcacccatttaattggttgctttattatttgtaagctatgttaaaagtttttttactgtttcttaggctcagctaagtaaaagaaacataagtgatatttatctatacacctataattatagattagttatgttgaatttatgggccaaaatgtgatctccctcatttccaagctacaagcaccaaatt

SEQ ID NO: 39370 - DNA, 2010 bp, Homo sapiens
  misc_feature (747)..(747): n is a, c, g, or t
ggtctaagtttcctgcatcagcaacagaatctagtaattgttacaaaactcttgaatagctgggagagatgcaaactctaagctgcctgccctcttaaaacttggtcttttgtattttaaacagttgagttttatgtcatttgtctcaaaattagtcttgggtcattatatatttctatctactgatttatacattcaggatcaggtcttgacatttagtacatttaagatggttatcaggttgtagtcatcaagcacctatttctggctgtggccacccagccagacccatagagggtagaaaatttgtagatgactgtcatggccttactgacctctgaacccctatgtaatacttgagtgaaaaggacttggaggcttaaccagatgactagctgacatacctctggaagaaggcaggcatcggagccctcttccagagcatcagagaagatcaaagagctcagatctcccctccagaaagtttcattcaaacactcatgaccatatcaacacttatatgtcaataatatctctttaagaaaatgcgaatgtcattgctgtactcctctgtgttgcctatggtggttcaattgtgtgagtcaaaactccaagcctttgggtcacttgttcactcatgcctctatcaataaaccctgagcacctgggaggcagcctgacagagggaagaacaaggactttggcatcaacgcctcctaggtccaaatcccagacaggcaatttgcnaactacagcttggccaagtaatttaacctctctgatcaaggtgcccacttgtaaaactggaacattcacagtatctacctttgagggctgtagtgaaggtaaataagattatgtaaatgcccagcctggttgcagcagcaacagtaagcactccaggggtacctgttagatgaataaatgaaagaaactgggaaagacggtgaggagctaagtgttaacactgatatgcagagtctttgccctcattttcagttctgatgggcgcctgacataagcaccttaccctgagcccagagccatgcgcagtattctaaggggccttgaatatgctgtgatttttggccattccactgcaatagaaattgggttggacttaaggcttcttctactgcactgaagagctacacttcttacctctttcaaagtggaaaaacaatctgcgtaagacaatatgatgttaaaaacaaatcaattagtactacacattttcaaattatcagccacgttaatgatgttgaataaaaggtaaccagaaggccagccacctccttagtttttgtttttgtttttgtttttgtttttaaccttggtttattccactgctattttattcctcagtcattgtgccttcaacagaatgccttagcattcgtggcttcctccctgtatggattcccaatcattcaactaccccgcaaatgcttcctgtccatcttctgtgtgcctagcactgcgtgtaagtccatgggaaataccaggaagctgaagaccctgttaacacttccagggagcctgtaattggagagatatgatatatgaatcagtatcacaattaaaaattaaatattcctttttgctggacttatcatccatagaaatttcatataacaattcatgagttatataaaagtgcagtaaaataatactctaagagctgccacaaggcatataggatgaagtgccagttgaatgtaggcctatcctgtaagtgctgtgaatgtacagaatggagagatccttgtgaactggagggtcaagaaagcctttgggccaggtacagtggctcatgcctgtaatcccaacactttgggaggccaacgtgggaggattgcttgaggccagaaattcaagaacagtctgaacaacatagctagaccccatctcttcaaaaaaagaaaaaaaattagtctgatgaggtggctgaagtgagctgtgatcgtgtcactgcactccagcctgggtgacagagcaagacttagtctc

SEQ ID NO: 39371 - DNA, 383 bp, Homo sapiens
gggaggcctggcaaccacagtgttctttctcctgtttatttgttcttggatcttcctgaagccatttcaccaccagccttcatcttctctgccagccccatggagactcaagctttttccagcctatgtcagggaaggagaaccagagacagcaacctcgggtgtgaagggagtcagctctgaacccaggactatggccttctgccactgcctgctttcctcttgctgctggggcctaggtcttcttgctgctgcttccttttccgctaatcaagagtccagggaggtgggaacagcctcaacaaagactttgaagatgagcggggaggatcgcttgagcccaggagcccagcctgggcaacaggggaagacttcgtctctac

SEQ ID NO: 39372 - DNA, 660 bp, Homo sapiens
acagcagtactgagcatgctgggagcttgggacttggagatgaatgagccaccgttgctgctccaagtaggactacttggagtgtagctgaggccttggacgcagtatgaccaggggcagctctgccagggctgttggccaatcagtcattttcatttcttgttggaggccaggtcctctgctgaactcatttcctagctagtgttaccctaattctgatgaagatcaatggggctataattcttgtttttgttcctctttgcagcattaacagcagcaaagttgtaccccggtttgaaaggtttggcttgggcgtcctggagtccagtaatccaaagatgtagccagccatatggtttttcgctgctgatctctttctttttaaaatgtgtttctgaaacatcccaacaaccaccacgacaaaaaaacactgcctgcccagcgctgcaaaccaggagcacacgtcctagattcagactgttggccataaaccccactcgggagatggagctgcacctgctatttcttaaaatgacaccaccaacaaccaaacctgtcatgacagacagcaaatgtttacacgtatatttctcctgagtgaacctgatgttttacaataggtaataataaaaacagtctgtgcagatgcactaaaaaaga

SEQ ID NO: 39373 - DNA, 659 bp, Homo sapiens
tttcccaagtgcagggtcagtgttctgggtctgggtgtgttttctaagctgtgtgtgggtgttctgccggccctggggcagacctgtgccaggcaggcctctttgctgcctgctgaaaggcctgtgtccttgtcccggcttcctggtctccaggcgtgagaaccagctaaagctgtcccacgactggctgtgctatctggcccctgagattgtacgcgagatgacccccgggaaggacgaggatcagctgccattctccaaagctgctgatgtctatgcatttgggactgtttggtatgagctgcaagcaagagactggcccttgaagaaccaggctgcagaggcatccatctggcagattggaagcggggaaggaatgaagcgtgtcctgacttctgtcagcttggggaaggaagtcagtgagatcctgtcggcctgctgggctttcgacctgcaggagagacccagcttcagcctgctgatggacatgctggagaaacttcccaagctgaaccggcggctctcccaccctggacacttctggaagtcagctgagttgtaggcctggctgccttgcatgcaccaggggctttcttcctcctaatcaacaactcagcaccgtgacttctgctaaaatgcaaaatgagatgcgggcacta

SEQ ID NO: 39374 - DNA, 574 bp, Homo sapiens
gcctggcagtcccggcctgcttgggggcacctggacccctgccagggaaggggtcctcagacttgaggttgccagctcagatgtggggctgctgatactaggcgaagctggtccgttacatttgtaagcagaggcagtgcaagctgagcgtggctcccggtgagaggaccccagagctcaacagctacccccgcttcagcgactggctgtacactttcaacgtgaggccggaggtggtgcaggagatcccccgagacctcacgctggatgccctgctggagatgaatgaggccaaggtgaaggagacgctgcggcgctgtggggccagcggggatgagtgtggccgtctgcagtatgccctcacctgcctgcggaaggtgacaggcctggcttcatcaccttggggggcataggccgcagaggacgacgcgatggcaacgaggggcacgtcacctctgcgtacgaaggtatgcaacgtcgggcagcgaaggtcgcacagcgttgcaggccagatgggcgagcgacgggaaaaacacccaggacagcgaaccatcgactgaggaacacacaagag

SEQ ID NO: 39375 - DNA, 3235 bp, Homo sapiens
gcggccgcggagggaggcgcaggggccgcggccagccgggcgctgcagcagtgcgggcagctccagaagctcatcgacatctccatcggcagcctgcgcgggctgcgcaccaagtgcgctgtgtccaacgacctcacccagcaggagatacggaccctggaggcgaagctggtccgttacatttgtaagcagaggcagtgcaagctgagcgtggctcccggtgagaggaccccagagctcaacagctacccccgcttcagcgactggctgtacactttcaacgtgaggccggaggtggtgcaggagatcccccgagacctcacgctggatgccctgctggagatgaatgaggccaaggtgaaggagacgctgcggcgctgtggggccagcggggatgagtgtggccgtctgcagtatgccctcacctgcctgcggaaggtgacaggcctgggaggggagcacaaggaggactccagttggagttcattggatgcgcggcgggaaagtggctcagggccttccacggacaccctctcagcagccagcctgccctggcccccagggagctcccagctgggcagagcaggcaacagcgcccagggcccacgctccatctccgtgtcagctctgcccgcctcagactcccccacccccagcttcagtgagggcctctcagacacctgtattcccctgcacgccagcggccggctgaccccccgtgccctgcacagcttcatcaccccgcccaccacaccccagctgcgacggcacaccaagctgaagccaccacggacgccccccccacccagccgcaaggtcttccagctgctgcccagcttccccacactcacccggagcaagtcccatgagtctcagctggggaaccgcattgatgacgtctcctcgatgaggtgagtcctgccttcttcctcatctggaaacatcacaggggcagctgactgagccatcctcagaggccaggagcaagctagaggaccaagcgaggcgaggggaaccacaccatgccactgggctagcctggcctgctcctgtgttgatggacatagatcagggagatgcttatataataaaccattgcgcccccctctagcctgtggtctctgaattaggaagtcatgggcacgagctgtcgcctgcggagttcctcagcctgcccatccggcctctttccctgcagatctctcgcatggatccccacagatggtacggagggatatcgggctgtcggtgacgcacaggttctccaccaagtcctggctgtcgcaggtctgccacgtgtgccagaagagcatgatatttggagtgaagtgcaagcattgcaggttgaagtgtcacaacaaatgtaccaaagaagcccctgcctgtagaatatccttcctgccactaactcggcttcggaggacagaatctgtcccctcggacatcaacaacccggtggacagagcagccgaaccccattttggaaccctccccaaagcactgacaaagaaggagcaccctccggccatgaatcacctggactccagcagcaacccttcctccaccacctcctccacaccctcctcaccggcgcccttcccgacatcatccaacccatccagcgccaccacgccccccaacccctcacctggccagcgggacagcaggttcaacttcccagctgcctacttcattcatcatagacagcagtttatctttccagacatttcagcctttgcacacgcagccccgctccctgaagctgccgacggtacccggctcgatgaccagccgaaagcagatgtgttggaagctcacgaagcggaggctgaggagccagaggctggcaagtcagaggcagaagacgatgaggacgaggtggacgacttgccgagctctcgccggccctggcggggccccatctctcgcaaggccagccagaccagcgtgtacctgcaggagtgggacatccccttcgagcaggtagagctgggcgagcccatcgggcagggccgctggggccgggtgcaccgcggccgctggcatggcgaggtggccattcgcctgctggagatggacggccacaaccaggaccacctgaagctcttcaagaaagaggtgatgaactaccggcagacgcggcatgagaacgtggtgctcttcatgggggcctgcatgaacccgccccacctggccattatcaccagcttctgcaaggggcggacgttgcactcgtttgtgagggaccccaagacgtctctggacatcaacaagacgaggcaaatcgctcaggagatcatcaagggcatgggatatcttcatgccaagggcatcgtacacaaagatctcaaatctaagaacgtcttctatgacaacggcaaggtggtcatcacagacttcgggctgtttgggatctcaggcgtggtccgagagggacggcgtgagaaccagctaaagctgtcccacgactggctgtgctatctggcccctgagattgtacgcgagatgacccccgggaaggacgaggatcagctgccattctccaaagctgctgatgtctatgcatttgggactgtttggtatgagctgcaagcaagagactggcccttgaagaaccaggctgcagaggcatccatctggcagattggaagcggggaaggaatgaagcgtgtcctgacttctgtcagcttggggaaggaagtcagtgagatcctgtcggcctgctgggctttcgacctgcaggagagacccagcttcagcctgctgatggacatgctggagaaacttcccaagctgaaccggcggctctcccaccctggacacttctggaagtcagctgacattaacagcagcaaagttgtaccccggtttgaaaggtttggcttgggcgtcctggagtccagtaatccaaagatgtagccagccatatggtttttcgctgctgatctctttctttttaaaatgtgtttctgaaacatcccaacaaccaccacgacaaaaaaacactgcctgcccagcgctgcaaaccaggagcacacgtcctagattcagactgttggccataaaccccactcgggagatggagctgcacctgctatttcttaaaatgacaccaccaacaaccaaacctgtcatgacagacagcaaatgtttacacgtatatttctcctgagtgaacctgatgttttacaataggtaataataaaaacagtctgtgcagatgcactaaaaaaga

SEQ ID NO: 39376 - DNA, 3326 bp, Homo sapiens
gcctggcagtcccggcctgcttgggggcacctggacccctgccagggaaggggtcctcagacttgaggttgccagctcagatgtggggctgctgatactaggtgactggactgatgttctgttctagatgaaactccttgaggggaccatttgaaaaggcttgatgtgctgcccaaagcccccttcagagctgacttctccacccccagctgccgtgagccttggctgctgacagctcatagctgagtccctcccgtgaagtcaccttctgctgaagggtacatcctctcccaaggcgaagctggtccgttacatttgtaagcagaggcagtgcaagctgagcgtggctcccggtgagaggaccccagagctcaacagctacccccgcttcagcgactggctgtacactttcaacgtgaggccggaggtggtgcaggagatcccccgagacctcacgctggatgccctgctggagatgaatgaggccaaggtgaaggagacgctgcggcgctgtggggccagcggggatgagtgtggccgtctgcagtatgccctcacctgcctgcggaaggtgacaggcctgggaggggagcacaaggaggactccagttggagttcattggatgcgcggcgggaaagtggctcagggccttccacggacaccctctcagcagccagcctgccctggcccccagggagctcccagctgggcagagcaggcaacagcgcccagggcccacgctccatctccgtgtcagctctgcccgcctcagactcccccacccccagcttcagtgagggcctctcagacacctgtattcccctgcacgccagcggccggctgaccccccgtgccctgcacagcttcatcaccccgcccaccacaccccagctgcgacggcacaccaagctgaagccaccacggacgccccccccacccagccgcaaggtcttccagctgctgcccagcttccccacactcacccggagcaagtcccatgagtctcagctggggaaccgcattgatgacgtctcctcgatgaggtgagtcctgccttcttcctcatctggaaacatcacaggggcagctgactgagccatcctcagaggccaggagcaagctagaggaccaagcgaggcgaggggaaccacaccatgccactgggctagcctggcctgctcctgtgttgatggacatagatcagggagatgcttatataataaaccattgcgcccccctctagcctgtggtctctgaattaggaagtcatgggcacgagctgtcgcctgcggagttcctcagcctgcccatccggcctctttccctgcagatctctcgcatggatccccacagatggtacggagggatatcgggctgtcggtgacgcacaggttctccaccaagtcctggctgtcgcaggtctgccacgtgtgccagaagagcatgatatttggagtgaagtgcaagcattgcaggttgaagtgtcacaacaaatgtaccaaagaagcccctgcctgtagaatatccttcctgccactaactcggcttcggaggacagaatctgtcccctcggacatcaacaacccggtggacagagcagccgaaccccattttggaaccctccccaaagcactgacaaagaaggagcaccctccggccatgaatcacctggactccagcagcaacccttcctccaccacctcctccacaccctcctcaccggcgcccttcccgacatcatccaacccatccagcgccaccacgccccccaacccctcacctggccagcgggacagcaggttcaacttcccagacatttcagcctttgcacacgcagccccgctccctgaagctgccgacggtacccggctcgatgaccagccgaaagcagatgtgttggaagctcacgaagcggaggctgaggagccagaggctggcaagtcagaggcagaagacgatgaggacgaggtggacgacttgccgagctctcgccggccctggcggggccccatctctcgcaaggccagccagaccagcgtgtacctgcaggagtgggacatccccttcgagcaggtagagctgggcgagcccatcgggcagggccgctggggccgggtgcaccgcggccgctggcatggcgaggtggccattcgcctgctggagatggacggccacaaccaggaccacctgaagctcttcaagaaagaggtgatgaactaccggcagacgcggcatgagaacgtggtgctcttcatgggggcctgcatgaacccgccccacctggccattatcaccagcttctgcaaggggcggacgttgcactcgtttgtgagggaccccaagacgtctctggacatcaacaagacgaggcaaatcgctcaggagatcatcaagggcatgggatatcttcatgccaagggcatcgtacacaaagatctcaaatctaagaacgtcttctatgacaacggcaaggtggtcatcacagacttcgggctgtttgggatctcaggcgtggtccgagagggacggcgtgagaaccagctaaagctgtcccacgactggctgtgctatctggcccctgagattgtacgcgagatgacccccgggaaggacgaggatcagctgccattctccaaagctgctgatgtctatgcatttgggactgtttggtatgagctgcaagcaagagactggcccttgaagaaccaggctgcagaggcatccatctggcagattggaagcggggaaggaatgaagcgtgtcctgacttctgtcagcttggggaaggaagtcagtgagatcctgtcggcctgctgggctttcgacctgcaggagagacccagcttcagcctgctgatggacatgctggagaaacttcccaagctgaaccggcggctctcccaccctggacacttctggaagtcagctgacattaacagcagcaaagttgtaccccggtttgaaaggtttggcttgggcgtcctggagtccagtaatccaaagatgtagccagccatatggtttttcgctgctgatctctttctttttaaaatgtgtttctgaaacatcccaacaaccaccacgacaaaaaaacactgcctgcccagcgctgcaaaccaggagcacacgtcctagattcagactgttggccataaaccccactcgggagatggagctgcacctgctatttcttaaaatgacaccaccaacaaccaaacctgtcatgacagacagcaaatgtttacacgtatatttctcctgagtgaacctgatgttttacaataggtaataataaaaacagtctgtgcagatgcactaaaaaaga

SEQ ID NO: 39377 - DNA, 1624 bp, Homo sapiens
ctgcaattccgctcctccctcctgcgttggccgttctgtgtgtgtgactcacctcctcttctgtttaaagctgcctacttcattcatcatagacagcagtttatctttccagacatttcagcctttgcacacgcagccccgctccctgaagctgccgacggtacccggctcgatgaccagccgaaagcagatgtgttggaagctcacgaagcggaggctgaggagccagaggctggcaagtcagaggcagaagacgatgaggacgaggtggacgacttgccgagctctcgccggccctggcggggccccatctctcgcaaggccagccagaccagcgtgtacctgcaggagtgggacatccccttcgagcaggtagagctgggcgagcccatcgggcagggccgctggggccgggtgcaccgcggccgctggcatggcgaggtggccattcgcctgctggagatggacggccacaaccaggaccacctgaagctcttcaagaaagaggtgatgaactaccggcagacgcggcatgagaacgtggtgctcttcatgggggcctgcatgaacccgccccacctggccattatcaccagcttctgcaaggggcggacgttgcactcgtttgtgagggaccccaagacgtctctggacatcaacaagacgaggcaaatcgctcaggagatcatcaagggcatgggatatcttcatgccaagggcatcgtacacaaagatctcaaatctaagaacgtcttctatgacaacggcaaggtggtcatcacagacttcgggctgtttgggatctcaggcgtggtccgagagggacggcgtgagaaccagctaaagctgtcccacgactggctgtgctatctggcccctgagattgtacgcgagatgacccccgggaaggacgaggatcagctgccattctccaaagctgctgatgtctatgcatttgggactgtttggtatgagctgcaagcaagagactggcccttgaagaaccaggctgcagaggcatccatctggcagattggaagcggggaaggaatgaagcgtgtcctgacttctgtcagcttggggaaggaagtcagtgagatcctgtcggcctgctgggctttcgacctgcaggagagacccagcttcagcctgctgatggacatgctggagaaacttcccaagctgaaccggcggctctcccaccctggacacttctggaagtcagctgacattaacagcagcaaagttgtaccccggtttgaaaggtttggcttgggcgtcctggagtccagtaatccaaagatgtagccagccatatggtttttcgctgctgatctctttctttttaaaatgtgtttctgaaacatcccaacaaccaccacgacaaaaaaacactgcctgcccagcgctgcaaaccaggagcacacgtcctagattcagactgttggccataaaccccactcgggagatggagctgcacctgctatttcttaaaatgacaccaccaacaaccaaacctgtcatgacagacagcaaatgtttacacgtatatttctcctgagtgaacctgatgttttacaataggtaataataaaaacagtctgtgcagatgcactaaaaaaga

SEQ ID NO: 39378 - DNA, 390 bp, Homo sapiens
taatctcatgcattccatgttgaaccagaagcatgagtggttctctgaaacccagttacttctcaccccttcatgtcggcagggtgttcagggggccgccagttagagggcacttgagaacatcaaagggaccctttgtggagcacccctactgtgtgccccctccctcccagccagctcacacaccactaatggcagctccatttgcaggagatcctgtcggcctgctgggctttcgacctgcaggagagacccagcttcagcctgctgatggacatgctggagaaacttcccaagctgaaccggcggctctcccaccctggacacttctggaagtcagctgagtaagtgcctcttccatgagccagactgccagccaggccctcgcag

SEQ ID NO: 39379 - DNA, 1197 bp, Homo sapiens
gcctggcagtcccggcctgcttgggggcacctggacccctgccagggaaggggtcctcagacttgaggttgccagctcagatgtggggctgctgatactagcggctgaagttctggtccgttcacatttgtaatgccatggaggccagtgcaagctgcatggggtggctcccggatgagaggacccctaggagctcaacaagacatacctcctcgcattcatggctgagctggcatgatactagctttctaatctgtgagggtccggagtgtgagtgcacgcgagatcccgacggaggacccgtcacgctcggaatgcccgtgccttgtgccgtagtgaattggatggccgagagagtgcagacgtggagtactgctgccggctgctggtgcggggcctaggcggcggtatgcacgtggtggccgttcgtgtcgagatgattgcccgtctaccctggccgtgccggacaggtgtgtagcaggcgctgggcagggcggcatgcgacataacaggcagtgcactccgagcttcggaagttccatttggaattgcgctggccgcgtggaaagtcgcgcgtcaaagcggcgcttcctacgggtacgaccgcgtcgtacagcaaggcgcccagccattgccctttggcccctcgaggggagctcctcgaggcatgtgcggcaggcagtcgaggcaactagcgtcccgagtggcccatcggcgtaccaatccttccggtcggtcaggtctcgttcacctggcgcgtacaacgaagcttcccctgcaagccctgaggttatcccgctgagggggtcctcttacaggattagactggtcattcgcccctttgcggacagccctatgtgtggcgcagggcctttggaggcggttcccggctttccggatgagcctcagggggtgaccctctccaagccgccggtattcacgtggttgcccccgaaaccggggaccccgttgggcgcgtccgggggtcaggcccttccctttgaaggtcttacccggtggggcgcgaatgccggccgctttggcgcaaggtgtggctcgcctggtggtcatcctgggtgtgccggggacacccttcggccgacccgcgggggccccctttcctcgttggtggcctattcggggcgtcgttcgcagcaatcctcggtagccgtagcggagagtaagacccttcctctg

SEQ ID NO: 39380 - DNA, 465 bp, Homo sapiens
gcggccgcggagggaggcgcaggggccgcggccagccgggcgctgcagcagtgcgggcagctccagaagctcatcgacatctccatcggcagcctgcgcgggctgcgcaccaagtgcgctgtgtccaacgacctcacccagcaggagatacggaccctggaggtaagtgggtcggggaccaggctgggctcgaggagcgggcccggacacctccctccgggccccagtactcctggccgagttgcatccttgagcccgcgtcgccccccttggaggcttcccctccctcctgcactcgctgatgcggcagccggaggacccgggaccagccctcatcttgggcaggatttgtggggcgggtgcgtcgtgggaactgggatggaggctcgaggggcccgtgcggggtgggctgcgcgcggacatcccctttccccccttctccgcccccaccccatttccagtttg

SEQ ID NO: 39381 - DNA, 3368 bp, Homo sapiens
gcctggcagtcccggcctgcttgggggcacctggacccctgccagggaaggggtcctcagacttgaggttgccagctcagatgtggggctgctgatactaggtgactggactgatgttctgttctagatgaaactccttgaggggaccatttgaaaaggcttgatgtgctgcccaaagcccccttcagagctgacttctccacccccagctgccgtgagccttggctgctgacagctcatagctgagtccctcccgtgaagtcaccttctgctgaagggtacatcctctcccaaggcgaagctggtccgttacatttgtaagcagaggcagtgcaagctgagcgtggctcccggtgagaggaccccagagctcaacagctacccccgcttcagcgactggctgtacactttcaacgtgaggccggaggtggtgcaggagatcccccgagacctcacgctggatgccctgctggagatgaatgaggccaaggtgaaggagacgctgcggcgctgtggggccagcggggatgagtgtggccgtctgcagtatgccctcacctgcctgcggaaggtgacaggcctgggaggggagcacaaggaggactccagttggagttcattggatgcgcggcgggaaagtggctcagggccttccacggacaccctctcagcagccagcctgccctggcccccagggagctcccagctgggcagagcaggcaacagcgcccagggcccacgctccatctccgtgtcagctctgcccgcctcagactcccccacccccagcttcagtgagggcctctcagacacctgtattcccctgcacgccagcggccggctgaccccccgtgccctgcacagcttcatcaccccgcccaccacaccccagctgcgacggcacaccaagctgaagccaccacggacgccccccccacccagccgcaaggtcttccagctgctgcccagcttccccacactcacccggagcaagtcccatgagtctcagctggggaaccgcattgatgacgtctcctcgatgaggtgagtcctgccttcttcctcatctggaaacatcacaggggcagctgactgagccatcctcagaggccaggagcaagctagaggaccaagcgaggcgaggggaaccacaccatgccactgggctagcctggcctgctcctgtgttgatggacatagatcagggagatgcttatataataaaccattgcgcccccctctagcctgtggtctctgaattaggaagtcatgggcacgagctgtcgcctgcggagttcctcagcctgcccatccggcctctttccctgcagatctctcgcatggatccccacagatggtacggagggatatcgggctgtcggtgacgcacaggttctccaccaagtcctggctgtcgcaggtctgccacgtgtgccagaagagcatgatatttggagtgaagtgcaagcattgcaggttgaagtgtcacaacaaatgtaccaaagaagcccctgcctgtagaatatccttcctgccactaactcggcttcggaggacagaatctgtcccctcggacatcaacaacccggtggacagagcagccgaaccccattttggaaccctccccaaagcactgacaaagaaggagcaccctccggccatgaatcacctggactccagcagcaacccttcctccaccacctcctccacaccctcctcaccggcgcccttcccgacatcatccaacccatccagcgccaccacgccccccaacccctcacctggccagcgggacagcaggttcaacttcccagctgcctacttcattcatcatagacagcagtttatctttccagacatttcagcctttgcacacgcagccccgctccctgaagctgccgacggtacccggctcgatgaccagccgaaagcagatgtgttggaagctcacgaagcggaggctgaggagccagaggctggcaagtcagaggcagaagacgatgaggacgaggtggacgacttgccgagctctcgccggccctggcggggccccatctctcgcaaggccagccagaccagcgtgtacctgcaggagtgggacatccccttcgagcaggtagagctgggcgagcccatcgggcagggccgctggggccgggtgcaccgcggccgctggcatggcgaggtggccattcgcctgctggagatggacggccacaaccaggaccacctgaagctcttcaagaaagaggtgatgaactaccggcagacgcggcatgagaacgtggtgctcttcatgggggcctgcatgaacccgccccacctggccattatcaccagcttctgcaaggggcggacgttgcactcgtttgtgagggaccccaagacgtctctggacatcaacaagacgaggcaaatcgctcaggagatcatcaagggcatgggatatcttcatgccaagggcatcgtacacaaagatctcaaatctaagaacgtcttctatgacaacggcaaggtggtcatcacagacttcgggctgtttgggatctcaggcgtggtccgagagggacggcgtgagaaccagctaaagctgtcccacgactggctgtgctatctggcccctgagattgtacgcgagatgacccccgggaaggacgaggatcagctgccattctccaaagctgctgatgtctatgcatttgggactgtttggtatgagctgcaagcaagagactggcccttgaagaaccaggctgcagaggcatccatctggcagattggaagcggggaaggaatgaagcgtgtcctgacttctgtcagcttggggaaggaagtcagtgagatcctgtcggcctgctgggctttcgacctgcaggagagacccagcttcagcctgctgatggacatgctggagaaacttcccaagctgaaccggcggctctcccaccctggacacttctggaagtcagctgacattaacagcagcaaagttgtaccccggtttgaaaggtttggcttgggcgtcctggagtccagtaatccaaagatgtagccagccatatggtttttcgctgctgatctctttctttttaaaatgtgtttctgaaacatcccaacaaccaccacgacaaaaaaacactgcctgcccagcgctgcaaaccaggagcacacgtcctagattcagactgttggccataaaccccactcgggagatggagctgcacctgctatttcttaaaatgacaccaccaacaaccaaacctgtcatgacagacagcaaatgtttacacgtatatttctcctgagtgaacctgatgttttacaataggtaataataaaaacagtctgtgcagatgcactaaaaaaga

SEQ ID NO: 39382 - DNA, 3220 bp, Homo sapiens
gcctggcagtcccggcctgcttgggggcacctggacccctgccagggaaggggtcctcagacttgaggttgccagctcagatgtggggctgctgatactaggtgactggactgatgttctgttctagatgaaactccttgaggggaccatttgaaaaggcttgatgtgctgcccaaagcccccttcagagctgacttctccacccccagctgccgtgagccttggctgctgacagctcatagctgagtccctcccgtgaagtcaccttctgctgaagggtacatcctctcccaaggcgaagctggtccgttacatttgtaagcagaggcagtgcaagctgagcgtggctcccggtgagaggaccccagagctcaacagctacccccgcttcagcgactggctgtacactttcaacgtgaggccggaggtggtgcaggaggggagcacaaggaggactccagttggagttcattggatgcgcggcgggaaagtggctcagggccttccacggacaccctctcagcagccagcctgccctggcccccagggagctcccagctgggcagagcaggcaacagcgcccagggcccacgctccatctccgtgtcagctctgcccgcctcagactcccccacccccagcttcagtgagggcctctcagacacctgtattcccctgcacgccagcggccggctgaccccccgtgccctgcacagcttcatcaccccgcccaccacaccccagctgcgacggcacaccaagctgaagccaccacggacgccccccccacccagccgcaaggtcttccagctgctgcccagcttccccacactcacccggagcaagtcccatgagtctcagctggggaaccgcattgatgacgtctcctcgatgaggtgagtcctgccttcttcctcatctggaaacatcacaggggcagctgactgagccatcctcagaggccaggagcaagctagaggaccaagcgaggcgaggggaaccacaccatgccactgggctagcctggcctgctcctgtgttgatggacatagatcagggagatgcttatataataaaccattgcgcccccctctagcctgtggtctctgaattaggaagtcatgggcacgagctgtcgcctgcggagttcctcagcctgcccatccggcctctttccctgcagatctctcgcatggatccccacagatggtacggagggatatcgggctgtcggtgacgcacaggttctccaccaagtcctggctgtcgcaggtctgccacgtgtgccagaagagcatgatatttggagtgaagtgcaagcattgcaggttgaagtgtcacaacaaatgtaccaaagaagcccctgcctgtagaatatccttcctgccactaactcggcttcggaggacagaatctgtcccctcggacatcaacaacccggtggacagagcagccgaaccccattttggaaccctccccaaagcactgacaaagaaggagcaccctccggccatgaatcacctggactccagcagcaacccttcctccaccacctcctccacaccctcctcaccggcgcccttcccgacatcatccaacccatccagcgccaccacgccccccaacccctcacctggccagcgggacagcaggttcaacttcccagctgcctacttcattcatcatagacagcagtttatctttccagacatttcagcctttgcacacgcagccccgctccctgaagctgccgacggtacccggctcgatgaccagccgaaagcagatgtgttggaagctcacgaagcggaggctgaggagccagaggctggcaagtcagaggcagaagacgatgaggacgaggtggacgacttgccgagctctcgccggccctggcggggccccatctctcgcaaggccagccagaccagcgtgtacctgcaggagtgggacatccccttcgagcaggtagagctgggcgagcccatcgggcagggccgctggggccgggtgcaccgcggccgctggcatggcgaggtggccattcgcctgctggagatggacggccacaaccaggaccacctgaagctcttcaagaaagaggtgatgaactaccggcagacgcggcatgagaacgtggtgctcttcatgggggcctgcatgaacccgccccacctggccattatcaccagcttctgcaaggggcggacgttgcactcgtttgtgagggaccccaagacgtctctggacatcaacaagacgaggcaaatcgctcaggagatcatcaagggcatgggatatcttcatgccaagggcatcgtacacaaagatctcaaatctaagaacgtcttctatgacaacggcaaggtggtcatcacagacttcgggctgtttgggatctcaggcgtggtccgagagggacggcgtgagaaccagctaaagctgtcccacgactggctgtgctatctggcccctgagattgtacgcgagatgacccccgggaaggacgaggatcagctgccattctccaaagctgctgatgtctatgcatttgggactgtttggtatgagctgcaagcaagagactggcccttgaagaaccaggctgcagaggcatccatctggcagattggaagcggggaaggaatgaagcgtgtcctgacttctgtcagcttggggaaggaagtcagtgagatcctgtcggcctgctgggctttcgacctgcaggagagacccagcttcagcctgctgatggacatgctggagaaacttcccaagctgaaccggcggctctcccaccctggacacttctggaagtcagctgacattaacagcagcaaagttgtaccccggtttgaaaggtttggcttgggcgtcctggagtccagtaatccaaagatgtagccagccatatggtttttcgctgctgatctctttctttttaaaatgtgtttctgaaacatcccaacaaccaccacgacaaaaaaacactgcctgcccagcgctgcaaaccaggagcacacgtcctagattcagactgttggccataaaccccactcgggagatggagctgcacctgctatttcttaaaatgacaccaccaacaaccaaacctgtcatgacagacagcaaatgtttacacgtatatttctcctgagtgaacctgatgttttacaataggtaataataaaaacagtctgtgcagatgcactaaaaaaga

SEQ ID NO: 39383 - DNA, 3510 bp, Homo sapiens
gcctggcagtcccggcctgcttgggggcacctggacccctgccagggaaggggtcctcagacttgaggttgccagctcagatgtggggctgctgatactaggtgactggactgatgttctgttctagatgaaactccttgaggggaccatttgaaaaggcttgatgtgctgcccaaagcccccttcagagctgacttctccacccccagctgccgtgagccttggctgctgacagctcatagctgagtccctcccgtgaagtcaccttctgctgaagggtacatcctctcccaaggcgaagctggtccgttacatttgtaagcagaggcagtgcaagctgagcgtggctcccggtgagaggaccccagagctcaacagctacccccgcttcagcgactggctgtacactttcaacgtgaggccggaggtggtgcaggagatcccccgagacctcacgctggatgccctgctggagatgaatgaggccaaggtgaaggagacgctgcggcgctgtggggccagcggggatgagtgtggccgtctgcagtatgccctcacctgcctgcggaaggtgacaggcctgggaggggagcacaaggaggactccagttggagttcattggatgcgcggcgggaaagtggctcagggccttccacggacaccctctcagcagccagcctgccctggcccccagggagctcccagctgggcagagcaggcaacagcgcccagggcccacgctccatctccgtgtcagctctgcccgcctcagactcccccacccccagcttcagtgagggcctctcagacacctgtattcccctgcacgccagcggccggctgaccccccgtgccctgcacagcttcatcaccccgcccaccacaccccagctgcgacggcacaccaagctgaagccaccacggacgccccccccacccagccgcaaggtcttccagctgctgcccagcttccccacactcacccggagcaagtcccatgagtctcagctggggaaccgcattgatgacgtctcctcgatgaggtgagtcctgccttcttcctcatctggaaacatcacaggggcagctgactgagccatcctcagaggccaggagcaagctagaggaccaagcgaggcgaggggaaccacaccatgccactgggctagcctggcctgctcctgtgttgatggacatagatcagggagatgcttatataataaaccattgcgcccccctctagcctgtggtctctgaattaggaagtcatgggcacgagctgtcgcctgcggagttcctcagcctgcccatccggcctctttccctgcagatctctcgcatggatccccacagatggtacggagggatatcgggctgtcggtgacgcacaggttctccaccaagtcctggctgtcgcaggtctgccacgtgtgccagaagagcatgatatttggagtgaagtgcaagcattgcaggttgaagtgtcacaacaaatgtaccaaagaagcccctgcctgtagaatatccttcctgccactaactcggcttcggaggacagaatctgtcccctcggacatcaacaacccggtggacagagcagccgaaccccattttggaaccctccccaaagcactgacaaagaaggagcaccctccggccatgaatcacctggactccagcagcaacccttcctccaccacctcctccacaccctcctcaccggcgcccttcccgacatcatccaacccatccagcgccaccacgccccccaacccctcacctggccagcgggacagcaggttcaacttcccagctgcctacttcattcatcatagacagcagtttatctttccagacatttcagcctttgcacacgcagccccgctccctgaagctgccgacggtacccggctcgatgaccagccgaaagcagatgtgttggaagctcacgaagcggaggctgaggagccagaggctggcaagtcagaggcagaagacgatgaggacgaggtggacgacttgccgagctctcgccggccctggcggggccccatctctcgcaaggccagccagaccagcgtgtacctgcaggagtgggacatccccttcgagcaggtagagctgggcgagcccatcgggcagggccgctggggccgggtgcaccgcggccgctggcatggcgaggtggccattcgcctgctggagatggacggccacaaccaggaccacctgaagctcttcaagaaagaggtgatgaactaccggcagacgcggcatgagaacgtggtgctcttcatgggggcctgcatgaacccgccccacctggccattatcaccagcttctgcaaggggcggacgttgcactcgtttgtgagggaccccaagacgtctctggacatcaacaagacgaggcaaatcgctcaggagatcatcaagggcatgggatatcttcatgccaagggcatcgtacacaaagatctcaaatctaagaacgtcttctatgacaacggcaaggtggtcatcacagacttcgggctgtttgggatctcaggcgtggtccgagagggacggcgtgagaaccagctaaagctgtcccacgactggctgtgctatctggcccctgagattgtacgcgagatgacccccgggaaggacgaggatcagctgccattctccaaagctgctgatgtctatgcatttgggactgtttggtatgagctgcaagcaagagactggcccttgaagaaccaggctgcagaggcatccatctggcagattggaagcggggaaggaatgaagcgtgtcctgacttctgtcagcttggggaaggaagtcagtgagatcctgtcggcctgctgggctttcgacctgcaggagagacccagcttcagcctgctgatggacatgctggagaaacttcccaagctgaaccggcggctctcccaccctggacacttctggaagtcagctgacattaacagcagcaaagttgtaccccggtttgaaaggtttggcttgggcgtcctggagtccagtaatccaaagatgtagccagccatatggtttttcgctgctgatctctttctttttaaaatgtgtttctgaaacatcccaacaaccacccagccgcaaggtcttccagctgctgcccagcttccccacactcacccggagcaagtcccatgagtctcagctggggaaccgcattgatgacgtctcctcgatgaggtttgatctctcgcatggatccccacagatggtacggagggatatcgggctgtcggtgacgcacagacgtaaatgtgaagccagttggagtttgtgctatgcagcagtgttagccaggatctcattagcgtgcaaacctagcatcttctgtgccacaagccacacacttgctttttttgaatgtgatgtaaaatttgtacagtaaagtttttatattttctatcaactacatttgtcttccagacatgctattaatttaaattaaaatggttagtattaac

SEQ ID NO: 39384 - DNA, 3434 bp, Homo sapiens
gcctggcagtcccggcctgcttgggggcacctggacccctgccagggaaggggtcctcagacttgaggttgccagctcagatgtggggctgctgatactaggtgactggactgatgttctgttctagatgaaactccttgaggggaccatttgaaaaggcttgatgtgctgcccaaagcccccttcagagctgacttctccacccccagctgccgtgagccttggctgctgacagctcatagctgagtccctcccgtgaagtcaccttctgctgaagggtacatcctctcccaaggcgaagctggtccgttacatttgtaagcagaggcagtgcaagctgagcgtggctcccggtgagaggaccccagagctcaacagctacccccgcttcagcgactggctgtacactttcaacgtgaggccggaggtggtgcaggagatcccccgagacctcacgctggatgccctgctggagatgaatgaggccaaggtgaaggagacgctgcggcgctgtggggccagcggggatgagtgtggccgtctgcagtatgccctcacctgcctgcggaaggtgacaggcctgggaggggagcacaaggaggactccagttggagttcattggatgcgcggcgggaaagtggctcagggccttccacggacaccctctcagcagccagcctgccctggcccccagggagctcccagctgggcagagcaggcaacagcgcccagggcccacgctccatctccgtgtcagctctgcccgcctcagactcccccacccccagcttcagtgagggcctctcagacacctgtattcccctgcacgccagcggccggctgaccccccgtgccctgcacagcttcatcaccccgcccaccacaccccagctgcgacggcacaccaagctgaagccaccacggacgccccccccacccagccgcaaggtcttccagctgctgcccagcttccccacactcacccggagcaagtcccatgagtctcagctggggaaccgcattgatgacgtctcctcgatgaggtgagtcctgccttcttcctcatctggaaacatcacaggggcagctgactgagccatcctcagaggccaggagcaagctagaggaccaagcgaggcgaggggaaccacaccatgccactgggctagcctggcctgctcctgtgttgatggacatagatcagggagatgcttatataataaaccattgcgcccccctctagcctgtggtctctgaattaggaagtcatgggcacgagctgtcgcctgcggagttcctcagcctgcccatccggcctctttccctgcagatctctcgcatggatccccacagatggtacggagggatatcgggctgtcggtgacgcacaggttctccaccaagtcctggctgtcgcaggtctgccacgtgtgccagaagagcatgatatttggagtgaagtgcaagcattgcaggttgaagtgtcacaacaaatgtaccaaagaagcccctgcctgtagaatatccttcctgccactaactcggcttcggaggacagaatctgtcccctcggacatcaacaacccggtggacagagcagccgaaccccattttggaaccctccccaaagcactgacaaagaaggagcaccctccggccatgaatcacctggactccagcagcaacccttcctccaccacctcctccacaccctcctcaccggcgcccttcccgacatcatccaacccatccagcgccaccacgccccccaacccctcacctggccagcgggacagcaggttcaacttcccagctgcctacttcattcatcatagacagcagtttatctttccagtgccatctgctggccattgctggaaatgcctccttattgcagaaagtttaaaggaaaacgctttcaacatttcagcctttgcacacgcagccccgctccctgaagctgccgacggtacccggctcgatgaccagccgaaagcagatgtgttggaagctcacgaagcggaggctgaggagccagaggctggcaagtcagaggcagaagacgatgaggacgaggtggacgacttgccgagctctcgccggccctggcggggccccatctctcgcaaggccagccagaccagcgtgtacctgcaggagtgggacatccccttcgagcaggtagagctgggcgagcccatcgggcagggccgctggggccgggtgcaccgcggccgctggcatggcgaggtggccattcgcctgctggagatggacggccacaaccaggaccacctgaagctcttcaagaaagaggtgatgaactaccggcagacgcggcatgagaacgtggtgctcttcatgggggcctgcatgaacccgccccacctggccattatcaccagcttctgcaaggggcggacgttgcactcgtttgtgagggaccccaagacgtctctggacatcaacaagacgaggcaaatcgctcaggagatcatcaagggcatgggatatcttcatgccaagggcatcgtacacaaagatctcaaatctaagaacgtcttctatgacaacggcaaggtggtcatcacagacttcgggctgtttgggatctcaggcgtggtccgagagggacggcgtgagaaccagctaaagctgtcccacgactggctgtgctatctggcccctgagattgtacgcgagatgacccccgggaaggacgaggatcagctgccattctccaaagctgctgatgtctatgcatttgggactgtttggtatgagctgcaagcaagagactggcccttgaagaaccaggctgcagaggcatccatctggcagattggaagcggggaaggaatgaagcgtgtcctgacttctgtcagcttggggaaggaagtcagtgagatcctgtcggcctgctgggctttcgacctgcaggagagacccagcttcagcctgctgatggacatgctggagaaacttcccaagctgaaccggcggctctcccaccctggacacttctggaagtcagctgacattaacagcagcaaagttgtaccccggtttgaaaggtttggcttgggcgtcctggagtccagtaatccaaagatgtagccagccatatggtttttcgctgctgatctctttctttttaaaatgtgtttctgaaacatcccaacaaccaccacgacaaaaaaacactgcctgcccagcgctgcaaaccaggagcacacgtcctagattcagactgttggccataaaccccactcgggagatggagctgcacctgctatttcttaaaatgacaccaccaacaaccaaacctgtcatgacagacagcaaatgtttacacgtatatttctcctgagtgaacctgatgttttacaataggtaataataaaaacagtctgtgcagatgcactaaaaaaga

SEQ ID NO: 39385 - DNA, 2008 bp, Homo sapiens
caagggctgtcccaggcacccattgcagaggtgcatgtcagggaagaacgatgaggaatgcaatggagcaagcttgtccaagctctgtcttccccacactccccaggtgattgtagccagggtcaagaaccactgccttgacccttgaacaaaagtgtcagccaaggctggatccctccattgcattatggcttggagaatgttaacagactgatttactcctgcccaggggagagtcagaaactctgtgtttaaacaagagttccagaaggatggatgcagtgaaattcttctatgccagggatgctcttgctctttcctggacaattagatgttgctcacaggtaggtattggagtattagcatgatgaagggcctcaggtcaccgggccagccgccacatattgtggatgaggacattgaggtccactgatgctaagtgagctgcacagcaggccagtgcagagctgcaactacaacctgggtcccctggcaggatgcctctctcccctgttacctggctagggctccaggagaaggaagagacgtcgcagagcccagatctgctgcccatccctgttcttcctgctctcctttcaggctgaggagccagaggctggcaagtcagaggcagaagacgatgaggacgaggtggacgacttgccgagctctcgccggccctggcggggccccatctctcgcaaggccagccagaccagcgtgtacctgcaggagtgggacatccccttcgagcaggtagagctgggcgagcccatcgggcagggccgctggggccgggtgcaccgcggccgctggcatggcgaggtggccattcgcctgctggagatggacggccacaaccaggaccacctgaagctcttcaagaaagaggtgatgaactaccggcagacgcggcatgagaacgtggtgctcttcatgggggcctgcatgaacccgccccacctggccattatcaccagcttctgcaaggggcggacgttgcactcgtttgtgagggaccccaagacgtctctggacatcaacaagacgaggcaaatcgctcaggagatcatcaagggcatgggatatcttcatgccaagggcatcgtacacaaagatctcaaatctaagaacgtcttctatgacaacggcaaggtggtcatcacagacttcgggctgtttgggatctcaggcgtggtccgagagggacggcgtgagaaccagctaaagctgtcccacgactggctgtgctatctggcccctgagattgtacgcgagatgacccccgggaaggacgaggatcagctgccattctccaaagctgctgatgtctatgcatttgggactgtttggtatgagctgcaagcaagagactggcccttgaagaaccaggctgcagaggcatccatctggcagattggaagcggggaaggaatgaagcgtgtcctgacttctgtcagcttggggaaggaagtcagtgagatcctgtcggcctgctgggctttcgacctgcaggagagacccagcttcagcctgctgatggacatgctggagaaacttcccaagctgaaccggcggctctcccaccctggacacttctggaagtcagctgacattaacagcagcaaagttgtaccccggtttgaaaggtttggcttgggcgtcctggagtccagtaatccaaagatgtagccagccatatggtttttcgctgctgatctctttctttttaaaatgtgtttctgaaacatcccaacaaccaccacgacaaaaaaacactgcctgcccagcgctgcaaaccaggagcacacgtcctagattcagactgttggccataaaccccactcgggagatggagctgcacctgctatttcttaaaatgacaccaccaacaaccaaacctgtcatgacagacagcaaatgtttacacgtatatttctcctgagtgaacctgatgttttacaataggtaataataaaaacagtctgtgcagatgcactaaaaaaga

SEQ ID NO: 39386 - DNA, 1681 bp, Homo sapiens
taaaattcaattgaaatgaaatgaaaacgtaagcatttaatagtggttttaaaaatcagtaacttttgttcatctgtgttttctttttagaatgaagtgatggaggctggtctctgtctgaaagcagtgctctaccaagtcctggagatgaagggaattcactctgttttgcagaaaagattctgtggattaatacagaagcaccagcaacaccagaggggtggagactcctttctctcccgattctacagtctggctctaagcccagtaaaacagctcccgagcactgcttcagctgggtccagtcttgacaaaggcaggaagccagctagggtgggggcgatagggtcagcgggtatgtcccactgttggaggtcactggtattctgtttgtttttgttttgtttcgttttgttttttgagacagggtctcgttctgtcgcttagctggagtgcggtggcgtgatcatggcactgctattcttgaagcactccacccacctgggctactttttctttagtgcagaggtgcactgtcttcttttaggtgggatcgcgtaagcatgagctggtagagcacggagaggcaggcagccaggttacgaagactaagccaattattcactgaagtcatcctcctctcccccaccattcgatttgatctacctctaagccaggctgtgaagaaaaggaaggcactttagaagacctcagcagtgtggttctgtgtctacttccatgacctgtacctgagtatcttagccagccagccttaggaacaccaccaaggttactttgaaatctatgtatatagctagttacagacgggagctatgtgtttcttcattattttgcagctcctcgttgttcctgtgattcctgaacacctttttggaaatatgggtctctgtgagttttgagcacactactatcactttggatagtcactccatttatatttttataaacttccattagagaatcattaaggctgtttaatatctgctctggatattacgcattggctttttgttgcctagtgctacaaaccttcctgtgggactcagtgtcttcaggcaatgattgtgtatcctgttacagatggttgtgatacaagaagaaccactcttctttgaaaataaactcttggaagcttttgccagctatctggggggtaggaggaatattagcaactgtattggttgtctacagatacagaattgcctgttgtgagggaactgattgttttgttgggaaaagaaatttaccaggagaaagagttttgtgctgtattgtgagagatctcgcctctcagttaaatgagccctgggttaaagtcagtgtgaagggcagctgtgtgcgggcacgagccagagtgtctgcctcagactagatttgacttgagttctttatgacccaggactctggataatgtgaatttgctttcctatttaactagaagatacatgtactatagatcattgtctcattttagtgattgttccttaaactagtgaaactagtggatttctcttcttcctctttattttttgcatgttaaatgtgaaccttagtgtatttgtattttgtagaaaataatgaaaaattttaatggagaatgatttaaaaacatttacaatacattatttttgcatctgtgttgttgcattcccattggctg

SEQ ID NO: 39387 - DNA, 2257 bp, Homo sapiens
ctttccctgccggcacagtggacctggcccaaccctcacagccagtagacgagctggagctctcggtgctcgagcggcagccagaagagaacacgcctctcaatggtgccgacaaggtcttcccttctttggacgaggaggtccccccggccgaggctaacaaggaaagcccctggagctcctgtaataagaatgtggttggaagatgcaaactgtggatgatcatcacctccattttcctaggtgtcattacagtgatcatcataggcttatgtcttgctgcagtaacttatgttgatgaagatgaaaatgaaatacttgaattatcatcaaacaaaacattcttcatcatgctgaagattccagaggagtgtgttgctgaagaggaattgcctcacctgctcaccgaaaggctcacagatgtgtacagtacatcgccctctctgagtcgttattttacttcagttgaaatagtggacttcagtggtgaaaatgccacagtaacgtatgacctgcaatttggggttccatcagatgatgaaaattttatgaagtatatgatgagtgaggagttggtgctgggcattttgctacaggatttccgtgatcagaatatacctggttgtgagagtctggggcttgatccaacatccctcttgctctatgaatgaagtgatggaggctggtctctgtctgaaagcagtgctctaccaagtcctggagatgaagggaattcactctgttttgcagaaaagattctgtggattaatacagaagcaccagcaacaccagaggggtggagactcctttctctcccgattctacagtctggctctaagcccagtaaaacagctcccgagcactgcttcagctgggtccagtcttgacaaaggcaggaagccagctagggtgggggcgatagggtcagcgggtatgtcccactgttggaggtcactggtattctgtttgtttttgttttgtttcgttttgttttttgagacagggtctcgttctgtcgcttagctggagtgcggtggcgtgatcatggcactgctattcttgaagcactccacccacctgggctactttttctttagtgcagaggtgcactgtcttcttttaggtgggatcgcgtaagcatgagctggtagagcacggagaggcaggcagccaggttacgaagactaagccaattattcactgaagtcatcctcctctcccccaccattcgatttgatctacctctaagccaggctgtgaagaaaaggaaggcactttagaagacctcagcagtgtggttctgtgtctacttccatgacctgtacctgagtatcttagccagccagccttaggaacaccaccaaggttactttgaaatctatgtatatagctagttacagacgggagctatgtgtttcttcattattttgcagctcctcgttgttcctgtgattcctgaacacctttttggaaatatgggtctctgtgagttttgagcacactactatcactttggatagtcactccatttatatttttataaacttccattagagaatcattaaggctgtttaatatctgctctggatattacgcattggctttttgttgcctagtgctacaaaccttcctgtgggactcagtgtcttcaggcaatgattgtgtatcctgttacagatggttgtgatacaagaagaaccactcttctttgaaaataaactcttggaagcttttgccagctatctggggggtaggaggaatattagcaactgtattggttgtctacagatacagaattgcctgttgtgagggaactgattgttttgttgggaaaagaaatttaccaggagaaagagttttgtgctgtattgtgagagatctcgcctctcagttaaatgagccctgggttaaagtcagtgtgaagggcagctgtgtgcgggcacgagccagagtgtctgcctcagactagatttgacttgagttctttatgacccaggactctggataatgtgaatttgctttcctatttaactagaagatacatgtactatagatcattgtctcattttagtgattgttccttaaactagtgaaactagtggatttctcttcttcctctttattttttgcatgttaaatgtgaaccttagtgtatttgtattttgtagaaaataatgaaaaattttaatggagaatgatttaaaaacatttacaatacattatttttgcatctgtgttgttgcattcccattggctg

SEQ ID NO: 39388 - DNA, 240 bp, Homo sapiens
cgccggcgctgtggcctcccgcggagccgctcagactttccctgccggcacagtggacctggcccaaccctcacagccagtagacgagctggagctctcggtgctcgagcggcagccagaagagaacacgcctctcaatggtgccgacaaggtcttcccttctttggacgaggaggtccccccggccgaggtaaggtccccttggcgctggccctaacttgccggcggcgggacagtagt

SEQ ID NO: 39389 - DNA, 2876 bp, Homo sapiens
ggagttccaagggctgatgctgggaaccttgctctggatgcgaggcctgcccctggagggagccgcggaggactggcagctgcagatgctggagcaggccagcctgtggctgggccgtagcttcctgctggcaggcttcctggtatcgagcagctgccccagcctggagcaggcggccaagggtgagggctgttcccccatcccttgtttcgcccactgcctcgactccctggtgagaaactttctgtgtcaccctcacagtgtccagatcatcctgggcactgccagggccacctgcagccatttctaaggctctgtggaggcccagggactcctcacccagctccagcgccagcgcagcctcctagcccaccagccctttgaggagctcttggaccactgggtctcggcctaccacctgctggagtggctggtggagcagcagcagccccttcaagagtacaagggcaggcaccagctggggaaggctggtgttgccttgtcggccacattctggagcccggcagacagcctcagcaagctcctgtagcccttccagatggtggtccgcgaggcgagtgcggcacaggcctctctgagccaggtgctgccccagctgcgctacctgcacatcttcctggagcaggttcacacacactttcaggagcagagtgtcggggagaggggcgcagccatccagctggctgaggggttggcccggcagctctgcaccgactgtcagctcaacaagctcttctaccgcgaggagtttgtgctggccaccttgctggacccttgcttcaaggggaagattgaggccatcctgccatgggggccgaccgacattgaccactggaagcaagtcctcgtgtacaaggtgaaggagattagagtgtctgaatactctttgaactccccaagtcccctgcaaagccccaggggtctgtgcgtggaccccaccagggtagccaagagctccggggtggaggggagaagccagggggagcctctgcagagcagcagccactctggggccttcctgctggcccagagggagaagggcttgctggagagcatggggctgctggcctctgagagaagcgggggctcgctgtccaccaagagccactgggccagcatcattgtcaagaagtatctgtgggagaatgagaccgttggagcccaggatgaccccctggcttactgggagaagaagcgagaagcctggccaccatctatctgtcttaccccccacaggagccttctctgaaagcatctttgcctccctgaacagccccacccttgtagagcaaaactcttctctcaaggtggaagccattgagcatctcctcttcttgaaggccaacctggagcagttccccaactacaccccgcctcccctcatctgctctagtggtgacctggccaaggggatacagaccctgcagtccgctcagggtgggatggcagacatggcaggtgccggtgctcaccctgcccgtgaactcctagagagcccctgcctgtaataggtcaaagcagagagctgggtgttgcatcctgggcgccacatgctcatggccagaatcttaaacctatttggtaggaaagggtcagtttctcacttgacagattgccatatttttttttctgggagatgtcattttccatctcccgattacttcctttacgtctagcagtatgtgccgagaagaggcttactctcttcgtaggtgactgtgaattttgtactacgtggctttgtacatgtgatgctctgttaaaacataagtgggtatgaaggtccttgcatacaccttgtctgtgtggataagtggacacatgcccttaagaggcttgctttctcaaaaagtggccaaggatgtggagtgggcatgtgctggcaggtgggatatgtcctcagcctttgggggcctggataagctattgcagcactttctgaggctttcactgtagggagaaggaaaccccaagggtagaatagccatttccagagggaagtacacacatacccccacacaccagtctttttgggggtttcagagtggccggagaaaccgactgaagggactgaccagctagctaggagagctgagacgccagtcctcaaatggcgttcttaccaatagtctatttccagactactggaaacgttggggtttcttcctccagtgacagcagcctcagtagctttcctgggctccaggcggctggctgcacaccctgcctgccatcacccttgcccctgcttgtcctggaccacttttaaaggggaagtcccttatttggaagagagaaaggatgtgtgtagcacacactcatcatggattgctcagagttcctttagggcagagctgagggcctgggatccaggaaccagtgggattggatgggagaagaaggaagggggtggcccgtcacccccgcaagacttgcatccaggtagcctaaggactcctggtcactgggtagggtggctgctgagatgcaggtcggaagaggcaggggaaggctccaggcctaacttggagcatgtcactggccatgggggtgaggggacagactctgctctcactggctggcagccccaggagcctgttcccttgcctctcctggatgggttgtcagccctgtgtttcactgtgaccaattcattataacatttggatattactgaaaatgtaaggaagcaggaaaaattaactactttcattcagagatagcctctatcaatagtttgacatttttccctcttttacattgagatcataccctaggtactgtttagtatgcaatattttcattttcgcagtataataattgcacctgttaaataaagttttgtaaacatttaa

SEQ ID NO: 39390 - DNA, 2668 bp, Homo sapiens
ggagttccaagggctgatgctgggaaccttgctctggatgcgaggcctgcccctggagggagccgcggaggactggcagctgcagatgctggagcaggccagcctgtggctgggccgtagcttcctgctggcaggcttcctggtatcgagcagctgccccagcctggagcaggcggccaagggtgagggctgttcccccatcccttgtttcgcccactgcctcgactccctggtgagaaactttctgtgtcaccctcacagtgtccagatcatcctgggcactgccagggccacctgcagccatttctaaggctctgtggaggcccagggactcctcacccagctccagcgccagcgcagcctcctagcccaccagccctttgaggagctcttggaccactgggtctcggcctaccacctgctggagtggctggtggagcagcagcagccccttcaagagtacaagggcaggcaccagctggggaaggctggtgttgccttgtcggccacattctggagcccggcagacagcctcagcaagctcctgtagcccttccagatggtggtccgcgaggcgagtgcggcacaggcctctctgagccaggtgctgccccagctgcgctacctgcacatcttcctggagcaggttcacacacactttcaggagcagagtgtcggggagaggggcgcagccatccagctggctgaggggttggcccggcagctctgcaccgactgtcagctcaacaagctcttctaccgcgaggagtttgtgctggccaccttgctggacccttgcttcaaggggaagattgaggccatcctgccatgggggccgaccgacattgaccactggaagcaagtcctcgtgtacaaggtgaaggagattagagtgtctgaatactctttgaactccccaagtcccctgcaaagccccaggggtctgtgcgtggaccccaccagggtagccaagagctccggggtggaggggagaagccagggggagcctctgcagagcagcagccactctggggccttcctgctggcccagagggagaagggcttgctggagagcatggggctgctggcctctgagagaagcgggggctcgctgtccaccaagagccactgggccagcatcattgtcaagaagtatctgtgggagaatgagaccgttggagcccaggatgaccccctggcttactgggagaagaagcgagaagcctggccaccatctatctgtcttaccccccacaggagccttctctgaaagcatctttgcctccctgaacagccccacccttgtagagcaaaactcttctctcaaggtggaagccattgagcatctcctcttcttgaaggccaacctggagcagttccccaactacaccccgcctcccctcatctgctctagtggtgacctggccaaggggatacagaccctgcagtccgctcagggtgggatggcagacatggcaggtgccggtgctcaccctgcccgtgaactcctagagagcccctgcctgtaataggtcaaagcagagagctgggtgttgcatcctgggcgccacatgctcatggccagaatcttaaacctatttggtaggaaagggtcagtttctcacttgacagattgccatatttttttttctgggagatgtcattttccatctcccgattacttcctttacgtctagcagtatgtgccgagaagaggcttactctcttcgtaggtgactgtgaattttgtactacgtggctttgtacatgtgatgctctgttaaaacataagtgggtatgaaggtccttgcatacaccttgtctgtgtggataagtggacacatgcccttaagaggcttgctttctcaaaaagtggccaaggatgtggagtgggcatgtgctggcaggtgggatatgtcctcagcctttgggggcctggataagctattgcagcactttctgaggctttcactttcttcctccagtgacagcagcctcagtagctttcctgggctccaggcggctggctgcacaccctgcctgccatcacccttgcccctgcttgtcctggaccacttttaaaggggaagtcccttatttggaagagagaaaggatgtgtgtagcacacactcatcatggattgctcagagttcctttagggcagagctgagggcctgggatccaggaaccagtgggattggatgggagaagaaggaagggggtggcccgtcacccccgcaagacttgcatccaggtagcctaaggactcctggtcactgggtagggtggctgctgagatgcaggtcggaagaggcaggggaaggctccaggcctaacttggagcatgtcactggccatgggggtgaggggacagactctgctctcactggctggcagccccaggagcctgttcccttgcctctcctggatgggttgtcagccctgtgtttcactgtgaccaattcattataacatttggatattactgaaaatgtaaggaagcaggaaaaattaactactttcattcagagatagcctctatcaatagtttgacatttttccctcttttacattgagatcataccctaggtactgtttagtatgcaatattttcattttcgcagtataataattgcacctgttaaataaagttttgtaaacatttaa

SEQ ID NO: 39391 - DNA, 3203 bp, Homo sapiens
ggagttccaagggctgatgctgggaaccttgctctggatgcgaggcctgcccctggagggagccgcggaggactggcagctgcagatgctggagcaggccagcctgtggctgggccgtagcttcctgctggcaggcttcctggtatcgagcagctgccccagcctggagcaggcggccaagggtgagggctgttcccccatcccttgtttcgcccactgcctcgactccctggtgagaaactttctgtgtcaccctcacagtgtccagatcatcctgggcactgccagggccacctgcagccatttctaaggctctgtggaggcccagggactcctcacccagctccagcgccagcgcagcctcctagcccaccagccctttgaggagctcttggaccactgggtctcggcctaccacctgctggagtggctggtggagcagcagcagccccttcaagagtacaagggcaggcaccagctggggaaggctggtgttgccttgtcggccacattctggagcccggcagacagcctcagcaagctcctgtagcccttccagatggtggtccgcgaggcgagtgcggcacaggcctctctgagccaggtgctgccccagctgcgctacctgcacatcttcctggagcaggttcacacacactttcaggagcagagtgtcggggagaggggcgcagccatccagctggctgaggggttggcccggcagctctgcaccgactgtcagctcaacaagctcttctaccgcgaggagtttgtgctggccaccttgctggacccttgcttcaaggggaagattgaggccatcctgccatgggggccgaccgacattgaccactggaagcaagtcctcgtgtacaaggtgaaggagattagagtgtctgaatactctttgaactccccaagtcccctgcaaagccccaggggtctgtgcgtggaccccaccagggtagccaagagctccggggtggaggggagaagccagggggagcctctgcagagcagcagccactctggggccttcctgctggcccagagggagaagggcttgctggagagcatggggctgctggcctctgagagaagcgggggctcgctgtccaccaagagccactgggccagcatcattgtcaagaagtatctgtgggagaatgagaccgttggagcccaggatgaccccctggcttactgggagaagaagcgagaagcctggccaccatctatctgtcttaccccccacaggagccttctctgaaagcatctttgcctccctgaacagccccacccttgtagagcaaaactcttctctcaaggtggaagccattgagcatctcctcttcttgaaggccaacctggagcagttccccaactacaccccgcctcccctcatctgctctagtggtgacctggccaaggggatacagaccctgcagtccgctcagggtgggatggcagacatggcaggtgccggtgctcaccctgcccgtgaactcctagagagcccctgcctgtaataggtcaaagcagagagctgggtgttgcatcctgggcgccacatgctcatggccagaatcttaaacctatttggtaggaaagggtcagtttctcacttgacagattgccatatttttttttctgggagatgtcattttccatctcccgattacttcctttacgtctagcagtatgtgccgagaagaggcttactctcttcgtaggtgactgtgaattttgtactacgtggctttgtacatgtgatgctctgttaaaacataagtgggtatgaaggtccttgcatacaccttgtctgtgtggataagtggacacatgcccttaagaggcttgctttctcaaaaagtggccaaggatgtggagtgggcatgtgctggcaggtgggatatgtcctcagcctttgggggcctggataagctattgcagcactttctgaggctttcactgtagggagaaggaaaccccaagggtagaatagccatttccagagggaagtacacacatacccccacacaccagtctttttgggggtttcagagtggccggagaaaccgactgaagggactgaccagctagctaggagagctgagacgccagtcctcaaatggcgttcttaccaatagtctatttccagactactggaaacgttggggtttcttcctccagtgacagcagcctcagtagctttcctgggctccaggcggctggctgcacaccctgcctgccatcacccttgcccctgcttgtcctggaccacttttaaaggggaagtcccttatttggaagagagaaaggatgtgtgtagcacacactcatcatggattgctcagagttcctttagggcagagctgagggcctgggatccaggaaccagtgggattggatgggagaagaaggaagggggtggcccgtcacccccgcaagacttgcatccaggtagcctaaggactcctggtcactgggtagggtggctgctgagatgcaggtcggaagaggcaggggaaggctccaggcctaacttggagcatgtcactggccatgggggtgaggggacagactctgctctcactggctggcagccccaggagcctgttcccttgcctctcctggatgggttgtcagccctgtgtttcactgtgaccaattcattataacatttggatattactgaaaatgtaaggaagcaggaaaaattaactactttcattcagagatagcctctatcaatagtttgacatttttccctcttttacattgagatcataccctaggtactgtttagtatgcaatattttcattttcgcagtataataattgcacctgttaaataaagttttgtaaacatttaaaaaaaaaaaaaaaaaaaaatcggggatatagggggggggggaaagaggtactgaatggcctggtcctaggtgttcctgacccagttttggttacaaggtgggaaaatctggcggttcccctaagggaggcgataaattttggaaagccgggtaacgtatatttggaaaaaacaaagccacgggacgcgcccggcagcaccggggggagacaccttgtcaaaccggcgtgcaagacaccactcggaccgcccgcccccgacaaccaccaaccccaccaccgaacgcagacacgaaaccgacacgcgcgacacacgagcgacaacaaga

SEQ ID NO: 39392 - DNA, 217 bp, Homo sapiens
gaagaatctgaactttaagggtcccaccaaaatgttaaaatgaaccattctaagtagcactatggtagtcataaacagaactaagtattttgaaaacaaacagtttagagtttggctggggatggttgctcacacctaaaatcccagcacttagggagccagaggcaggaggagaccctgagtccaggagtttgagacctgtctggcaacagagcaa

SEQ ID NO: 39393 - DNA, 2010 bp, Homo sapiens
ccggcggcgccaagcttgcggccgcggcggcgcggagctcgggcggccgtggaggaactcagcctcggccgcaggaggcgccgggagcggagccgccgggagtcgcgcaacaggtttccttctccatcgctgcgcccacaggggacgcgcgccctgccgggagaggggcttctcggttcgcactctcgctcccagtccaggcaaaatgaaagaccggctagcagaacttctggacttgtccaagcaatatgaccagcagttcccagacggggacgatgagtttgactcgccccacgaggacatcgtgttcgagacggaccacatcctggagtccctgtaccgagacatccgggacattcaggatgaaaaccagctgctggtggccgacgtgaagcggctgggaaagcagaacgcccgcttcctcacgtccatgcggcgcctcagcagcatcaagcgcgacaccaactccatcgccaaggccatcaaggcccggggcgaggtcatccactgcaagctgcgcgccatgaaggagctgagcgaggcggctgaggcccagcacggcccgcactcggcagtggcgcgcatttcgcgggcgcagtacaacgcgctcaccctcaccttccagcgcgccatgcacgactacaaccaggccgagatgaagcagcgcgacaactgcaagatccgcatccagcgccagctggagatcatgggcaaggaagtctcgggcgaccagatcgaggacatgttcgagcagggtaagtgggacgtgttttccgagaacttgctggccgacgtgaagggcgcgcgggccgccctcaacgagatcgagagccgccaccgcgaactgctgcgcctggagagccgcatccgcgacgtacacgagctcttcttgcagatggcggtgctggtggagaagcaggccgacaccctgaacgtcatcgagctcaacgtacaaaagacggtcgactacaccggccaggccaaggcgcaggtgcggaaggccgtgcagtacgaggagaagaacccctgccggaccctctgctgcttctgctgtccctgcctcaagtagcaggccggcccgggccgccaccgcccatcccagaccatggagcgcgctgggaaggacgcaccaaagccgggagctctgccctgcagggagttgccccaaccctttccggaactcagtctttagaaaagaaacgccaggttcaagaattgcaaaccagcctgtgcttggaaagatggttagttgataccgtccgatgattcttcagtaaagatagattcccacaaagttgtgcaatgtcattatatgacaccttgcactcttaccgtcttgacagaagccaagtaaggaactgaagttgtatctgactgtagggtgaatgtctgaggcctgcctcctaataaagactcaaggaggaagtcaattgggcatctgctaatagaatgaactcatgatggaaacttcagttcatttactttgtcctgaaaattccctggttctgttccattttgagcgaaattggccttgggaaaaaccacgttcttcctttccgattcttcatccggtctacgctatgcaattcctccccaaatatagatcttatttctgctcatttcccctacttattaaaatcacaccaaacacttactattttcttatctctttcactttttaaatatctttcaccaggttatattttggtattatttttccaaacatttttaagcactgaatatcgaacaagcactcaaattgaagtatcagtcatgttttgtgtatttttcgctgataaaaattatttaacatttatatttttacttgattacatatgcacatgtatgtaaatgtaaaatactaatattcactaatatatgtacataatgatcaattggtttaacttcttttatgtaagtatggtatataaatttcaagacgaacacttttctggctcttggtattggtttgcttgttttgagtttgtttcactccagtttgccccttcc

SEQ ID NO: 39394 - DNA, 1364 bp, Homo sapiens
ccggcggcgccaagcttgcggccgcggcggcgcggagctcgggcggccgtggaggaactcagcctcggccgcaggaggcgccgggagcggagccgccgggagtcgcgcaacaggtttccttctccatcgctgcgcccacaggggacgcgcgccctgccgggagaggggcttctcggttcgcactctcgctcccagtccaggcaaaatgaaagaccggctagcagaacttctggacttgtccaagcaatatgaccagcagttcccagacggggacgatgagtttgactcgccccacgaggacatcgtgttcgagacggaccacatcctggagtccctgtaccgagacatccgggacattcaggatgaaaaccagctgctggtggccgacgtgaagcggctgggaaagcagaacgcccgcttcctcacgtccatgcggcgcctcagcagcatcaagcgcgacaccaactccatcgccaaggccatcaaggcccggggcgaggtcatccactgcaagctgcgcgccatgaaggagctgagcgaggcggctgaggcccagcacggcccgcactcggcagtggcgcgcatttcgcgggcgcagtacaacgcgctcaccctcaccttccagcgcgccatgcacgactacaaccaggccgagatgaagcagcgcgacaactgcaagatccgcatccagcgccagctggagatcatgggcaaggaagtctcgggcgaccagatcgaggacatgttcgagcagggtaagtgggacgtgttttccgagaacttgctggccgacgtgaagggcgcgcgggccgccctcaacgagatcgagagccgccaccgcgaactgctgcgcctggagagccgcatccgcgacgtacacgagctcttcttgcagatggcggtgctggtggagaagcaggccgacaccctgaacgtcatcgagctcaacgtacaaaagacggtcgactacaccggccaggccaaggcgcaggtgcggaaggccgtgcagtacgaggagaagaacccctgccggaccctctgctgcttctgctgtccctgcctcaagtagcaggccggcccgggccgccaccgcccatcccagaccatggagcgcgctgggaaggacgcaccaaagccgggagctctgccctgcagggagttgccccaaccctttccggaactcagtctttagaaaagaaacgccaggttcaagaattgcaaaccagcctgtgcttggaaagatggttagttgataccgtccgatgattcttcagtaaagatagattcccacaaagttgtgcaatgtcattatatgacaccttgcactcttaccgtctaggagcgtaatcggaccggctcgatga

SEQ ID NO: 39395 - DNA, 1942 bp, Homo sapiens
ccggcggcgccaagcttgcggccgcggcggcgcggagctcgggcggccgtggaggaactcagcctcggccgcaggaggcgccgggagcggagccgccgggagtcgcgcaacaggtttccttctccatcgctgcgcccacaggggacgcgcgccctgccgggagaggggcttctcggttcgcactctcgctcccagtccaggcaaaatgaaagaccggctagcagaacttctggacttgtccaagcaatatgaccagcagttcccagacggggacgatgagtttgactcgccccacgaggacatcgtgttcgagacggaccacatcctggagtccctgtaccgagacatccgggacattcaggatgaaaaccagctgctggtggccgacgtgaagcggctgggaaagcagaacgcccgcttcctcacgtccatgcggcgcctcagcagcatcaagcgcgacaccaactccatcgccaaggccatcaaggcccggggcgaggtcatccactgcaagctgcgcgccatgaaggagctgagcgaggcggctgaggcccagcacggcccgcactcggcagtggcgcgcatttcgcgggcgcagtacaacgcgctcaccctcaccttccagcgcgccatgcacgactacaaccaggccgagatgaagcagcgcgacaactgcaagatccgcatccagcgccagctggagatcatgggcaaggaagtctcgggcgaccagatcgaggacatgttcgagcagggtaagtgggacgtgttttccgagaacttgctggccgacgtgaagggcgcgcgggccgccctcaacgagatcgagagccgccaccgcgaactgctgcgcctggagagccgcatccgcgacgtacacgagctcttcttgcagatggcggtgctggtggagaagcaggccgacaccctgaacgtcatcgagctcaacgtacaaaagacggtcgactacaccggccaggccaaggcgcaggtgcggaaggccgtgcagtacgaggagaagaacccctgccggaccctctgctgcttctgctgtccctgcctcaagtagcaggccggcccgggccgccaccgcccatcccagaccatggagcgcgctgggaaggacgcaccaaagccgggagctctgccctgcagggagttgccccaaccctttccggaactcagtctttagaaaagaaacgccaggttcaagaattgcaaaccagcctgtgcttggaaagatggttagttgataccgtccgatgattcttcagtaaagatagattcccacaaagttgtgcaatgtcattatatgacaccttgcactcttaccgtcttgacagaagccaagtaaggaactgaagttgtatctgactgtagggtgaatgtctgaggcctgcctcctaataaagactcaaggaggaagtcaattgggcatctgctaatagaatgaactcatgatggaaacttcagttcatttactttgtcctgaaaattccctggttctgttccattttgagcgaaattggccttgggaaaaaccacgttcttcctttccgattcttcatccggtctacgctatgcaattcctccccaaatatagatcttatttctgctcatttcccctacttattaaaatcacaccaaacacttactattttcttatctctttcactttttaaatatctttcaccaggttatattttggtattatttttccaaacatttttaagcactgaatatcgaacaagcactcaaattgaagtatcagtcatgttttgtgtatttttcgctgataaaaattatttaacatttatatttttacttgattacatatgcacatgtatgtaaatgtaaaatactaatattcactaatatatgtacataatgatcaattggtttaacttcttttatgtaagtatggtatataaatttcaagacg

SEQ ID NO: 39396 - DNA, 1791 bp, Homo sapiens
gaattcgcggccgcgtcgacctcggttcgcactctcgctcccagtccaggcaaaatgaaagaccggctagcagaacttctggacttgtccaagcaatatgaccagcagttcccagacggggacgatgagtttgactcgccccacgaggacatcgtgttcgagacggaccacatcctggagtccctgtaccgagacatccgggacattcaggatgaaaaccagctgctggtggccgacgtgaagcggctgggaaagcagaacgcccgcttcctcacgtccatgcggcgcctcagcagcatcaagcgcgacaccaactccatcgccaaggccatcaaggcccggggcgaggtcatccactgcaagctgcgcgccatgaaggagctgagcgaggcggctgaggcccagcacggcccgcactcggcagtggcgcgcatttcgcgggcgcagtacaacgcgctcaccctcaccttccagcgcgccatgcacgactacaaccaggccgagatgaagcagcgcgacaactgcaagatccgcatccagcgccagctggagatcatgggcaaggaagtctcgggcgaccagatcgaggacatgttcgagcagggtaagtgggacgtgttttccgagaacttgctggccgacgtgaagggcgcgcgggccgccctcaacgagatcgagagccgccaccgcgaactgctgcgcctggagagccgcatccgcgacgtacacgagctcttcttgcagatggcggtgctggtggagaagcaggccgacaccctgaacgtcatcgagctcaacgtacaaaagacggtcgactacaccggccaggccaaggcgcaggtgcggaaggccgtgcagtacgaggagaagaacccctgccggaccctctgctgcttctgctgtccctgcctcaagtagcaggccggcccgggccgccaccgcccatcccagaccatggagcgcgctgggaaggacgcaccaaagccgggagctctgccctgcagggagttgccccaaccctttccggaactcagtctttagaaaagaaacgccaggttcaagaattgcaaaccagcctgtgcttggaaagatggttagttgataccgtccgatgattcttcagtaaagatagattcccacaaagttgtgcaatgtcattatatgacaccttgcactcttaccgtcttgacagaagccaagtaaggaactgaagttgtatctgactgtagggtgaatgtctgaggcctgcctcctaataaagactcaaggaggaagtcaattgggcatctgctaatagaatgaactcatgatggaaacttcagttcatttactttgtcctgaaaattccctggttctgttccattttgagcgaaattggccttgggaaaaaccacgttcttcctttccgattcttcatccggtctacgctatgcaattcctccccaaatatagatcttatttctgctcatttcccctacttattaaaatcacaccaaacacttactattttcttatctctttcactttttaaatatctttcaccaggttatattttggtattatttttccaaacatttttaagcactgaatatcgaacaagcactcaaattgaagtatcagtcatgttttgtgtatttttcgctgataaaaattatttaacatttatatttttacttgattacatatgcacatgtatgtaaatgtaaaatactaatattcactaatatatgtacataatgatcaattggtttaacttcttttatgtaagtatggtatataaatttcaagacg

SEQ ID NO: 39397 - DNA, 830 bp, Homo sapiens
ttgcggccgctgcccctcgtggtggtccctggcttgctgcagctgctattttgtgacagtaaggaagtggtgcatgccacggaggggctggattgggaagacaaagatgctccagggacgttggtcggcaacgtggtgcactcaaggatcatcagtcccctgcgcctgtttgttaaacagtctccggtgcccaagcccggccccatggcgtatgcagacagcatggaaaacttttgggattggctggccaacatcacggagattcaggagccattggcaagaactaaacggaggccaatagtaaaaacaggaaaatttaagaaaatgtttggatggggtgactttcattccaacattaaaactgtcaaactcaatctcctcatcacagggaaaattgttgaccatggaaatggaaccttcagtgtgtatttccgacataattcaacaggcctgggcaatgtttcagtgagcttggtaccaccctccaaggtggtggaatttgaagtttccccccagtctaccttggagaccaaggaatccaaatctttcaattgtcgcattgagtatgaaaaaacagatcgggcgaaaaagaccgccctgtgcaactttgacccatccaagatctgctaccaggagcagactcagagccatgtgtcttggttgtgctccaagcccttcaaggtcatttgcatttacattgccttttacagtgttgattataaactcgtgcaaaaggtgtgccctgactacaattaccatagtgagaccccatacttatcttctggctgatcttcctgctgtggtggaaatgagggatacatatgtatttg

SEQ ID NO: 39398 - DNA, 1399 bp, Homo sapiens
aatatgttttggaaggttaccgcagaaacagcagatgcggtaaaggaaaagattgtatttgatagatgaattgtgtttttgacattggacccttttttttatatttctatcttttcccccatccatctgtgctgttattgatatgagagaaaaaaaggtaaaatttgtttcaaaattcatgtgtgaagttacagtgccacagtggaaccaagttccttatcatctgagctacagttgcgtggaatgtgatttgagcacttagccctgtgttggtcaccattcttatgattccccctgagtttgaatactgatgtaatgggaaagcaaatctgagaataagtttgttgaacgataacaaaaatcatgatgtttttagactcttctgataaattcaaatgctgtggaattaatcaaaaaatgacaaaatttgtatgcatcctatagcttagagctttgttcaattcattcgatagtgtgattctttacacatgtgtagaacagctctgaagttgagtgaaagtgcttgtttcctagactagaatagaaaacaaaagtgggaagtagagggaggaaatttcaggattatggattcattatttctagcctcccagattaagttccccttgcatttagttaatatttgaataagagatcaaactctatgtggaaatagagagttatatttaaacatttctaattattaagtgctgacaaccaagatacctggcttaccagacttttgaaatgactttcaaattaatgtcacttcacagtcagtgcccttctcatcttccctgtgggggtgaatagcagtcctatatggtagaactgaatgatcattaaattagaacagaaacaggggtctggttggccaagaaaaaggcttctagaactcaggacgctcatggaatggtcactccttttacaatagatgttaacttctttctcccttcttatctgtaaaatattaattaaagtaaaacattaaattgaggactaaaggaagagaagtcctaaacaacaagaaatactcttaccacactgttcaaaaaaccaagagctctgttctctatcttcatttctttccttttaccggtaatatctgcagtgttcaatttttgtcttttgtaaaaattgtactaagcttagtgtgtggtagtacaggcttgaagttcttgctctgagttcaccacatgtttttgtaattttgtggttggtgattaatattttgaaacatctttttattttcacctagaaacaagagtaaaatattatttattgtaaaatatgtgggaatcatatatctatatatatatacttagaattttctgtgtacagagaaagtatgtgtacacattttatgtaaataaaaagaatttgctagatctgtcacattaat

SEQ ID NO: 39399 - DNA, 1508 bp, Homo sapiens
ttgcggccgctgcccctcgtggtggtccctggcttgctgcagctgctattttgtgacagtaaggaagtggtgcatgccacggaggggctggattgggaagacaaagatgctccagggacgttggtcggcaacgtggtgcactcaaggatcatcagtcccctgcgcctgtttgttaaacagtctccggtgcccaagcccggccccatggcgtatgcagacagcatggaaaacttttgggattggctggccaacatcacggagattcaggagccattggcaagaactaaacggaggccaatagtaaaaacaggaaaatttaagaaaatgtttggatggggtgactttcattccaacattaaaactgtcaaactcaatctcctcatcaccattcttatgattccccctgagtttgaatactgatgtaatgggaaagcaaatctgagaataagtttgttgaacgataacaaaaatcatgatgtttttagactcttctgataaattcaaatgctgtggaattaatcaaaaaatgacaaaatttgtatgcatcctatagcttagagctttgttcaattcattcgatagtgtgattctttacacatgtgtagaacagctctgaagttgagtgaaagtgcttgtttcctagactagaatagaaaacaaaagtgggaagtagagggaggaaatttcaggattatggattcattatttctagcctcccagattaagttccccttgcatttagttaatatttgaataagagatcaaactctatgtggaaatagagagttatatttaaacatttctaattattaagtgctgacaaccaagatacctggcttaccagacttttgaaatgactttcaaattaatgtcacttcacagtcagtgcccttctcatcttccctgtgggggtgaatagcagtcctatatggtagaactgaatgatcattaaattagaacagaaacaggggtctggttggccaagaaaaaggcttctagaactcaggacgctcatggaatggtcactccttttacaatagatgttaacttctttctcccttcttatctgtaaaatattaattaaagtaaaacattaaattgaggactaaaggaagagaagtcctaaacaacaagaaatactcttaccacactgttcaaaaaaccaagagctctgttctctatcttcatttctttccttttaccggtaatatctgcagtgttcaatttttgtcttttgtaaaaattgtactaagcttagtgtgtggtagtacaggcttgaagttcttgctctgagttcaccacatgtttttgtaattttgtggttggtgattaatattttgaaacatctttttattttcacctagaaacaagagtaaaatattatttattgtaaaatatgtgggaatcatatatctatatatatatacttagaattttctgtgtacagagaaagtatgtgtacacattttatgtaaataaaaagaatttgctagatctgtcacattaat

SEQ ID NO: 39400 - DNA, 738 bp, Homo sapiens
tttagacttcccaaagagtcattatgttgagtaaaaataatttagtcttttctttttgtttggcttaacttttcttccctcctaccctatatcttttgtcttccaagatattataactaggaagagttagcatatataattatgctattatctcagaccctgagataccctgtaggacagattcacaacagagtcatcatttccaggctaatagcagggggttcaccctattcagcattccacattttcctctgtaggcactcacattagttttatattttaggtagcaatatgtgtagtttagctttgtgcaaacatattaggagtagacattcagtgtactgtgtcctggttatctagattctaaagcttcattttataaaaatccagctctgtggggaaagaggggtgttttattaacatgcggcattaacactgctgggctctgtggataggttgacatagtgtcatcgtcacagaagataaaattcgaaggagcatttgtggagagcatgcagtggatattagaacaatatctcaggattttatggtggtttaatcattatccacccctatcctttcgttcacacagtcaacctatattttttaaaattcactacgtgccaggcactgtgttaactgctgtagtgactcaaatgtatgattgcatttatatgagatatccagaataagtaaatccatagagacagaaagcacgttggtcatttctaggggctg

SEQ ID NO: 39401 - DNA, 458 bp, Homo sapiens
gtcatagagcctctactatatttagtttgagaagaattagagtatgcatttcaagttgccataaattatattaagacaaaacatgttagtaaaagaagctaatcaaagtaaaaaaaaaaccagataaaaggtattttgcctattctgttatttttaatttctcttaaagatttgaatgcattgcaccatagactttggaaggacatgttttcccccaaagcctgaaaataatagatgattaagttttctatctaatattatgaaaactctaatttttaaatattctcttaaaattcatttaaactgtagtattttgtttattgcttcttattattcattgtttctttcttgccctggtattatatttgtattgactcacaatagcttatactcacagctgttcctgtcttgattactagtttaatattacaaaagtccattcattgaaaaggaaaaaa

SEQ ID NO: 39402 - DNA, 3525 bp, Homo sapiens
tttttccccctccccgggggccaagggctccggctgctgcctggcggccaacgggccaggtaggatttccgggagaggctgctgtggaggctgaggaggcggcggcggagatctggaaacagtatctcacctccctaaactggttaatagtggcatggaagatccatttgagatggggttttaccatgttacccaggctggtcttgaactcctggactcaagcaacccccgcttggcctcccaaagtgctgggattagaggcgtgagccactgcacctgacctaagaggaagcagaccagcccactacagagccaggcatggtcctggatagtgtggaagcaggagacacaacacctcctaccaaaaggaagagcaagttctcaggctttggcaagatcttcaagccctggaaatggaggaaaaaaaaagtagtgataaatttaaagagacttcagaagttttagaacggaaaatatctatgcgaaagccaagagaagagctggttaaaagaggggttctgttggaagaccctgagcaaggtggtgaggatccaggaaagccaagcgatgccatgttaaagaatggccataccacccccatagggaatgccagatcatctagtccagtccaagtagaggaagagccagtaagattagcaagtcttaggaaagctattccagaagaggacctaaagaaacgactaggctcaactggaagccagcctaattctgaagcagagtctgttcctgagaatgtacccaaaccacctttacttcctcccaaaagacccttgtcctcttctcatgaagcaagtgaagggcaagcaaaggatgccacttcctctggcggcacggcaaggttcatcatctccacctccatcaccacagcacccgctgccaccactgctgccacaagccttgcaaagactgttaatctctctgtcaccccttccccagcacccaggactctgcctgctgctcctgccagcactaacactactgctaccccaagcctcactcatatggtccctgccaagcagccccctatccctccccctaaaccagctcacagaaatagcaaccctgtcattgctgaactgtcccaagcaataaacagtggtacattgttatcaaaaccgtccccacccttaccacctaagagaggcattccatcaacctcagtacccaccttggagtctgctgctgccatcaccacaaaaacaccaagtgatgaaagagagaagagcacgtgttctatgggctcggaactactaccaatgatctcacctcgctctccgtcccccccactgcctactcatatacctccagagcctccacgcacccctccattccctgctaagacttttcaagttgtgccagaaattgagtttccaccatccttagatctacaccaggagattccccagcaggaagatcagaaaaaggaagtccccaagaggatactggaccagaactttggggagccccatataccctctaggctgcctccactcccactgcatattcgaatccagcaggccctcaccagcccacttcccatgactcctattctggagggttctcacagagctcattcgttgctttttgaaaacagtgacagcttttctgaggacagcagtacgctgggtcggaccaggtctcttcccatcactattgaaatgctaaaagttccagacgatgaagaagaagaggagcaaacctgtccatccacattcagtgaagaaatgacacctacctcagtcattcctaaattaccacagtgtctacgggaggaagaagagaaggagagcgactctgattcagaaggtcccattcagtaccgagatgaagaagatgaagatgaaagctatcagagtgctctcgccaacaaagtgaagaggaaagacacactggcaatgaagttgaaccacagacccagtgaaccagagttgaacctgaattcttggccttgtaaaagcaaggaggagtggaatgaaatacggcaccagattggaaacacactgatccggcgactgagtcaaagaccaacaccagaagaactagaacaacgcaatatattgcaacctaaaaatgaagctgatcgtcaggcagaaaaacgagaaattaaacgtcggctcactagaaagctcagtcaaaggccaactgtcgctgaactccttgccaggaagattctgaggtttaatgaatatgtagaggtaacagatgctcaagattatgaccggcgagccgacaaaccttggaccaaactgacccctgctgacaaggctgccataagaaaagaattaaatgaatttaaaagctccgagatggaggttcatgaagagagcaaacattttacacgctaccatcgtccatgatgccaaaggttgagagaggaatcaacatggctgctttgctgcttccttctccaaagtgacatatggagggaactttagcacttcccagcacagccagaattgcatcctctgggatcttctgaggtggacagcactttgaatgtagcatttcactggaacagagtcttatgtgctgcaccgggggcaaaacaacactttgtcagtgcttttgaacctttcaatattgtagcatgcttgaggagtttttcccttactggccaccaaagttctgaaccacttgcaggttccaggttttactggctgcaccacaccccttcccctagatgactgcctgtgcagagacacagtttgcaccattagccttacctgccctgccctgattgtgagacccaaatgtgtaggctctaaattccagccatcaaatccaattcctggtggggaaaaccttctggagacccccaaccttctgataaaagagtctctacctccagggaaagccttcttaccacactggcatatcagatgaaagcattgcactgtacctctcgtaacacagcaatacagtcctcttgaggcactcaagcctgagaggaagctcaggatctgacatgttcttccttttcctcacaagtcatcatgattttttattttaaaataatctggaagtaatgggaacttagtttttcctgaactccaaccagaatccaaattggttagatgaggccaggcgcggtggctcacgcctgtaatcccagcactttgggaggccgaggtgggtggatcacctgaggtcaggagttcaagaccagcctggccaacatggtgaaaccccatctctactaaaaatacaaaaattagccaggtgtggtggcgcctggttgaggcatgagaatcgcttgaacccaggaggtggaggttgcagtgagccaagatcatgcctactgcactccagcctgggcaacaaagtgggactctgtcttaaaaaaaaaaaaaaaaaaaaaatcggttagatgagaaagcatgtatattttctatatacaaaaacaagaaaggcgttttgagcccctgtgctcaggcccactcccacactgtggagtgtactttcattttcaataaatccccttattccttccttgcaaaaaaaaaa

SEQ ID NO: 39403 - DNA, 423 bp, Homo sapiens
aaaacaaaacctaggccagcatggtggttcacgcctataatctcagcactttgggaagccaaggcggtcaggagttcaagaccagcctggccaacatggtgaaaccccatctctactaaaaatacaaaaattagccaggtgtggtggcgcctggttgaggcatgagaatcgcttgaacccaggaggtggaggttgcagtgagccaagatcatgcctactgcactccagcctgggcaacaaagtgggactctgtcttaaaaaaaaaaaaaaaaaaaaaatcggttagatgagaaagcatgtatattttctatatacaaaaacaagaaaggcgttttgagcccctgtgctcaggcccactcccacactgtggagtgtactttcattttcaataaatccccttattccttccttgcaaaaaaaaaa

SEQ ID NO: 39404 - DNA, 240 bp, Homo sapiens
  misc_feature (39)..(39): n is a, c, g, or t
ggctgagcatgagaagtgggtaaagagaaaagacactgnatgcagcctgggcaacaaagtgggactctgtcttaaaaaaaaaaaaaaaaaaaaaatcggttagatgagaaagcatgtatattttctatatacaaaaacaagaaaggcgttttgagcccctgtgctcaggcccactcccacactgtggagtgtactttcattttcaataaatccccttattccttccttgcaaaaaaaaaa

SEQ ID NO: 39405 - DNA, 4048 bp, Homo sapiens
tttttccccctccccgggggccaagggctccggctgctgcctggcggccaacgggccaggtaggatttccgggagaggctgctgtggaggctgaggaggcggcggcggagatctggaaacagtatctcacctccctaaactggttaatagtggcatggaagatccatttgagatggggttttaccatgttacccaggctggtcttgaactcctggactcaagcaacccccgcttggcctcccaaagtgctgggattagaggcgtgagccactgcacctgacctaagaggaagcagaccagcccactacagagccaggcatggtcctggatagtgtggaagcaggagacacaacacctcctaccaaaaggaagagcaagttctcaggctttggcaagatcttcaagccctggaaatggaggaaaaaaaaagtagtgataaatttaaagagacttcagaagttttagaacggaaaatatctatgcgaaagccaagagaagagctggttaaaagaggggttctgttggaagaccctgagcaaggtggtgaggatccaggaaagccaagcgatgccatgttaaagaatggccataccacccccatagggaatgccagatcatctagtccagtccaagtagaggaagagccagtaagattagcaagtcttaggaaagctattccagaagaggacctaaagaaacgactaggctcaactggaagccagcctaattctgaagcagagtctgttcctgagaatgtacccaaaccacctttacttcctcccaaaagacccttgtcctcttctcatgaagcaagtgaagggcaagcaaaggatgccacttcctctggcggcacggcaaggttcatcatctccacctccatcaccacagcacccgctgccaccactgctgccacaagccttgcaaagactgttaatctctctgtcaccccttccccagcacccaggactctgcctgctgctcctgccagcactaacactactgctaccccaagcctcactcatatggtccctgccaagcagccccctatccctccccctaaaccagctcacagaaatagcaaccctgtcattgctgaactgtcccaagcaataaacagtggtacattgttatcaaaaccgtccccacccttaccacctaagagaggcattccatcaacctcagtacccaccttggagtctgctgctgccatcaccacaaaaacaccaagtgatgaaagagagaagagcacgtgttctatgggctcggaactactaccaatgatctcacctcgctctccgtcccccccactgcctactcatatacctccagagcctccacgcacccctccattccctgctaagacttttcaagttgtgccagaaattgagtttccaccatccttagatctacaccaggagattccccagcaggaagatcagaaaaaggaagtccccaagaggatactggaccagaactttggggagccccatataccctctaggctgcctccactcccactgcatattcgaatccagcaggccctcaccagcccacttcccatgactcctattctggagggttctcacagagctcattcgttgctttttgaaaacagtgacagcttttctgaggacagcagtacgctgggtcggaccaggtctcttcccatcactattgaaatgctaaaagttccagacgatgaagaagaagaggagcaaacctgtccatccacattcagtgaagaaatgacacctacctcagtcattcctaaattaccacagtgtctacgggaggaagaagagaaggagagcgactctgattcagaaggtcccattcagtaccgagatgaagaagatgaagatgaaagctatcagagtgctctcgccaacaaagtgaagaggaaagacacactggcaatgaagttgaaccacagacccagtgaaccagagttgaacctgaattcttggccttgtaaaagcaaggaggagtggaatgaaatacggcaccagattggaaacacactgatccggcgactgagtcaaagaccaacaccagaagaactagaacaacgcaatatattgcaacctaaaaatgaagctgatcgtcaggcagaaaaacgagaaattaaacgtcggctcactagaaagctcagtcaaaggccaactgtcgctgaactccttgccaggaagattctgaggtttaatgaatatgtagaggtaacagatgctcaagattatgaccggcgagccgacaaaccttggaccaaactgacccctgctgacaaggctgccataagaaaagaattaaatgaatttaaaagctccgagatggaggttcatgaagagagcaaacattttacacgctaccatcgtccatgatgccaaaggttgagagaggaatcaacatggctgctttgctgcttccttctccaaagtgacatatggagggaactttagcacttcccagcacagccagaattgcatcctctgggatcttctgaggtggacagcactttgaatgtagcatttcactggaacagagtcttatgtgctgcaccgggggcaaaacaacactttgtcagtgcttttgaacctttcaatattgtagcatgcttgaggagtttttcccttactggccaccaaagttctgaaccacttgcaggttccaggttttactggctgcaccacaccccttcccctagatgactgcctgtgcagagacacagtttgcaccattagccttacctgccctgccctgattgtgagacccaaatgtgtaggctctaaattccagccatcaaatccaattcctggtggggaaaaccttctggagacccccaaccttctgataaaagagtctctacctccagggaaagccttcttaccacactggcatatcagatgaaagcattgcactgtacctctcgtaacacagcaatacagtcctcttgaggcactcaagcctgagaggaagctcaggatctgacatgttcttccttttcctcacaagtcatcatgattttttattttaaaataatctggaagtaatgggaacttagtttttcctgaactccaaccagaatccaaattggttagatgagccaccgtgccgagccttccttgaagttttttgtttggttttgatttgttttgttttgttttgttttgttttgttttgtttttggagatggggtctcactctgttgcccatgctggagtgcagtggcacaatcttggctcagagcaacctctgcctcccaggctcaagcaatcctcccacttcagtctaagtagctgggactacaggcacgtgccgccaggcccagctaatttttgtgttttgttagagatgaggttttgccatattgcccaggctcgtcttgaacaccggggctcaaggaatctgcccatcttcgcctcccaaagttctgagatagcaggtgtgagtcatcatgcccagcctccttgaagtttactaacaattgggataactgagggaagagaagtgacaattccactcagtctattagaggtctggatataaggtagccacacaataactctaacttgacttctaaccattctatcttattgatttggaggctgtcttctgccagattttttgtggcttgagatgatattttcgaacccttctttcactacctttcttacccttaatgtgccaagcttgaaacaggatttgatttcctgagctacttgttcgccttctgtgcgtcaccaagtaatctggttcatctttcatctcattcatgttattttcaagtgaaacaagacattttgggggtcaagtctctttgggtgttttgtttttatgtatataaaaatggattttgtgttccctttccatgtaagtaccaacttatatggaaactcacaatcataatgtaaagaagaaatgaaagcctggtgtattgtacttcaagatgcctccctgatgtatagaatctccttgtaaaataaataattgcattgtatatcagtcttcccatcaatattaattattaaatattttagaatttttaaatacc

SEQ ID NO: 39406 - DNA, 4049 bp, Homo sapiens
tttttccccctccccgggggccaagggctccggctgctgcctggcggccaacgggccaggtaggatttccgggagaggctgctgtggaggctgaggaggcggcggcggagatctggaaacagtatctcacctccctaaactggttaatagtggcatggaagatccatttgagatggggttttaccatgttacccaggctggtcttgaactcctggactcaagcaacccccgcttggcctcccaaagtgctgggattagaggcgtgagccactgcacctgacctaagaggaagcagaccagcccactacagagccaggcatggtcctggatagtgtggaagcaggagacacaacacctcctaccaaaaggaagagcaagttctcaggctttggcaagatcttcaagccctggaaatggaggaaaaaaaaagtagtgataaatttaaagagacttcagaagttttagaacggaaaatatctatgcgaaagccaagagaagagctggttaaaagaggggttctgttggaagaccctgagcaaggtggtgaggatccaggaaagccaagcgatgccatgttaaagaatggccataccacccccatagggaatgccagatcatctagtccagtccaagtagaggaagagccagtaagattagcaagtcttaggaaagctattccagaagaggacctaaagaaacgactaggctcaactggaagccagcctaattctgaagcagagtctgttcctgagaatgtacccaaaccacctttacttcctcccaaaagacccttgtcctcttctcatgaagcaagtgaagggcaagcaaaggatgccacttcctctggcggcacggcaaggttcatcatctccacctccatcaccacagcacccgctgccaccactgctgccacaagccttgcaaagactgttaatctctctgtcaccccttccccagcacccaggactctgcctgctgctcctgccagcactaacactactgctaccccaagcctcactcatatggtccctgccaagcagccccctatccctccccctaaaccagctcacagaaatagcaaccctgtcattgctgaactgtcccaagcaataaacagtggtacattgttatcaaaaccgtccccacccttaccacctaagagaggcattccatcaacctcagtacccaccttggagtctgctgctgccatcaccacaaaaacaccaagtgatgaaagagagaagagcacgtgttctatgggctcggaactactaccaatgatctcacctcgctctccgtcccccccactgcctactcatatacctccagagcctccacgcacccctccattccctgctaagacttttcaagttgtgccagaaattgagtttccaccatccttagatctacaccaggagattccccagcaggaagatcagaaaaaggaagtccccaagaggatactggaccagaactttggggagccccatataccctctaggctgcctccactcccactgcatattcgaatccagcaggccctcaccagcccacttcccatgactcctattctggagggttctcacagagctcattcgttgctttttgaaaacagtgacagcttttctgaggacagcagtacgctgggtcggaccaggtctcttcccatcactattgaaatgctaaaagttccagacgatgaagaagaagaggagcaaacctgtccatccacattcagtgaagaaatgacacctacctcagtcattcctaaattaccacagtgtctacgggaggaagaagagaaggagagcgactctgattcagaaggtcccattcagtaccgagatgaagaagatgaagatgaaagctatcagagtgctctcgccaacaaagtgaagaggaaagacacactggcaatgaagttgaaccacagacccagtgaaccagagttgaacctgaattcttggccttgtaaaagcaaggaggagtggaatgaaatacggcaccagattggaaacacactgatccggcgactgagtcaaagaccaacaccagaagaactagaacaacgcaatatattgcaacctaaaaatgaagctgatcgtcaggcagaaaaacgagaaattaaacgtcggctcactagaaagctcagtcaaaggccaactgtcgctgaactccttgccaggaagattctgaggtttaatgaatatgtagaggtaacagatgctcaagattatgaccggcgagccgacaaaccttggaccaaactgacccctgctgacaaggctgccataagaaaagaattaaatgaatttaaaagctccgagatggaggttcatgaagagagcaaacattttacacgctaccatcgtccatgatgccaaaggttgagagaggaatcaacatggctgctttgctgcttccttctccaaagtgacatatggagggaactttagcacttcccagcacagccagaattgcatcctctgggatcttctgaggtggacagcactttgaatgtagcatttcactggaacagagtcttatgtgctgcaccgggggcaaaacaacactttgtcagtgcttttgaacctttcaatattgtagcatgcttgaggagtttttcccttactggccaccaaagttctgaaccacttgcaggttccaggttttactggctgcaccacaccccttcccctagatgactgcctgtgcagagacacagtttgcaccattagccttacctgccctgccctgattgtgagacccaaatgtgtaggctctaaattccagccatcaaatccaattcctggtggggaaaaccttctggagacccccaaccttctgataaaagagtctctacctccagggaaagccttcttaccacactggcatatcagatgaaagcattgcactgtacctctcgtaacacagcaatacagtcctcttgaggcactcaagcctgagaggaagctcaggatctgacatgttcttccttttcctcacaagtcatcatgattttttattttaaaattggttagatgaggccaggcgcggtggctcacctcagcctcccaaagtggtgggattacaggcatgagccaccgtgccgagccttccttgaagttttttgtttggttttgatttgttttgttttgttttgttttgttttgttttgtttttggagatggggtctcactctgttgcccatgctggagtgcagtggcacaatcttggctcagagcaacctctgcctcccaggctcaagcaatcctcccacttcagtctaagtagctgggactacaggcacgtgccgccaggcccagctaatttttgtgttttgttagagatgaggttttgccatattgcccaggctcgtcttgaacaccggggctcaaggaatctgcccatcttcgcctcccaaagttctgagatagcaggtgtgagtcatcatgcccagcctccttgaagtttactaacaattgggataactgagggaagagaagtgacaattccactcagtctattagaggtctggatataaggtagccacacaataactctaacttgacttctaaccattctatcttattgatttggaggctgtcttctgccagattttttgtggcttgagatgatattttcgaacccttctttcactacctttcttacccttaatgtgccaagcttgaaacaggatttgatttcctgagctacttgttcgccttctgtgcgtcaccaagtaatctggttcatctttcatctcattcatgttattttcaagtgaaacaagacattttgggggtcaagtctctttgggtgttttgtttttatgtatataaaaatggattttgtgttccctttccatgtaagtaccaacttatatggaaactcacaatcataatgtaaagaagaaatgaaagcctggtgtattgtacttcaagatgcctccctgatgtatagaatctccttgtaaaataaataattgcattgtatatcagtcttcccatcaatattaattattaaatattttagaatttttaaatacc

SEQ ID NO: 39407 - DNA, 420 bp, Homo sapiens
gtttgaaaatttgttgatttcttacttatataggggctaatatatactgtgaccaaaaaaatctttataaacaagattgggaggtttaacataaacattacctttatttatctcatttttaggcgactgagtcaaagaccaacaccagaagaactagaacaacgcaatatattgcaacgtgagtccagttatggaaataaagttgtatagattttctttgtatgtttctgactttaatatacataaaagaaaaaagaagcgtttgctacaagggctaagggagagtgttccagccaggcaaggactatttatttccccatgaaggaacagagcttaccaagcttcctttggaagatgctattatggtattgtttagtgtgctgtgatactctagaaagctttgtttcagtgttctcactg

SEQ ID NO: 39408 - DNA, 2988 bp, Homo sapiens
tttttccccctccccgggggccaagggctccggctgctgcctggcggccaacgggccaggtaggatttccgggagaggctgctgtggaggctgaggaggcggcggcggagatctggaaacagtatctcacctccctaaactggttaatagtggcatggaagatccatttgagatggggttttaccatgttacccaggctggtcttgaactcctggactcaagcaacccccgcttggcctcccaaagtgctgggattagaggcgtgagccactgcacctgacctaagaggaagcagaccagcccactacagagccaggcatggtcctggatagtgtggaagcaggagacacaacacctcctaccaaaaggaagagcaagttctcaggctttggcaagatcttcaagccctggaaatggaggaaaaaaaaagtagtgataaatttaaagagacttcagaagttttagaacggaaaatatctatgcgaaagccaagagaagagctggttaaaagaggggttctgttggaagaccctgagcaaggtggtgaggatccaggaaagccaagcgatgccatgttaaagaatggccataccacccccatagggaatgccagatcatctagtccagtccaagtagaggaagagccagtaagattagcaagtcttaggaaagctattccagaagaggacctaaagaaacgactaggctcaactggaagccagcctaattctgaagcagagtctgttcctgagaatgtacccaaaccacctttacttcctcccaaaagacccttgtcctcttctcatgaagcaagtgaagggcaagcaaaggatgccacttcctctggcggcacggcaaggttcatcatctccacctccatcaccacagcacccgctgccaccactgctgccacaagccttgcaaagactgttaatctctctgtcaccccttccccagcacccaggactctgcctgctgctcctgccagcactaacactactgctaccccaagcctcactcatatggtccctgccaagcagccccctatccctccccctaaaccagctcacagaaatagcaaccctgtcattgctgaactgtcccaagcaataaacagtggtacattgttatcaaaaccgtccccacccttaccacctaagagaggcattccatcaacctcagtacccaccttggagtctgctgctgccatcaccacaaaaacaccaagtgatgaaagagagaagagcacgtgttctatgggctcggaactactaccaatgatctcacctcgctctccgtcccccccactgcctactcatatacctccagagcctccacgcacccctccattccctgctaagacttttcaagttgtgccagaaattgagtttccaccatccttagatctacaccaggagattccccagcaggaagatcagaaaaaggaagtccccaagaggatactggaccagaactttggggagccccatataccctctaggctgcctccactcccactgcatattcgaatccagcaggccctcaccagcccacttcccatgactcctattctggagggttctcacagagctcattcgttgctttttgaaaacagtgacagcttttctgaggacagcagtacgctgggtcggaccaggtctcttcccatcactattgaaatgctaaaagttccagacgatgaagaagaagaggagcaaacctgtccatccacattcagtgaagaaatgacacctacctcagtcattcctaaattaccacagtgtctacgggaggaagaagagaaggagagcgactctgattcagaaggtcccattcagtaccgagatgaagaagatgaagatgaaagctatcagagtgctctcgccaacaaagtgaagaggaaagacacactggcaatgaagttgaaccacagacccagtgaaccagagttgaacctgaattcttggccttgtaaaagcaaggaggagtggaatgaaatacggcaccagattggaaacacactgatccggcgactgagtcaaagaccaacaccagaagaactagaacaacgcaatatattgcaacctaaaaatgaagctgatcgtcaggcagaaaaacgagaaattaaacgtcggctcactagaaagctcagtcaaaggccaactgtcgctgaactccttgccaggaagattctgaggtttaatgaatatgtagaggtaacagatgctcaagattatgaccggcgagccgacaaaccttggaccaaactgacccctgctgacaaggctgccataagaaaagaattaaatgaatttaaaagctccgagatggaggttcatgaagagagcaaacattttacacgctaccatcgtccatgatgccaaaggttgagagaggaatcaacatggctgctttgctgcttccttctccaaagtgacatatggagggaactttagcacttcccagcacagccagaattgcatcctctgggatcttctgaggtggacagcactttgaatgtagcatttcactggaacagagtcttatgtgctgcaccgggggcaaaacaacactttgtcagtgcttttgaacctttcaatattgtagcatgcttgaggagtttttcccttactggccaccaaagttctgaaccacttgcaggttccaggttttactggctgcaccacaccccttcccctagatgactgcctgtgcagagacacagtttgcaccattagccttacctgccctgccctgattgtgagacccaaatgtgtaggctctaaattccagcctgggcaacaaagtgggactctgtcttaaaaaaaaaaaaaaaaaaaaaatcggttagatgagaaagcatgtatattttctatatacaaaaacaagaaaggcgttttgagcccctgtgctcaggcccactcccacactgtggagtgtactttcattttcaataaatccccttattccttccttgcaaaaaaaaaa

SEQ ID NO: 39409 - DNA, 2158 bp, Homo sapiens
cccacaggacatgttttccattcctgcacgaaaaatctctaaaacccagtgaaccagagttgaacctgaattcttggccttgtaaaagcaaggaggagtggaatgaaatacggcaccagattggaaacacactgatccggcgactgagtcaaagaccaacaccagaagaactagaacaacgcaatatattgcaacctaaaaatgaagctgatcgtcaggcagaaaaacgagaaattaaacgtcggctcactagaaagctcagtcaaaggccaactgtcgctgaactccttgccaggaagattctgaggtttaatgaatatgtagaggtaacagatgctcaagattatgaccggcgagccgacaaaccttggaccaaactgacccctgctgacaaggctgccataagaaaagaattaaatgaatttaaaagctccgagatggaggttcatgaagagagcaaacattttacacgctaccatcgtccatgatgccaaaggttgagagaggaatcaacatggctgctttgctgcttccttctccaaagtgacatatggagggaactttagcacttcccagcacagccagaattgcatcctctgggatcttctgaggtggacagcactttgaatgtagcatttcactggaacagagtcttatgtgctgcaccgggggcaaaacaacactttgtcagtgcttttgaacctttcaatattgtagcatgcttgaggagtttttcccttactggccaccaaagttctgaaccacttgcaggttccaggttttactggctgcaccacaccccttcccctagatgactgcctgtgcagagacacagtttgcaccattagccttacctgccctgccctgattgtgagacccaaatgtgtaggctctaaattccagccatcaaatccaattcctggtggggaaaaccttctggagacccccaaccttctgataaaagagtctctacctccagggaaagccttcttaccacactggcatatcagatgaaagcattgcactgtacctctcgtaacacagcaatacagtcctcttgaggcactcaagcctgagaggaagctcaggatctgacatgttcttccttttcctcacaagtcatcatgattttttattttaaaataatctggaagtaatgggaacttagtttttcctgaactccaaccagaatccaaattggttagatgagccaccgtgccgagccttccttgaagttttttgtttggttttgatttgttttgttttgttttgttttgttttgttttgtttttggagatggggtctcactctgttgcccatgctggagtgcagtggcacaatcttggctcagagcaacctctgcctcccaggctcaagcaatcctcccacttcagtctaagtagctgggactacaggcacgtgccgccaggcccagctaatttttgtgttttgttagagatgaggttttgccatattgcccaggctcgtcttgaacaccggggctcaaggaatctgcccatcttcgcctcccaaagttctgagatagcaggtgtgagtcatcatgcccagcctccttgaagtttactaacaattgggataactgagggaagagaagtgacaattccactcagtctattagaggtctggatataaggtagccacacaataactctaacttgacttctaaccattctatcttattgatttggaggctgtcttctgccagattttttgtggcttgagatgatattttcgaacccttctttcactacctttcttacccttaatgtgccaagcttgaaacaggatttgatttcctgagctacttgttcgccttctgtgcgtcaccaagtaatctggttcatctttcatctcattcatgttattttcaagtgaaacaagacattttgggggtcaagtctctttgggtgttttgtttttatgtatataaaaatggattttgtgttccctttccatgtaagtaccaacttatatggaaactcacaatcataatgtaaagaagaaatgaaagcctggtgtattgtacttcaagatgcctccctgatgtatagaatctccttgtaaaataaataattgcattgtatatcagtcttcccatcaatattaattattaaatattttagaatttttaaatacc

SEQ ID NO: 39410 - DNA, 353 bp, Homo sapiens
tcaaaggaggagaagtgatcacactttatgcaacagcctggttagtttgatgtataacttttcaatacttggacatgcagcctgtgcatgccttttatagactcttgctctgggctccgcaatgtcaggggtggcttgggtcatgaggatatcagaattttcttgtggtcgatgatgttttaattttctttactattgttataagtggttttttattacaaaaattagaaattaggtcataaaatgaccaaaatgacaggtttcctttggggggcacagcatggcaatccccagcccacatccccgtcagctcatgcctgggcccccggagtcgccacattgccaggcgccct

SEQ ID NO: 39411 - DNA, 780 bp, Homo sapiens
tgacagggtcttgctctgtcacccaggctggagtgcagtggtgccatctcagctcactgtaacctctgcctcctgggttcaagtaattctcctgtctcagcctcctgagtagctgagacaggcaagagaattgcttgggcacgggaggcggaggctgcagtgagctgagatcacgccactgtactccagcatgggcaacagagcaagactccatctcaaaaataaataaataaataaaagcgtaataggctccaaaactgttccaaattactcctaggctttttccccctaaaaattatgtgcattaggagaaaatgggaggaaaaatgaaatttctctatcttttctcattgatgaaaggttagagattgtgttgttgtaaaatacccttttgctctgggccccaagccaaaaataaagggaggaaaccaggcaattagatgtttgatttgatgaaaacttttccttaaaaaggcgaagaatttctgttacatgattttatacaagattatgacaaaggcattttcaaagaaaacatttctatctaattaaaatccattgatcacacatgctcctattaggttaaggataactccttggccttcctccctcaagagctttctggatttcttcagtaattacattaaaaagaatcgaagaagcccaggcgtggtggctcacgcctgtaatgccagcactttgggaggccgaggtgggcagatcacaaggtaaggagatcgagaccatcctggctaacatggtgaaaccccgtctctactc

SEQ ID NO: 39412 - DNA, 1150 bp, Homo sapiens
ggtcgacagccttctgagtaggactacaggtgcacacgagcatgtccagctaattaaaaaaaaattttttttagagattgggtcttactgtgttgctcagcctggtcttgaactcctggccttgagaagtcttcctgcatcagcctcccatagtgctgggattacaggtgtgagccactgtgcctggcctcttcttttgatccctcatccctattctcattcctctccctgtgtcagtatatgtttggatatgtatgtatctttgaaaatatatgtaattatgtgcctatgtgttttaatatatataaatggtatacttttatggtaagccaacttctgtaatgaattgctcccatatttcagtgatttaacaccacagatttatttttaacttattctacatggcacgggtgtttctggttggacagctctcctccactgtccactccagctcccaggcttcttttattttcagatggtgatagcctcatcccagcatcataaagtttccggtcaatttttcaccaagttgttttactatccgttgattatcattttatgaattgcttgtttcactagggattacagaatggtgattttctaaggctattaatttttcctcatttattagctctaattctgtacagaaaacctttttcacatcctctaggaccatttgattactccgaaataaaattcataccagaatggcaagataaatgcttaaatctcttcccttaccgttttcaaagtagttatgtcctaacaacttctaatggtgttcaatgatttttttgtttcactctctttttaaatgatctcaaacaacctgtagttcttatgcatttaatgtcgtttaatcatttgccattattttttgctttatattatataaagtatcaagcatatacaaaaatagagaaaatagtgtaatgaattcccagggacccagcttcaataattatcaattcatggccaatcttggtttatttattccctcaactactttccccctaaccaagattattttgaagcaaaaccagatatcataccaatttaatctgtaaatgttttagcatgtatctctaaaagataaggatttttattaccattattgcacctaaaaagttaataaattgtcagtataata

SEQ ID NO: 39413 - DNA, 382 bp, Homo sapiens
  misc_feature (91)..(91): n is a, c, g, or t
aaaaaaaaaaaaaaaagttaaagagaactgaagcttcaagaaattaagaaatttgtccaagtcacacaagcaagtgtatggcagagcaggnacataaaccctgcttatatgattccaaaaactttatccttaagtaataatagatgctgtaaattataaacattgagttaaatgaagtaatgaaggataagttactcagcgtttgttttgtaaagtctctcaaggaaaaaattaatctaagttggaggcactgatggcagctgctgcattcatgagactgtagcagtaatctaggagatgaacatagagggtggatttaggatattataaagtagtaaaatcaatagaactggatgatagattatgtgacgcctgaagtgga

SEQ ID NO: 39414 - DNA, 438 bp, Homo sapiens
gcttgacatgaactggaccatgctttcctggtgaacagggttactttgtccttcactttctgtgatgacacccagaaggttctcctttgtatcttgttcccttgtaataagcacatctgtgcaggtccccaaaccttctacagtaatttcctattgctgctgtaagaaatcacacacttactagctcaaaagaacacaaatttactacattagagttctataggtcagaaatctcaatggaccaaaaccacgctgtctgccaagagactctagtttcttgcctgttctgtctcctggaggctgctcaaattccttggcctgtggatcactttgacctctgcttacatcatcacatcttctgtgaccctcttgcctccctcttgtaaggacccttgtgattatattggctcacctagataatcaaaggcattgatcaac

SEQ ID NO: 39415 - DNA, 415 bp, Homo sapiens
tgtcagtgggtggcggtcacctagtttttgaggagatgcaacaaataagaccccctgtccctgcatttcccggaagtgagttctgaatgaactgagaaatgaagcaagagtcaagcagaaggggccagacagcgcctttgtcacccgcagagctgggattgcaggcgagccagcgtcctgatactgcccaggccatggccgatgcactgcccatgcaggcagcattaacacggtccagcctgtggctggagggcaggaggaggagcacacccacgggggcagcccagcgctccgccctctcctcccagactccccatgaccctgctcatgcctctcccaggcaggagcatccctctgcagaggtcctgtacgctcacagcacatgttccgtgttatttggggattgaagattctc

SEQ ID NO: 39416 - DNA, 336 bp, Homo sapiens
ttttttaaataaggtaacattaacaggggccaagtattaggacatggacacatcctttttggggccaactttcgaccaactataagaggtgtcactattataatataaatgcagattttgtagtattttaataacaactaaggaattgagaggagtatgtcttgattagagtttccatgtctagatctctattctttaaaagaataaacttttacaaaatgctagttcccctagaaacccccctcaaacctttggcctattagaatttcagagcaagaggggcatgtgatgcaaaggcacatgtactttgaaaatgccctccaagtgaacatgata

SEQ ID NO: 39417 - DNA, 368 bp, Homo sapiens
ttttttaaacttctctatattaggaactttgttttccttatccaaatgcagtctctaagggatcagtgggatttgagtgctaagttaaatgtctagtaaaaaattaaacaaaagaattcaagcaatcaaaatgatgcctgcatttgctgcctacagaaatgtaggctgcattgcatgtgtaaatggcaagaaaatttgggcgttagctaaccctttatatactgcttttctcaaactcatccaaacatgacagcttgtaaaaccgtttatatatttaaggtgtattagaccaagcctaggcacatgtaccagcctgtccatttgaagaggagtttaaggcagaacataccctttctaatttcattagt

SEQ ID NO: 39418 - DNA, 274 bp, Homo sapiens
cccatcatgtttctttacttgaattgactatttttccctttgtaattaataagtgtcttgcagcagctttccagaggctgtgtaaatatccttagtataggaccttttggtcatggaagctatgcagcccaagagtccaatcagaagtgatggaagaccaggtgtggtggctcatgcctgtaatcccaatgctttaggaggctgaggcgagaggatcgcttgaggtcgggagttcaagatcagcctgggcaatatagtaagacacccctctcta

SEQ ID NO: 39419 - DNA, 217 bp, Homo sapiens
cagaccaggaaccatgagaactgtactatgtgttggagcaaatcctttctgatatttcagatttctggttctgttggaacaagacacattctgagaaaagcttggtctactggtactggggcagaggatctgagcaacagagacggggcagcaccaagcctgacaatgcggaccaagtcaaacgaaacacagaccaccgagactattctttcagacg

SEQ ID NO: 39420 - DNA, 529 bp, Homo sapiens
tggcactggaaacacagtgggcgagtgactctgtggatgactccccaaaaaccaagcacctggtttgagttcagagctctcaaacatctgatgccagctcttcacattgtagatgaagcaaataccaggctcaaggtcaagtatacgatgcattactaaacccaagagtccccttggggagtagaaggaacaattctccccacctctgcaagatctccccaagacactctcaggctgtggcaggcagtcactgatgggtccagatgtggctggagcaggggggctctgggctccttgctagtcaggtctttgttagcagtggcccaggggtactgatgactcctgggagcttccgccaggaagctcatggggaagcacagacattctggggtacgaagccttggtggtcagacagggcttgtttcctgcagggcacttcctcagtcatgaatgagagtgtcatttcaccactctcttccgccataatggcttcatccagctcttgggacagcttctggagatgccgaat

SEQ ID NO: 39421 - DNA, 373 bp, Homo sapiens
tttttttttttttgagacagagtttcactctttgttgcccaggctggagtgcagtggcacaatcccagctcactgcaacctccacctcctgggttcaaatgattctcccgtctcagcctcccaagtagctgagattacaggcatgcaccaccacacccagctgacttttgtatttttagtagctggtctcaaactcctgacctcaggtgattcacccgccttggactcccaaagtgctgggattacaggcgtgagccaccacacctggccaaaaaataataataatttgttttaaaagaaggaaataacaagaagcctagcacaatacctggtggagtacaagtgctaggctgaataaactactgtaattata

SEQ ID NO: 39422 - DNA, 863 bp, Homo sapiens
actccagagcctcagatctccaaactcttatctagccccaaagtacaggtctgaccacaggagggagcagcaccgcggctccagcatgccccaggcccggagcctgtgcctccctgtctcagtgcggggtgggcgcgttgagctgctttttttggagcaacttatttcgagaattattttaatccttaaattccatatttcttcagcttccctttgaaaaaaaaaagggaaatttgtgtttttaaaaagtgttagttagtatttttgtcctttccaaaacatattcacttgtgcttactgttgtgagacacacatgtatttttctagttcccatctattattccttgctgtctgtttctgacctgaaaagcagcttccagtgaagagctatcactagaggaacaggacttggctgaatgaattaggttttattgagtttttaatttaatgtgggtaaagcaggctcaggagggctgaaatggacgaaacaatggcacaactttattacttttctccagggtatggattataggggatattttagagtaaagaaacactaagattcttggcattaaaatgcttcgatttcctatttatagcagtgatgcatatataatttttcatattggactgttattaaggtttttctgattgaaatctccgtacggtttcttctggccagtagacttcctccatccccagatgtgaccccttttaaactaataaagcctcttgataatacttacaatacttgtcacagagggcaggactgacattcacttagtgaagggcttgtattataccaggctttgctctatgtaagttttatattttcaggaatattcttaaatcccttaaagaaa

SEQ ID NO: 39423 - DNA, 394 bp, Homo sapiens
ctttaatttataaatataatgcacaaaattagtagatttcctaattgtgaattattcctgtgtgaattctggaagtaaatcctacttatttttgctaacattttgttcaggattttcactcctcacatgtggggccgctttacagtttcctgcttgtatgctgtcagcgtttgcagccagcctttcactaagcattgcaggaccagcctgtggggagtttccggaatcttccatgccctggagctttgataacacaggaagtgtttgttccttgaaaggttactagaagccttccataacatcttccaatactggtgcatttagggaaaacagatttttgacattttcaatttcttgcatgatgaaaccagtacaatgcatagctttcttgcaa

SEQ ID NO: 39424 - DNA, 1285 bp, Homo sapiens
taggcaggcactgcccaacaccatagggggtgctgcgggcctgtaggcttggttggcccaattactgccctaatgccatcggacagtgcccaccagggactctctgtcttgccaaggaaggccttaggcactgggctttagacatttcaaagtgagttctcattcacttgtgtctccgatcacactagagtccccatttcacagacaaactgcccagagtttgtcataggtcacacagcaaaccagcaactaagccccctggtcccctaatctgccccagaaaggtagtttctcagctgttctgagcttgacagcatgaacatcctcaggagccacaggcaaagtgggctgaggcttggcattcccctcgaggtcatctggccattctgaacgcccctcctcagcctgcttcctccggctgagccatgtgcccccggaacccctctgaactctgttgccgatccctccctccatctgcgccttcagtgaagcagtttcttaaaggaggggtccttggtaccgtggagggacaggacatctctgggaattcgtacccagctgcgttcgtgctgagttcttcatgacccactccttccagcgtcagctggtggatccagggctgggtactgagccgtactggaccagtgggccccctcccgggatcgctggacttggagcagaagagtccctccagggctgaagattggacacagaaaacttgggaactgtcaactgccctgttattcacctcgtgaaaaaagctggatttctaatgagagcgaatggaggtgacaattcccagaaactggaattgggatggtgagattttagttcagccgccggcggtctcatgcgtggaggtgataaagttgagctttgaggtggtcttcagagggagaggaataccctctgcgggcagagcttcctgggttccgggcccttccggacgtcaacacaggtccaaatgcccttgggctcctccgcacaccctgggtgcaagaataaatccttctctctgccgccattagcctgactggcttcggttacttcgcacaaaaagcccttgccgggtatccactcgccgctcgcagccctcgctctagctccagctcctgttccttttcctgcccaccccgcccagtgaggagatcagcaccccttgtctgtctctgtgtctgtcggggttcgtgcctcactgtgtccaagcccggcttctatccctagtcccttcctgttcgcgccactcctgcttgctttcttctccccttccctccagcggtggttc

SEQ ID NO: 39425 - DNA, 248 bp, Homo sapiens
aagtctgaactttgagtttgggggctggccatctagatctaaagaaagcctccaggcacagtgggactctcaggactccacctagacccagcctctctcttaggacttacaaagctcttcctttgagacaatttcaaaatgttttggtgcatttttcctggatggcattttaacttgacactgagatattagaggtgggggctgtgtaatatctgccatgttattctctacccctagcttcttgtgca

SEQ ID NO: 39426 - DNA, 362 bp, Homo sapiens
ttctggataaaccgtttaaaaagaatgttttggggttagcagtttgcatatttacatttagaatactaattaaacagtaccctacaggatataactcatagagagagcaacagaaagacatgtaaataactactaaacacactcaggatatattaataaaaaagctttctaaattatttaaggtaccaagaaagaagctggacaaaaattacggctgggtgcagtggctcacgcctgtgatcccagtactttgagaggccaaggcgggtggatcgcttgagcctaggagttcaagaccagcctggacaacatggcgaaaccccatctctactaaaaatgcagaaaaaaaaaaattagccagg

SEQ ID NO: 39427 - DNA, 475 bp, Homo sapiens
aacttgtgtcatgggagttcgttgtacagattatttcatcatccaggtattaagcctgctacccatttgtttttttcctgatcctctccgtcctcccattctccactctgtgataggccccagtgtgtgttgttcctctctatgtgtccatgtgttctcatcatttagctaccacttataagtgagagcatgtggtatttggttttccattcctgtgttagtttactgaggataatggcctccagctccaaccatgtccctgcaaaggacatgatcttgttcttttttacgtctgcaaggttctctgcttataaggacaaaggggagaatagggattggtgggcaactagtcatctactagttagcttagtaagctaagcattaaatctaagaaatagcaaaataagcctatggaaattaggaagaaggaaagaatcaaggtaaaagaaaaaataaattaatttggaaaaaaaaa

SEQ ID NO: 39428 - DNA, 192 bp, Homo sapiens
  misc_feature (1)..(1): n is a, c, g, or t
  misc_feature (63)..(63): n is a, c, g, or t
ntccaatccaatattcggtccaactttttccccggacacaccccacccctccatgatgcaccntatgcaaccgaggatggacttatacacacaaatgaccaggccaggactctacccaaagaatgggtttgtatttaagggccccagcagttagaacatcctcagaaaagaaggtaaggctttatgatgtgc

SEQ ID NO: 39429 - DNA, 3394 bp, Homo sapiens
  misc_feature (1827)..(1827): n is a, c, g, or t
cccctctccccctccccacctatcgtcatgacggcctctccggattacttggtggtgctttttgggatcactgctggggccaccggggccaagctaggctcggatgagaaggagttgatcctgctgttctggaaagtcgtggatctggccaacaagaaggtgggacagttgcacgaagtgctagttagaccggatcagttggaactgacggaggactgcaaagaagaaactaaaatagacgtcgaaagcctgtcctcggcgtcgcagctggaccaagccctccgacagtttaaccagtcagtgagcaatgaactgaatattggagtagggacttccttctgtctctgtactgatgggcagcttcatgtcaggcaaatcctgcatcctgaggcttccaagaagaatgtactattacctgaatgcttctattccttttttgatcttcgaaaagaattcaagaaatgttgccctggttcacctgatattgacaaactggacgttgccacaatgacagagtatttaaattttgagaagagtagttcagtctctcgatatggagcctctcaagttgaagatatggggaatataattttagcaatgatttcagagccttataatcacaggttttcagatccagagagagtgaattacaagtttgaaagtggaacttgcagcaagatggaacttattgatgataacaccgtagtcagggcacgaggtttaccatggcagtcttcagatcaagatattgcaagattcttcaaaggactcaatattgccaagggaggtgcagcactttgtctgaatgctcagggtcgaaggaacggagaagctctggttaggtttgtaagtgaggagcaccgagacctagcactacagaggcacaaacatcacatggggacccggtatattgaggtttacaaagcaacaggtgaagatttccttaaaattgctggtggtacttccaatgaggtagcccagtttctctccaaggaaaatcaagtcattgttcgcatgcgggggctccctttcacggccacagctgaagaagtggtggccttctttggacagcattgccctattactgggggaaaggaaggcatcctctttgtcacctacccagatggtaggccaacaggggacgcttttgtcctctttgcctgtgaggaatatgcacagaatgcgttgaggaagcataaagacttgttgggtaaaagatacattgaactcttcaggagcacagcagctgaagttcagcaggtgctgaatcgattctcctcggcccctctcattccacttccaacccctcccattattccagtactacctcagcaatttgtgccccctacaaatgttagagactgtatacgccttcgaggtcttccctatgcagccacaattgaggacatcctggatttcctgggggagttcgccacagatattcgtactcatggggttcacatggttttgaatcaccagggccgcccatcaggagatgcctttatccagatgaagtctgcggacagagcatttatggctgcacagaagtgtcataaaaaaaacatgaaggacagatatgttgaagtctttcagtgttcagctgaggagatgaactttgtgttaatggggggcactttaaatcgaaatggcttatccccaccgccatgtaagttaccatgcctgtctcctccctcctacacatttccagctcctgctgcagttattcctacagaagctgccatttaccagccctctgtgattttgaatccacgagcactgcagccctccacagcgtactacccagcaggcactcagctcttcatgaantacacagcgtactatcccagtgtttgaaagatgtatggtgatcttgaaacctccagacacaagaaaacttctagcaaattcaggggaagtttgtctacactcaggctgcagtattttcagcaaacttgattggacaaacgggcctgtgccttatcttttggtggagtgaaaaaatttgagctagtgaagccaaatcgtaacttacagcaagcagcatgcagcatacctggctctttgctgattgcaaataggcatttaaaatgtgaatttggaatcagatgtctccattacttccagttaaagtggcatcataggtgtttcctaagttttaagtcttggataaaaactccaccagtgtctaccatctccaccatgaactctgttaaggaagcttcatttttgtatattcccgctcttttctcttcatttccctgtcttctgcataatcatgccttcttgctaagtaattcaagcataagatcttggaataataaaatcacaatcttaggagaaagaataaaattgttattttcccagtctcttggccatgatgatatcttatgattaaaaacaaattaaattttaaaacacctgaagataaattagaagaaattgtgcaccctccacaaaacatacaaagtttaaaagtttggatctttttctcagcaggtatcagttgtaaataatgaattaggggccaaaatgcaaaacgaaaaatgaagcagctacatgtagttagtaatttctagtttgaactgtaattgaatattgtggcttcatatgtattattttatattgtacttttttcattattgatggtttggactttaataagagaaattccatagtttttaatatcccagaagtgagacaatttgaacagtgtattctagaaaacaatacactaactgaacagaagtgaatgcttatatatattatgatagccttaaacctttttcctctaatgccttaactgtcaaataattataaccttttaaagcataggactatagtcagcatgctagactgagaggtaaacactgatgcaattagaacaggtactgatgctgtcagtgtttaacactatgtttagctgtgtttatgctataaaagtgcaatattagacactagctagtactgctgcctcatgtaactccaaagaaaacaggatttcattaagtgcattgaatgtggctatttctctaagttactcatattgtcctttgcttgaatgcaatgccgtgcagatttatgtggctgctatttttattttctgtgcattactttaacaccttaaagggagaagcaaacatttccttcttcagctgactggcaatggccctttaactgcaataggaagaaaaaaaaaaaggtttgtgtgaaaattggtgataactggcacttaagatcgaaaagaaatttctgtatacttgatgccttaagatgcccaaagctgcccaaagctctgaaagactttaagataggcagtaatgcttactacaatactactgagtttttgtagagttaacatttgataataaaacttgcctgtttaatctcaatgttt

SEQ ID NO: 39430 - DNA, 2618 bp, Homo sapiens
  misc_feature (1051)..(1051): n is a, c, g, or t
ctctatttctttggtttggaggtggagtatgaaggtaatgaggggaatactgtgtacttagtgaaatgatatatttctacttttgctacaaaagtccacatttagtgatatgttcagaattgtataaaagtggcagctttagggataatatccctcacagatagtgatacattgttacaggtagacactaactgtttaagtgttttgtgttgtgtgtggtgtacacctcacagtgtatttgacaaaaatgagtatcatgctttccctgctggaatgcatgaatccctttctccattacttctcaaacttgcatgtacttctgaatcacttgaagattcagttcagatgaagattcatatttattaggtctggggtgagctggattctgcatttctaacgagcttcccagtgatgccattgctgatctgcagaaagcaggggagtagcacagctctaaattacttctgttttgctttgagtacaggtgctgaatcgattctcctcggcccctctcattccacttccaacccctcccattattccagtactacctcagcaatttgtgccccctacaaatgttagagactgtatacgccttcgaggtcttccctatgcagccacaattgaggacatcctggatttcctgggggagttcgccacagatattcgtactcatggggttcacatggttttgaatcaccagggccgcccatcaggagatgcctttatccagatgaagtctgcggacagagcatttatggctgcacagaagtgtcataaaaaaaacatgaaggacagatatgttgaagtctttcagtgttcagctgaggagatgaactttgtgttaatggggggcactttaaatcgaaatggcttatccccaccgccatgtaagttaccatgcctgtctcctccctcctacacatttccagctcctgctgcagttattcctacagaagctgccatttaccagccctctgtgattttgaatccacgagcactgcagccctccacagcgtactacccagcaggcactcagctcttcatgaantacacagcgtactatcccagtgtttgaaagatgtatggtgatcttgaaacctccagacacaagaaaacttctagcaaattcaggggaagtttgtctacactcaggctgcagtattttcagcaaacttgattggacaaacgggcctgtgccttatcttttggtggagtgaaaaaatttgagctagtgaagccaaatcgtaacttacagcaagcagcatgcagcatacctggctctttgctgattgcaaataggcatttaaaatgtgaatttggaatcagatgtctccattacttccagttaaagtggcatcataggtgtttcctaagttttaagtcttggataaaaactccaccagtgtctaccatctccaccatgaactctgttaaggaagcttcatttttgtatattcccgctcttttctcttcatttccctgtcttctgcataatcatgccttcttgctaagtaattcaagcataagatcttggaataataaaatcacaatcttaggagaaagaataaaattgttattttcccagtctcttggccatgatgatatcttatgattaaaaacaaattaaattttaaaacacctgaagataaattagaagaaattgtgcaccctccacaaaacatacaaagtttaaaagtttggatctttttctcagcaggtatcagttgtaaataatgaattaggggccaaaatgcaaaacgaaaaatgaagcagctacatgtagttagtaatttctagtttgaactgtaattgaatattgtggcttcatatgtattattttatattgtacttttttcattattgatggtttggactttaataagagaaattccatagtttttaatatcccagaagtgagacaatttgaacagtgtattctagaaaacaatacactaactgaacagaagtgaatgcttatatatattatgatagccttaaacctttttcctctaatgccttaactgtcaaataattataaccttttaaagcataggactatagtcagcatgctagactgagaggtaaacactgatgcaattagaacaggtactgatgctgtcagtgtttaacactatgtttagctgtgtttatgctataaaagtgcaatattagacactagctagtactgctgcctcatgtaactccaaagaaaacaggatttcattaagtgcattgaatgtggctatttctctaagttactcatattgtcctttgcttgaatgcaatgccgtgcagatttatgtggctgctatttttattttctgtgcattactttaacaccttaaagggagaagcaaacatttccttcttcagctgactggcaatggccctttaactgcaataggaagaaaaaaaaaaaggtttgtgtgaaaattggtgataactggcacttaagatcgaaaagaaatttctgtatacttgatgccttaagatgcccaaagctgcccaaagctctgaaagactttaagataggcagtaatgcttactacaatactactgagtttttgtagagttaacatttgataataaaacttgcctgtttaatctcaatgttt

SEQ ID NO: 39431 - DNA, 3655 bp, Homo sapiens
  misc_feature (1827)..(1827): n is a, c, g, or t
cccctctccccctccccacctatcgtcatgacggcctctccggattacttggtggtgctttttgggatcactgctggggccaccggggccaagctaggctcggatgagaaggagttgatcctgctgttctggaaagtcgtggatctggccaacaagaaggtgggacagttgcacgaagtgctagttagaccggatcagttggaactgacggaggactgcaaagaagaaactaaaatagacgtcgaaagcctgtcctcggcgtcgcagctggaccaagccctccgacagtttaaccagtcagtgagcaatgaactgaatattggagtagggacttccttctgtctctgtactgatgggcagcttcatgtcaggcaaatcctgcatcctgaggcttccaagaagaatgtactattacctgaatgcttctattccttttttgatcttcgaaaagaattcaagaaatgttgccctggttcacctgatattgacaaactggacgttgccacaatgacagagtatttaaattttgagaagagtagttcagtctctcgatatggagcctctcaagttgaagatatggggaatataattttagcaatgatttcagagccttataatcacaggttttcagatccagagagagtgaattacaagtttgaaagtggaacttgcagcaagatggaacttattgatgataacaccgtagtcagggcacgaggtttaccatggcagtcttcagatcaagatattgcaagattcttcaaaggactcaatattgccaagggaggtgcagcactttgtctgaatgctcagggtcgaaggaacggagaagctctggttaggtttgtaagtgaggagcaccgagacctagcactacagaggcacaaacatcacatggggacccggtatattgaggtttacaaagcaacaggtgaagatttccttaaaattgctggtggtacttccaatgaggtagcccagtttctctccaaggaaaatcaagtcattgttcgcatgcgggggctccctttcacggccacagctgaagaagtggtggccttctttggacagcattgccctattactgggggaaaggaaggcatcctctttgtcacctacccagatggtaggccaacaggggacgcttttgtcctctttgcctgtgaggaatatgcacagaatgcgttgaggaagcataaagacttgttgggtaaaagatacattgaactcttcaggagcacagcagctgaagttcagcaggtgctgaatcgattctcctcggcccctctcattccacttccaacccctcccattattccagtactacctcagcaatttgtgccccctacaaatgttagagactgtatacgccttcgaggtcttccctatgcagccacaattgaggacatcctggatttcctgggggagttcgccacagatattcgtactcatggggttcacatggttttgaatcaccagggccgcccatcaggagatgcctttatccagatgaagtctgcggacagagcatttatggctgcacagaagtgtcataaaaaaaacatgaaggacagatatgttgaagtctttcagtgttcagctgaggagatgaactttgtgttaatggggggcactttaaatcgaaatggcttatccccaccgccatgtaagttaccatgcctgtctcctccctcctacacatttccagctcctgctgcagttattcctacagaagctgccatttaccagccctctgtgattttgaatccacgagcactgcagccctccacagcgtactacccagcaggcactcagctcttcatgaantacacagcgtactatcccagccccccaggttcgcctaatagtcttggctacttccctacagctgctaatcttagcggtgtccctccacagcctggcacggtggtcagaatgcagggcctggcctacaatactggagttaaggaaattcttaacttcttccaaggttaccagtatgcaaccgaggatggacttatacacacaaatgaccaggccaggactctacccaaagaatgggtttgtatttaagggccccagcagttagaacatcctcagaaaagaagtgtttgaaagatgtatggtgatcttgaaacctccagacacaagaaaacttctagcaaattcaggggaagtttgtctacactcaggctgcagtattttcagcaaacttgattggacaaacgggcctgtgccttatcttttggtggagtgaaaaaatttgagctagtgaagccaaatcgtaacttacagcaagcagcatgcagcatacctggctctttgctgattgcaaataggcatttaaaatgtgaatttggaatcagatgtctccattacttccagttaaagtggcatcataggtgtttcctaagttttaagtcttggataaaaactccaccagtgtctaccatctccaccatgaactctgttaaggaagcttcatttttgtatattcccgctcttttctcttcatttccctgtcttctgcataatcatgccttcttgctaagtaattcaagcataagatcttggaataataaaatcacaatcttaggagaaagaataaaattgttattttcccagtctcttggccatgatgatatcttatgattaaaaacaaattaaattttaaaacacctgaagataaattagaagaaattgtgcaccctccacaaaacatacaaagtttaaaagtttggatctttttctcagcaggtatcagttgtaaataatgaattaggggccaaaatgcaaaacgaaaaatgaagcagctacatgtagttagtaatttctagtttgaactgtaattgaatattgtggcttcatatgtattattttatattgtacttttttcattattgatggtttggactttaataagagaaattccatagtttttaatatcccagaagtgagacaatttgaacagtgtattctagaaaacaatacactaactgaacagaagtgaatgcttatatatattatgatagccttaaacctttttcctctaatgccttaactgtcaaataattataaccttttaaagcataggactatagtcagcatgctagactgagaggtaaacactgatgcaattagaacaggtactgatgctgtcagtgtttaacactatgtttagctgtgtttatgctataaaagtgcaatattagacactagctagtactgctgcctcatgtaactccaaagaaaacaggatttcattaagtgcattgaatgtggctatttctctaagttactcatattgtcctttgcttgaatgcaatgccgtgcagatttatgtggctgctatttttattttctgtgcattactttaacaccttaaagggagaagcaaacatttccttcttcagctgactggcaatggccctttaactgcaataggaagaaaaaaaaaaaggtttgtgtgaaaattggtgataactggcacttaagatcgaaaagaaatttctgtatacttgatgccttaagatgcccaaagctgcccaaagctctgaaagactttaagataggcagtaatgcttactacaatactactgagtttttgtagagttaacatttgataataaaacttgcctgtttaatctcaatgttt

SEQ ID NO: 39432 - DNA, 3545 bp, Homo sapiens
  misc_feature (1827)..(1827): n is a, c, g, or t
cccctctccccctccccacctatcgtcatgacggcctctccggattacttggtggtgctttttgggatcactgctggggccaccggggccaagctaggctcggatgagaaggagttgatcctgctgttctggaaagtcgtggatctggccaacaagaaggtgggacagttgcacgaagtgctagttagaccggatcagttggaactgacggaggactgcaaagaagaaactaaaatagacgtcgaaagcctgtcctcggcgtcgcagctggaccaagccctccgacagtttaaccagtcagtgagcaatgaactgaatattggagtagggacttccttctgtctctgtactgatgggcagcttcatgtcaggcaaatcctgcatcctgaggcttccaagaagaatgtactattacctgaatgcttctattccttttttgatcttcgaaaagaattcaagaaatgttgccctggttcacctgatattgacaaactggacgttgccacaatgacagagtatttaaattttgagaagagtagttcagtctctcgatatggagcctctcaagttgaagatatggggaatataattttagcaatgatttcagagccttataatcacaggttttcagatccagagagagtgaattacaagtttgaaagtggaacttgcagcaagatggaacttattgatgataacaccgtagtcagggcacgaggtttaccatggcagtcttcagatcaagatattgcaagattcttcaaaggactcaatattgccaagggaggtgcagcactttgtctgaatgctcagggtcgaaggaacggagaagctctggttaggtttgtaagtgaggagcaccgagacctagcactacagaggcacaaacatcacatggggacccggtatattgaggtttacaaagcaacaggtgaagatttccttaaaattgctggtggtacttccaatgaggtagcccagtttctctccaaggaaaatcaagtcattgttcgcatgcgggggctccctttcacggccacagctgaagaagtggtggccttctttggacagcattgccctattactgggggaaaggaaggcatcctctttgtcacctacccagatggtaggccaacaggggacgcttttgtcctctttgcctgtgaggaatatgcacagaatgcgttgaggaagcataaagacttgttgggtaaaagatacattgaactcttcaggagcacagcagctgaagttcagcaggtgctgaatcgattctcctcggcccctctcattccacttccaacccctcccattattccagtactacctcagcaatttgtgccccctacaaatgttagagactgtatacgccttcgaggtcttccctatgcagccacaattgaggacatcctggatttcctgggggagttcgccacagatattcgtactcatggggttcacatggttttgaatcaccagggccgcccatcaggagatgcctttatccagatgaagtctgcggacagagcatttatggctgcacagaagtgtcataaaaaaaacatgaaggacagatatgttgaagtctttcagtgttcagctgaggagatgaactttgtgttaatggggggcactttaaatcgaaatggcttatccccaccgccatgtaagttaccatgcctgtctcctccctcctacacatttccagctcctgctgcagttattcctacagaagctgccatttaccagccctctgtgattttgaatccacgagcactgcagccctccacagcgtactacccagcaggcactcagctcttcatgaantacacagcgtactatcccagccccccaggttcgcctaatagtcttggctacttccctacagctgctaatcttagcggtgtccctccacagcctggcacggtggtcagaatgcagggcctggcctacaatactggagttaaggaaattcttaacttcttccaaggttaccagtgtttgaaagatgtatggtgatcttgaaacctccagacacaagaaaacttctagcaaattcaggggaagtttgtctacactcaggctgcagtattttcagcaaacttgattggacaaacgggcctgtgccttatcttttggtggagtgaaaaaatttgagctagtgaagccaaatcgtaacttacagcaagcagcatgcagcatacctggctctttgctgattgcaaataggcatttaaaatgtgaatttggaatcagatgtctccattacttccagttaaagtggcatcataggtgtttcctaagttttaagtcttggataaaaactccaccagtgtctaccatctccaccatgaactctgttaaggaagcttcatttttgtatattcccgctcttttctcttcatttccctgtcttctgcataatcatgccttcttgctaagtaattcaagcataagatcttggaataataaaatcacaatcttaggagaaagaataaaattgttattttcccagtctcttggccatgatgatatcttatgattaaaaacaaattaaattttaaaacacctgaagataaattagaagaaattgtgcaccctccacaaaacatacaaagtttaaaagtttggatctttttctcagcaggtatcagttgtaaataatgaattaggggccaaaatgcaaaacgaaaaatgaagcagctacatgtagttagtaatttctagtttgaactgtaattgaatattgtggcttcatatgtattattttatattgtacttttttcattattgatggtttggactttaataagagaaattccatagtttttaatatcccagaagtgagacaatttgaacagtgtattctagaaaacaatacactaactgaacagaagtgaatgcttatatatattatgatagccttaaacctttttcctctaatgccttaactgtcaaataattataaccttttaaagcataggactatagtcagcatgctagactgagaggtaaacactgatgcaattagaacaggtactgatgctgtcagtgtttaacactatgtttagctgtgtttatgctataaaagtgcaatattagacactagctagtactgctgcctcatgtaactccaaagaaaacaggatttcattaagtgcattgaatgtggctatttctctaagttactcatattgtcctttgcttgaatgcaatgccgtgcagatttatgtggctgctatttttattttctgtgcattactttaacaccttaaagggagaagcaaacatttccttcttcagctgactggcaatggccctttaactgcaataggaagaaaaaaaaaaaggtttgtgtgaaaattggtgataactggcacttaagatcgaaaagaaatttctgtatacttgatgccttaagatgcccaaagctgcccaaagctctgaaagactttaagataggcagtaatgcttactacaatactactgagtttttgtagagttaacatttgataataaaacttgcctgtttaatctcaatgttt

SEQ ID NO: 39433 - DNA, 1717 bp, Homo sapiens
  misc_feature (46)..(47): n is a, c, g, or t
gcgaagtgttggtgtattgagcgataatggggtggggggatgggtnntataactctatcgtatgcaaccgaggatggacttatacacacaaatgaccaggccaggactctacccaaagaatgggtttgtatttaagggccccagcagttagaacatcctcagaaaagaagtgtttgaaagatgtatggtgatcttgaaacctccagacacaagaaaacttctagcaaattcaggggaagtttgtctacactcaggctgcagtattttcagcaaacttgattggacaaacgggcctgtgccttatcttttggtggagtgaaaaaatttgagctagtgaagccaaatcgtaacttacagcaagcagcatgcagcatacctggctctttgctgattgcaaataggcatttaaaatgtgaatttggaatcagatgtctccattacttccagttaaagtggcatcataggtgtttcctaagttttaagtcttggataaaaactccaccagtgtctaccatctccaccatgaactctgttaaggaagcttcatttttgtatattcccgctcttttctcttcatttccctgtcttctgcataatcatgccttcttgctaagtaattcaagcataagatcttggaataataaaatcacaatcttaggagaaagaataaaattgttattttcccagtctcttggccatgatgatatcttatgattaaaaacaaattaaattttaaaacacctgaagataaattagaagaaattgtgcaccctccacaaaacatacaaagtttaaaagtttggatctttttctcagcaggtatcagttgtaaataatgaattaggggccaaaatgcaaaacgaaaaatgaagcagctacatgtagttagtaatttctagtttgaactgtaattgaatattgtggcttcatatgtattattttatattgtacttttttcattattgatggtttggactttaataagagaaattccatagtttttaatatcccagaagtgagacaatttgaacagtgtattctagaaaacaatacactaactgaacagaagtgaatgcttatatatattatgatagccttaaacctttttcctctaatgccttaactgtcaaataattataaccttttaaagcataggactatagtcagcatgctagactgagaggtaaacactgatgcaattagaacaggtactgatgctgtcagtgtttaacactatgtttagctgtgtttatgctataaaagtgcaatattagacactagctagtactgctgcctcatgtaactccaaagaaaacaggatttcattaagtgcattgaatgtggctatttctctaagttactcatattgtcctttgcttgaatgcaatgccgtgcagatttatgtggctgctatttttattttctgtgcattactttaacaccttaaagggagaagcaaacatttccttcttcagctgactggcaatggccctttaactgcaataggaagaaaaaaaaaaaggtttgtgtgaaaattggtgataactggcacttaagatcgaaaagaaatttctgtatacttgatgccttaagatgcccaaagctgcccaaagctctgaaagactttaagataggcagtaatgcttactacaatactactgagtttttgtagagttaacatttgataataaaacttgcctgtttaatctcaatgttt

SEQ ID NO: 39434 - DNA, 1708 bp, Homo sapiens
  misc_feature (26)..(26): n is a, c, g, or t
catcccacccaccataaacacacccncgtcacacacccacccccctttgtttatgcaaccgaggatggacttatacacacaaatgaccaggccaggactctacccaaagaatgggtttgtatttaagggccccagcagttagaacatcctcagaaaagaagtgtttgaaagatgtatggtgatcttgaaacctccagacacaagaaaacttctagcaaattcaggggaagtttgtctacactcaggctgcagtattttcagcaaacttgattggacaaacgggcctgtgccttatcttttggtggagtgaaaaaatttgagctagtgaagccaaatcgtaacttacagcaagcagcatgcagcatacctggctctttgctgattgcaaataggcatttaaaatgtgaatttggaatcagatgtctccattacttccagttaaagtggcatcataggtgtttcctaagttttaagtcttggataaaaactccaccagtgtctaccatctccaccatgaactctgttaaggaagcttcatttttgtatattcccgctcttttctcttcatttccctgtcttctgcataatcatgccttcttgctaagtaattcaagcataagatcttggaataataaaatcacaatcttaggagaaagaataaaattgttattttcccagtctcttggccatgatgatatcttatgattaaaaacaaattaaattttaaaacacctgaagataaattagaagaaattgtgcaccctccacaaaacatacaaagtttaaaagtttggatctttttctcagcaggtatcagttgtaaataatgaattaggggccaaaatgcaaaacgaaaaatgaagcagctacatgtagttagtaatttctagtttgaactgtaattgaatattgtggcttcatatgtattattttatattgtacttttttcattattgatggtttggactttaataagagaaattccatagtttttaatatcccagaagtgagacaatttgaacagtgtattctagaaaacaatacactaactgaacagaagtgaatgcttatatatattatgatagccttaaacctttttcctctaatgccttaactgtcaaataattataaccttttaaagcataggactatagtcagcatgctagactgagaggtaaacactgatgcaattagaacaggtactgatgctgtcagtgtttaacactatgtttagctgtgtttatgctataaaagtgcaatattagacactagctagtactgctgcctcatgtaactccaaagaaaacaggatttcattaagtgcattgaatgtggctatttctctaagttactcatattgtcctttgcttgaatgcaatgccgtgcagatttatgtggctgctatttttattttctgtgcattactttaacaccttaaagggagaagcaaacatttccttcttcagctgactggcaatggccctttaactgcaataggaagaaaaaaaaaaaggtttgtgtgaaaattggtgataactggcacttaagatcgaaaagaaatttctgtatacttgatgccttaagatgcccaaagctgcccaaagctctgaaagactttaagataggcagtaatgcttactacaatactactgagtttttgtagagttaacatttgataataaaacttgcctgtttaatctcaatgttt

SEQ ID NO: 39435 - DNA, 1601 bp, Homo sapiens
tacgacaaacatatacagtctgcggggtgtctaatgagaaccagacaacgttaatgtttgaaagatgtatggtgatcttgaaacctccagacacaagaaaacttctagcaaattcaggggaagtttgtctacactcaggctgcagtattttcagcaaacttgattggacaaacgggcctgtgccttatcttttggtggagtgaaaaaatttgagctagtgaagccaaatcgtaacttacagcaagcagcatgcagcatacctggctctttgctgattgcaaataggcatttaaaatgtgaatttggaatcagatgtctccattacttccagttaaagtggcatcataggtgtttcctaagttttaagtcttggataaaaactccaccagtgtctaccatctccaccatgaactctgttaaggaagcttcatttttgtatattcccgctcttttctcttcatttccctgtcttctgcataatcatgccttcttgctaagtaattcaagcataagatcttggaataataaaatcacaatcttaggagaaagaataaaattgttattttcccagtctcttggccatgatgatatcttatgattaaaaacaaattaaattttaaaacacctgaagataaattagaagaaattgtgcaccctccacaaaacatacaaagtttaaaagtttggatctttttctcagcaggtatcagttgtaaataatgaattaggggccaaaatgcaaaacgaaaaatgaagcagctacatgtagttagtaatttctagtttgaactgtaattgaatattgtggcttcatatgtattattttatattgtacttttttcattattgatggtttggactttaataagagaaattccatagtttttaatatcccagaagtgagacaatttgaacagtgtattctagaaaacaatacactaactgaacagaagtgaatgcttatatatattatgatagccttaaacctttttcctctaatgccttaactgtcaaataattataaccttttaaagcataggactatagtcagcatgctagactgagaggtaaacactgatgcaattagaacaggtactgatgctgtcagtgtttaacactatgtttagctgtgtttatgctataaaagtgcaatattagacactagctagtactgctgcctcatgtaactccaaagaaaacaggatttcattaagtgcattgaatgtggctatttctctaagttactcatattgtcctttgcttgaatgcaatgccgtgcagatttatgtggctgctatttttattttctgtgcattactttaacaccttaaagggagaagcaaacatttccttcttcagctgactggcaatggccctttaactgcaataggaagaaaaaaaaaaaggtttgtgtgaaaattggtgataactggcacttaagatcgaaaagaaatttctgtatacttgatgccttaagatgcccaaagctgcccaaagctctgaaagactttaagataggcagtaatgcttactacaatactactgagtttttgtagagttaacatttgataataaaacttgcctgtttaatctcaatgttt

SEQ ID NO: 39436 - DNA, 2565 bp, Homo sapiens
  misc_feature (1827)..(1827): n is a, c, g, or t
cccctctccccctccccacctatcgtcatgacggcctctccggattacttggtggtgctttttgggatcactgctggggccaccggggccaagctaggctcggatgagaaggagttgatcctgctgttctggaaagtcgtggatctggccaacaagaaggtgggacagttgcacgaagtgctagttagaccggatcagttggaactgacggaggactgcaaagaagaaactaaaatagacgtcgaaagcctgtcctcggcgtcgcagctggaccaagccctccgacagtttaaccagtcagtgagcaatgaactgaatattggagtagggacttccttctgtctctgtactgatgggcagcttcatgtcaggcaaatcctgcatcctgaggcttccaagaagaatgtactattacctgaatgcttctattccttttttgatcttcgaaaagaattcaagaaatgttgccctggttcacctgatattgacaaactggacgttgccacaatgacagagtatttaaattttgagaagagtagttcagtctctcgatatggagcctctcaagttgaagatatggggaatataattttagcaatgatttcagagccttataatcacaggttttcagatccagagagagtgaattacaagtttgaaagtggaacttgcagcaagatggaacttattgatgataacaccgtagtcagggcacgaggtttaccatggcagtcttcagatcaagatattgcaagattcttcaaaggactcaatattgccaagggaggtgcagcactttgtctgaatgctcagggtcgaaggaacggagaagctctggttaggtttgtaagtgaggagcaccgagacctagcactacagaggcacaaacatcacatggggacccggtatattgaggtttacaaagcaacaggtgaagatttccttaaaattgctggtggtacttccaatgaggtagcccagtttctctccaaggaaaatcaagtcattgttcgcatgcgggggctccctttcacggccacagctgaagaagtggtggccttctttggacagcattgccctattactgggggaaaggaaggcatcctctttgtcacctacccagatggtaggccaacaggggacgcttttgtcctctttgcctgtgaggaatatgcacagaatgcgttgaggaagcataaagacttgttgggtaaaagatacattgaactcttcaggagcacagcagctgaagttcagcaggtgctgaatcgattctcctcggcccctctcattccacttccaacccctcccattattccagtactacctcagcaatttgtgccccctacaaatgttagagactgtatacgccttcgaggtcttccctatgcagccacaattgaggacatcctggatttcctgggggagttcgccacagatattcgtactcatggggttcacatggttttgaatcaccagggccgcccatcaggagatgcctttatccagatgaagtctgcggacagagcatttatggctgcacagaagtgtcataaaaaaaacatgaaggacagatatgttgaagtctttcagtgttcagctgaggagatgaactttgtgttaatggggggcactttaaatcgaaatggcttatccccaccgccatgtaagttaccatgcctgtctcctccctcctacacatttccagctcctgctgcagttattcctacagaagctgccatttaccagccctctgtgattttgaatccacgagcactgcagccctccacagcgtactacccagcaggcactcagctcttcatgaantacacagcgtactatcccagccccccaggttcgcctaatagtcttggctacttccctacagctgctaatcttagcggtgtccctccacagcctggcacggtggtcagaatgcagggcctggcctacaatactggagttaaggaaattcttaacttcttccaaggttaccagtgtttgaaagatgtatggtgatcttgaaacctccagacacaagaaaacttctagcaaattcaggggaagtttgtctacactcaggctgcagtattttcagcaaacttgattggacaaacgggcctgtgccttatcttttggtggagtgaaaaaatttgagctagtgaagccaaatcgtaacttacagcaagcagcatgcagcatacctggctctttgctgattgcaaataggcatttaaaatgtgaatttggaatcagatgtctccattacttccagttaaagtggcatcataggtgtttcctaagttttaagtcttggataaaaactccaccagtgtctaccatctccaccatgaactctgttaaggaagcttcatttttgtatattcccgctcttttctcttcatttccctgtcttctgcataatcatgccttcttgctaagtaattcaagcataagatcttggaataataaaatcacaatcttaggagaaagaataaaattgttattttcccagtctcttggccatgatgatatcttatgattaaaaacaaattaaattttaaa

SEQ ID NO: 39437 - DNA, 2627 bp, Homo sapiens
  misc_feature (1827)..(1827): n is a, c, g, or t
cccctctccccctccccacctatcgtcatgacggcctctccggattacttggtggtgctttttgggatcactgctggggccaccggggccaagctaggctcggatgagaaggagttgatcctgctgttctggaaagtcgtggatctggccaacaagaaggtgggacagttgcacgaagtgctagttagaccggatcagttggaactgacggaggactgcaaagaagaaactaaaatagacgtcgaaagcctgtcctcggcgtcgcagctggaccaagccctccgacagtttaaccagtcagtgagcaatgaactgaatattggagtagggacttccttctgtctctgtactgatgggcagcttcatgtcaggcaaatcctgcatcctgaggcttccaagaagaatgtactattacctgaatgcttctattccttttttgatcttcgaaaagaattcaagaaatgttgccctggttcacctgatattgacaaactggacgttgccacaatgacagagtatttaaattttgagaagagtagttcagtctctcgatatggagcctctcaagttgaagatatggggaatataattttagcaatgatttcagagccttataatcacaggttttcagatccagagagagtgaattacaagtttgaaagtggaacttgcagcaagatggaacttattgatgataacaccgtagtcagggcacgaggtttaccatggcagtcttcagatcaagatattgcaagattcttcaaaggactcaatattgccaagggaggtgcagcactttgtctgaatgctcagggtcgaaggaacggagaagctctggttaggtttgtaagtgaggagcaccgagacctagcactacagaggcacaaacatcacatggggacccggtatattgaggtttacaaagcaacaggtgaagatttccttaaaattgctggtggtacttccaatgaggtagcccagtttctctccaaggaaaatcaagtcattgttcgcatgcgggggctccctttcacggccacagctgaagaagtggtggccttctttggacagcattgccctattactgggggaaaggaaggcatcctctttgtcacctacccagatggtaggccaacaggggacgcttttgtcctctttgcctgtgaggaatatgcacagaatgcgttgaggaagcataaagacttgttgggtaaaagatacattgaactcttcaggagcacagcagctgaagttcagcaggtgctgaatcgattctcctcggcccctctcattccacttccaacccctcccattattccagtactacctcagcaatttgtgccccctacaaatgttagagactgtatacgccttcgaggtcttccctatgcagccacaattgaggacatcctggatttcctgggggagttcgccacagatattcgtactcatggggttcacatggttttgaatcaccagggccgcccatcaggagatgcctttatccagatgaagtctgcggacagagcatttatggctgcacagaagtgtcataaaaaaaacatgaaggacagatatgttgaagtctttcagtgttcagctgaggagatgaactttgtgttaatggggggcactttaaatcgaaatggcttatccccaccgccatgtaagttaccatgcctgtctcctccctcctacacatttccagctcctgctgcagttattcctacagaagctgccatttaccagccctctgtgattttgaatccacgagcactgcagccctccacagcgtactacccagcaggcactcagctcttcatgaantacacagcgtactatcccagccccccaggttcgcctaatagtcttggctacttccctacagctgctaatcttagcggtgtccctccacagcctggcacggtggtcagaatgcagggcctggcctacaatactggagttaaggaaattcttaacttcttccaaggttaccagtatgcaaccgaggatggacttatacacacaaatgaccaggccaggactctacccaaagaatgggtttgtatttaagggccccagcagttagaacatcctcagaaaagaagtgtttgaaagatgtatggtgatcttgaaacctccagacacaagaaaacttctagcaaattcaggggaagtttgtctacactcaggctgcagtattttcagcaaacttgattggacaaacgggcctgtgccttatcttttggtggagtgaaaaaatttgagctagtgaagccaaatcgtaacttacagcaagcagcatgcagcatacctggctctttgctgattgcaaataggcatttaaaatgtgaatttggaatcagatgtctccattacttccagttaaagtggcatcataggtgtttcctaagttttaagtcttggataaaaactccaccagtgtctaccatctccaccatgaactctgttaaggaagcttcatttttgtatattcccgctcttttctcttcatttccctgtcttctgcataatcatgccttcttgctaagtaattcaagcataagatcttggaataataaaatcacaatcttaggagaaagaataaaattgttattttcccagtc

SEQ ID NO: 39438 - DNA, 2517 bp, Homo sapiens
  misc_feature (1827)..(1827): n is a, c, g, or t
cccctctccccctccccacctatcgtcatgacggcctctccggattacttggtggtgctttttgggatcactgctggggccaccggggccaagctaggctcggatgagaaggagttgatcctgctgttctggaaagtcgtggatctggccaacaagaaggtgggacagttgcacgaagtgctagttagaccggatcagttggaactgacggaggactgcaaagaagaaactaaaatagacgtcgaaagcctgtcctcggcgtcgcagctggaccaagccctccgacagtttaaccagtcagtgagcaatgaactgaatattggagtagggacttccttctgtctctgtactgatgggcagcttcatgtcaggcaaatcctgcatcctgaggcttccaagaagaatgtactattacctgaatgcttctattccttttttgatcttcgaaaagaattcaagaaatgttgccctggttcacctgatattgacaaactggacgttgccacaatgacagagtatttaaattttgagaagagtagttcagtctctcgatatggagcctctcaagttgaagatatggggaatataattttagcaatgatttcagagccttataatcacaggttttcagatccagagagagtgaattacaagtttgaaagtggaacttgcagcaagatggaacttattgatgataacaccgtagtcagggcacgaggtttaccatggcagtcttcagatcaagatattgcaagattcttcaaaggactcaatattgccaagggaggtgcagcactttgtctgaatgctcagggtcgaaggaacggagaagctctggttaggtttgtaagtgaggagcaccgagacctagcactacagaggcacaaacatcacatggggacccggtatattgaggtttacaaagcaacaggtgaagatttccttaaaattgctggtggtacttccaatgaggtagcccagtttctctccaaggaaaatcaagtcattgttcgcatgcgggggctccctttcacggccacagctgaagaagtggtggccttctttggacagcattgccctattactgggggaaaggaaggcatcctctttgtcacctacccagatggtaggccaacaggggacgcttttgtcctctttgcctgtgaggaatatgcacagaatgcgttgaggaagcataaagacttgttgggtaaaagatacattgaactcttcaggagcacagcagctgaagttcagcaggtgctgaatcgattctcctcggcccctctcattccacttccaacccctcccattattccagtactacctcagcaatttgtgccccctacaaatgttagagactgtatacgccttcgaggtcttccctatgcagccacaattgaggacatcctggatttcctgggggagttcgccacagatattcgtactcatggggttcacatggttttgaatcaccagggccgcccatcaggagatgcctttatccagatgaagtctgcggacagagcatttatggctgcacagaagtgtcataaaaaaaacatgaaggacagatatgttgaagtctttcagtgttcagctgaggagatgaactttgtgttaatggggggcactttaaatcgaaatggcttatccccaccgccatgtaagttaccatgcctgtctcctccctcctacacatttccagctcctgctgcagttattcctacagaagctgccatttaccagccctctgtgattttgaatccacgagcactgcagccctccacagcgtactacccagcaggcactcagctcttcatgaantacacagcgtactatcccagccccccaggttcgcctaatagtcttggctacttccctacagctgctaatcttagcggtgtccctccacagcctggcacggtggtcagaatgcagggcctggcctacaatactggagttaaggaaattcttaacttcttccaaggttaccagtgtttgaaagatgtatggtgatcttgaaacctccagacacaagaaaacttctagcaaattcaggggaagtttgtctacactcaggctgcagtattttcagcaaacttgattggacaaacgggcctgtgccttatcttttggtggagtgaaaaaatttgagctagtgaagccaaatcgtaacttacagcaagcagcatgcagcatacctggctctttgctgattgcaaataggcatttaaaatgtgaatttggaatcagatgtctccattacttccagttaaagtggcatcataggtgtttcctaagttttaagtcttggataaaaactccaccagtgtctaccatctccaccatgaactctgttaaggaagcttcatttttgtatattcccgctcttttctcttcatttccctgtcttctgcataatcatgccttcttgctaagtaattcaagcataagatcttggaataataaaatcacaatcttaggagaaagaataaaattgttattttcccagtc

SEQ ID NO: 39439 - DNA, 2675 bp, Homo sapiens
  misc_feature (1827)..(1827): n is a, c, g, or t
cccctctccccctccccacctatcgtcatgacggcctctccggattacttggtggtgctttttgggatcactgctggggccaccggggccaagctaggctcggatgagaaggagttgatcctgctgttctggaaagtcgtggatctggccaacaagaaggtgggacagttgcacgaagtgctagttagaccggatcagttggaactgacggaggactgcaaagaagaaactaaaatagacgtcgaaagcctgtcctcggcgtcgcagctggaccaagccctccgacagtttaaccagtcagtgagcaatgaactgaatattggagtagggacttccttctgtctctgtactgatgggcagcttcatgtcaggcaaatcctgcatcctgaggcttccaagaagaatgtactattacctgaatgcttctattccttttttgatcttcgaaaagaattcaagaaatgttgccctggttcacctgatattgacaaactggacgttgccacaatgacagagtatttaaattttgagaagagtagttcagtctctcgatatggagcctctcaagttgaagatatggggaatataattttagcaatgatttcagagccttataatcacaggttttcagatccagagagagtgaattacaagtttgaaagtggaacttgcagcaagatggaacttattgatgataacaccgtagtcagggcacgaggtttaccatggcagtcttcagatcaagatattgcaagattcttcaaaggactcaatattgccaagggaggtgcagcactttgtctgaatgctcagggtcgaaggaacggagaagctctggttaggtttgtaagtgaggagcaccgagacctagcactacagaggcacaaacatcacatggggacccggtatattgaggtttacaaagcaacaggtgaagatttccttaaaattgctggtggtacttccaatgaggtagcccagtttctctccaaggaaaatcaagtcattgttcgcatgcgggggctccctttcacggccacagctgaagaagtggtggccttctttggacagcattgccctattactgggggaaaggaaggcatcctctttgtcacctacccagatggtaggccaacaggggacgcttttgtcctctttgcctgtgaggaatatgcacagaatgcgttgaggaagcataaagacttgttgggtaaaagatacattgaactcttcaggagcacagcagctgaagttcagcaggtgctgaatcgattctcctcggcccctctcattccacttccaacccctcccattattccagtactacctcagcaatttgtgccccctacaaatgttagagactgtatacgccttcgaggtcttccctatgcagccacaattgaggacatcctggatttcctgggggagttcgccacagatattcgtactcatggggttcacatggttttgaatcaccagggccgcccatcaggagatgcctttatccagatgaagtctgcggacagagcatttatggctgcacagaagtgtcataaaaaaaacatgaaggacagatatgttgaagtctttcagtgttcagctgaggagatgaactttgtgttaatggggggcactttaaatcgaaatggcttatccccaccgccatgtaagttaccatgcctgtctcctccctcctacacatttccagctcctgctgcagttattcctacagaagctgccatttaccagccctctgtgattttgaatccacgagcactgcagccctccacagcgtactacccagcaggcactcagctcttcatgaantacacagcgtactatcccagccccccaggttcgcctaatagtcttggctacttccctacagctgctaatcttagcggtgtccctccacagcctggcacggtggtcagaatgcagggcctggcctacaatactggagttaaggaaattcttaacttcttccaaggttaccagtatgcaaccgaggatggacttatacacacaaatgaccaggccaggactctacccaaagaatgggtttgtatttaagggccccagcagttagaacatcctcagaaaagaagtgtttgaaagatgtatggtgatcttgaaacctccagacacaagaaaacttctagcaaattcaggggaagtttgtctacactcaggctgcagtattttcagcaaacttgattggacaaacgggcctgtgccttatcttttggtggagtgaaaaaatttgagctagtgaagccaaatcgtaacttacagcaagcagcatgcagcatacctggctctttgctgattgcaaataggcatttaaaatgtgaatttggaatcagatgtctccattacttccagttaaagtggcatcataggtgtttcctaagttttaagtcttggataaaaactccaccagtgtctaccatctccaccatgaactctgttaaggaagcttcatttttgtatattcccgctcttttctcttcatttccctgtcttctgcataatcatgccttcttgctaagtaattcaagcataagatcttggaataataaaatcacaatcttaggagaaagaataaaattgttattttcccagtctcttggccatgatgatatcttatgattaaaaacaaattaaattttaaa

SEQ ID NO: 39440 - DNA, 2191 bp, Homo sapiens
cccctctccccctccccacctatcgtcatgacggcctctccggattacttggtggtgctttttgggatcactgctggggccaccggggccaagctaggctcggatgagaaggagttgatcctgctgttctggaaagtcgtggatctggccaacaagaaggtgggacagttgcacgaagtgctagttagaccggatcagttggaactgacggaggactgcaaagaagaaactaaaatagacgtcgaaagcctgtcctcggcgtcgcagctggaccaagccctccgacagtttaaccagtcagtgagcaatgaactgaatattggagtagggacttccttctgtctctgtactgatgggcagcttcatgtcaggcaaatcctgcatcctgaggcttccaagaagaatgtactattacctgaatgcttctattccttttttgatcttcgaaaagaattcaagaaatgttgccctggttcacctgatattgacaaactggacgttgccacaatgacagagtatttaaattttgagaagagtagttcagtctctcgatatggagcctctcaagttgaagatatggggaatataattttagcaatgatttcagagccttataatcacaggttttcagatccagagagagtgaattacaagtttgaaagtggaacttgcagcaagatggaacttattgatgataacaccgtagtcagggcacgaggtttaccatggcagtcttcagatcaagatattgcaagattcttcaaaggactcaatattgccaagggaggtgcagcactttgtctgaatgctcagggtcgaaggaacggagaagctctggttaggtttgtaagtgaggagcaccgagacctagcactacagaggcacaaacatcacatggggacccggtatattgaggtttacaaagcaacaggtgaagatttccttaaaattgctggtggtacttccaatgaggtagcccagtttctctccaaggaaaatcaagtcattgttcgcatgcgggggctccctttcacggccacagctgaagaagtggtggccttctttggacagcattgccctattactgggggaaaggaaggcatcctctttgtcacctacccagatggtaggccaacaggggacgcttttgtcctctttgcctgtgaggaatatgcacagaatgcgttgaggaagcataaagacttgttgggtaaaagatacattgaactcttcaggagcacagcagctgaagttcagcaggtgctgaatcgattctcctcggcccctctcattccacttccaacccctcccattattccagtactacctcagcaatttgtgccccctacaaatgttagagactgtatacgccttcgaggtcttccctatgcagccacaattgaggacatcctggatttcctgggggagttcgccacagatattcgtactcatggggttcacatggttttgaatcaccagggccgcccatcaggagatgcctttatccagatgaagtctgcggacagagcatttatggctgcacagaagtgtcataaaaaaaacatgaaggacagatatgttgaagtctttcagtgttcagctgaggagatgaactttgtgttaatggggggcactttaaatcgaaatggcttatccccaccgccatgtaagttaccatgtaagtttttcttgggtcttggcgctattctacgctatatgctggtaggtgcttaagctgctttcgtaactttctgtgcccctggttctttctgaggcaggtgaggtggttatataaggctctcccatctgtaatcagtagtacctggtaatcatttaagaccttggttgtggacacccataattagagatgctacaaatacctcctttcaaattatattcctgcttttccagtgataagcacttgatttctgaagcttagtgtgctccagataagcactgactctgggaggcaacctggctatatagataattttagtacgcatttaaaggcaaaataaaagtatggctggattctttttattttattttttaaaacgtattaacctttaagaagggcagtttgatgcacatgttgcatttaactttttgagcatcaagtatttttttaacatttttgagcatttctgttgctctccaggatatctggaatgagcaagtgagcaaaaacaaa

SEQ ID NO: 39441 - DNA, 1375 bp, Homo sapiens
cccctctccccctccccacctatcgtcatgacggcctctccggattacttggtggtgctttttgggatcactgctggggccaccggggccaagctaggctcggatgagaaggagttgatcctgctgttctggaaagtcgtggatctggccaacaagaaggtgggacagttgcacgaagtgctagttagaccggatcagttggaactgacggaggactgcaaagaagaaactaaaatagacgtcgaaagcctgtcctcggcgtcgcagctggaccaagccctccgacagtttaaccagtcagtgagcaatgaactgaatattggagtagggacttccttctgtctctgtactgatgggcagcttcatgtcaggcaaatcctgcatcctgaggcttccaagaagaatgtactattacctgaatgcttctattccttttttgatcttcgaaaagaattcaagaaatgttgccctggttcacctgatattgacaaactggacgttgccacaatgacagagtatttaaattttgagaagagtagttcagtctctcgatatggagcctctcaagttgaagatatggggaatataattttagcaatgatttcagagccttataatcacaggttttcagatccagagagagtgaattacaagtttgaaagtggaacttgcagcaagatggaacttattgatgataacaccgtagtcagggcacgaggtttaccatggcagtcttcagatcaagatattgcaagattcttcaaaggactcaatattgccaagggaggtgcagcactttgtctgaatgctcagggtcgaaggaacggagaagctctggttaggtttgtaagtgaggagcaccgagacctagcactacagaggcacaaacatcacatggggacccggtatattgaggtttacaaagcaacaggtgaagatttccttaaaattgctggtggtacttccaatgaggtagcccagtttctctccaaggaaaatcaagtcattgttcgcatgcgggggctccctttcacggccacagctgaagaagtggtggccttctttggacagcattgccctattactgggggaaaggaaggcatcctctttgtcacctacccagatggtaggccaacaggggacgcttttgtcctctttgcctgtgaggaatatgcacagaatgcgttgaggaagcataaagacttgttgggtaaaagatacattgaactcttcaggagcacagcagctgaagttcagcaggttggttttaaaaacaagtatgttgtacctttgcattaatttctgttctttatctctgaaaatagtcctacattgctcattatgttaaaataaaactggcaaaatactaaaagtg

SEQ ID NO: 39442 - DNA, 3450 bp, Homo sapiens
  misc_feature (1883)..(1883): n is a, c, g, or t
cccctctccccctccccacctatcgtcatgacggcctctccggattacttggtggtgctttttgggatcactgctggggccaccggggccaagctaggctcggatgagaaggagttgatcctgctgttctggaaagtcgtggatctggccaacaagaaggtgggacagttgcacgaagtgctagttagaccggatcagttggaactgacggaggactgcaaagaagaaactaaaatagacgtcgaaagcctgtcctcggcgtcgcagctggaccaagccctccgacagtttaaccagtcagtgagcaatgaactgaatattggagtagggacttccttctgtctctgtactgatgggcagcttcatgtcaggcaaatcctgcatcctgaggcttccaagaagaatgtactattacctgaatgcttctattccttttttgatcttcgaaaagaattcaagaaatgttgccctggttcacctgatattgacaaactggacgttgccacaatgacagagtgtatcctttaaatcattactcaagaatcatttgaaaagatagttccagaaaagagcctccctctgttacccaggctggagtgaaatggcgtgatctcggctcactgcaaccttcgcctcctgggttcaagcgattctcctgcctcagccgcccagatcacaggttttcagatccagagagagtgaattacaagtttgaaagtggaacttgcagcaagatggaacttattgatgataacaccgtagtcagggcacgaggtttaccatggcagtcttcagatcaagatattgcaagattcttcaaaggactcaatattgccaagggaggtgcagcactttgtctgaatgctcagggtcgaaggaacggagaagctctggttaggtttgtaagtgaggagcaccgagacctagcactacagaggcacaaacatcacatggggacccggtatattgaggtttacaaagcaacaggtgaagatttccttaaaattgctggtggtacttccaatgaggtagcccagtttctctccaaggaaaatcaagtcattgttcgcatgcgggggctccctttcacggccacagctgaagaagtggtggccttctttggacagcattgccctattactgggggaaaggaaggcatcctctttgtcacctacccagatggtaggccaacaggggacgcttttgtcctctttgcctgtgaggaatatgcacagaatgcgttgaggaagcataaagacttgttgggtaaaagatacattgaactcttcaggagcacagcagctgaagttcagcaggtgctgaatcgattctcctcggcccctctcattccacttccaacccctcccattattccagtactacctcagcaatttgtgccccctacaaatgttagagactgtatacgccttcgaggtcttccctatgcagccacaattgaggacatcctggatttcctgggggagttcgccacagatattcgtactcatggggttcacatggttttgaatcaccagggccgcccatcaggagatgcctttatccagatgaagtctgcggacagagcatttatggctgcacagaagtgtcataaaaaaaacatgaaggacagatatgttgaagtctttcagtgttcagctgaggagatgaactttgtgttaatggggggcactttaaatcgaaatggcttatccccaccgccatgtaagttaccatgcctgtctcctccctcctacacatttccagctcctgctgcagttattcctacagaagctgccatttaccagccctctgtgattttgaatccacgagcactgcagccctccacagcgtactacccagcaggcactcagctcttcatgaantacacagcgtactatcccagtgtttgaaagatgtatggtgatcttgaaacctccagacacaagaaaacttctagcaaattcaggggaagtttgtctacactcaggctgcagtattttcagcaaacttgattggacaaacgggcctgtgccttatcttttggtggagtgaaaaaatttgagctagtgaagccaaatcgtaacttacagcaagcagcatgcagcatacctggctctttgctgattgcaaataggcatttaaaatgtgaatttggaatcagatgtctccattacttccagttaaagtggcatcataggtgtttcctaagttttaagtcttggataaaaactccaccagtgtctaccatctccaccatgaactctgttaaggaagcttcatttttgtatattcccgctcttttctcttcatttccctgtcttctgcataatcatgccttcttgctaagtaattcaagcataagatcttggaataataaaatcacaatcttaggagaaagaataaaattgttattttcccagtctcttggccatgatgatatcttatgattaaaaacaaattaaattttaaaacacctgaagataaattagaagaaattgtgcaccctccacaaaacatacaaagtttaaaagtttggatctttttctcagcaggtatcagttgtaaataatgaattaggggccaaaatgcaaaacgaaaaatgaagcagctacatgtagttagtaatttctagtttgaactgtaattgaatattgtggcttcatatgtattattttatattgtacttttttcattattgatggtttggactttaataagagaaattccatagtttttaatatcccagaagtgagacaatttgaacagtgtattctagaaaacaatacactaactgaacagaagtgaatgcttatatatattatgatagccttaaacctttttcctctaatgccttaactgtcaaataattataaccttttaaagcataggactatagtcagcatgctagactgagaggtaaacactgatgcaattagaacaggtactgatgctgtcagtgtttaacactatgtttagctgtgtttatgctataaaagtgcaatattagacactagctagtactgctgcctcatgtaactccaaagaaaacaggatttcattaagtgcattgaatgtggctatttctctaagttactcatattgtcctttgcttgaatgcaatgccgtgcagatttatgtggctgctatttttattttctgtgcattactttaacaccttaaagggagaagcaaacatttccttcttcagctgactggcaatggccctttaactgcaataggaagaaaaaaaaaaaggtttgtgtgaaaattggtgataactggcacttaagatcgaaaagaaatttctgtatacttgatgccttaagatgcccaaagctgcccaaagctctgaaagactttaagataggcagtaatgcttactacaatactactgagtttttgtagagttaacatttgataataaaacttgcctgtttaatctcaatgttt

SEQ ID NO: 39443 - DNA, 3504 bp, Homo sapiens
  misc_feature (1827)..(1827): n is a, c, g, or t
cccctctccccctccccacctatcgtcatgacggcctctccggattacttggtggtgctttttgggatcactgctggggccaccggggccaagctaggctcggatgagaaggagttgatcctgctgttctggaaagtcgtggatctggccaacaagaaggtgggacagttgcacgaagtgctagttagaccggatcagttggaactgacggaggactgcaaagaagaaactaaaatagacgtcgaaagcctgtcctcggcgtcgcagctggaccaagccctccgacagtttaaccagtcagtgagcaatgaactgaatattggagtagggacttccttctgtctctgtactgatgggcagcttcatgtcaggcaaatcctgcatcctgaggcttccaagaagaatgtactattacctgaatgcttctattccttttttgatcttcgaaaagaattcaagaaatgttgccctggttcacctgatattgacaaactggacgttgccacaatgacagagtatttaaattttgagaagagtagttcagtctctcgatatggagcctctcaagttgaagatatggggaatataattttagcaatgatttcagagccttataatcacaggttttcagatccagagagagtgaattacaagtttgaaagtggaacttgcagcaagatggaacttattgatgataacaccgtagtcagggcacgaggtttaccatggcagtcttcagatcaagatattgcaagattcttcaaaggactcaatattgccaagggaggtgcagcactttgtctgaatgctcagggtcgaaggaacggagaagctctggttaggtttgtaagtgaggagcaccgagacctagcactacagaggcacaaacatcacatggggacccggtatattgaggtttacaaagcaacaggtgaagatttccttaaaattgctggtggtacttccaatgaggtagcccagtttctctccaaggaaaatcaagtcattgttcgcatgcgggggctccctttcacggccacagctgaagaagtggtggccttctttggacagcattgccctattactgggggaaaggaaggcatcctctttgtcacctacccagatggtaggccaacaggggacgcttttgtcctctttgcctgtgaggaatatgcacagaatgcgttgaggaagcataaagacttgttgggtaaaagatacattgaactcttcaggagcacagcagctgaagttcagcaggtgctgaatcgattctcctcggcccctctcattccacttccaacccctcccattattccagtactacctcagcaatttgtgccccctacaaatgttagagactgtatacgccttcgaggtcttccctatgcagccacaattgaggacatcctggatttcctgggggagttcgccacagatattcgtactcatggggttcacatggttttgaatcaccagggccgcccatcaggagatgcctttatccagatgaagtctgcggacagagcatttatggctgcacagaagtgtcataaaaaaaacatgaaggacagatatgttgaagtctttcagtgttcagctgaggagatgaactttgtgttaatggggggcactttaaatcgaaatggcttatccccaccgccatgtaagttaccatgcctgtctcctccctcctacacatttccagctcctgctgcagttattcctacagaagctgccatttaccagccctctgtgattttgaatccacgagcactgcagccctccacagcgtactacccagcaggcactcagctcttcatgaantacacagcgtactatcccagtatgcaaccgaggatggacttatacacacaaatgaccaggccaggactctacccaaagaatgggtttgtatttaagggccccagcagttagaacatcctcagaaaagaagtgtttgaaagatgtatggtgatcttgaaacctccagacacaagaaaacttctagcaaattcaggggaagtttgtctacactcaggctgcagtattttcagcaaacttgattggacaaacgggcctgtgccttatcttttggtggagtgaaaaaatttgagctagtgaagccaaatcgtaacttacagcaagcagcatgcagcatacctggctctttgctgattgcaaataggcatttaaaatgtgaatttggaatcagatgtctccattacttccagttaaagtggcatcataggtgtttcctaagttttaagtcttggataaaaactccaccagtgtctaccatctccaccatgaactctgttaaggaagcttcatttttgtatattcccgctcttttctcttcatttccctgtcttctgcataatcatgccttcttgctaagtaattcaagcataagatcttggaataataaaatcacaatcttaggagaaagaataaaattgttattttcccagtctcttggccatgatgatatcttatgattaaaaacaaattaaattttaaaacacctgaagataaattagaagaaattgtgcaccctccacaaaacatacaaagtttaaaagtttggatctttttctcagcaggtatcagttgtaaataatgaattaggggccaaaatgcaaaacgaaaaatgaagcagctacatgtagttagtaatttctagtttgaactgtaattgaatattgtggcttcatatgtattattttatattgtacttttttcattattgatggtttggactttaataagagaaattccatagtttttaatatcccagaagtgagacaatttgaacagtgtattctagaaaacaatacactaactgaacagaagtgaatgcttatatatattatgatagccttaaacctttttcctctaatgccttaactgtcaaataattataaccttttaaagcataggactatagtcagcatgctagactgagaggtaaacactgatgcaattagaacaggtactgatgctgtcagtgtttaacactatgtttagctgtgtttatgctataaaagtgcaatattagacactagctagtactgctgcctcatgtaactccaaagaaaacaggatttcattaagtgcattgaatgtggctatttctctaagttactcatattgtcctttgcttgaatgcaatgccgtgcagatttatgtggctgctatttttattttctgtgcattactttaacaccttaaagggagaagcaaacatttccttcttcagctgactggcaatggccctttaactgcaataggaagaaaaaaaaaaaggtttgtgtgaaaattggtgataactggcacttaagatcgaaaagaaatttctgtatacttgatgccttaagatgcccaaagctgcccaaagctctgaaagactttaagataggcagtaatgcttactacaatactactgagtttttgtagagttaacatttgataataaaacttgcctgtttaatctcaatgttt

SEQ ID NO: 39444 - DNA, 3450 bp, Homo sapiens
  misc_feature (1827)..(1827): n is a, c, g, or t
cccctctccccctccccacctatcgtcatgacggcctctccggattacttggtggtgctttttgggatcactgctggggccaccggggccaagctaggctcggatgagaaggagttgatcctgctgttctggaaagtcgtggatctggccaacaagaaggtgggacagttgcacgaagtgctagttagaccggatcagttggaactgacggaggactgcaaagaagaaactaaaatagacgtcgaaagcctgtcctcggcgtcgcagctggaccaagccctccgacagtttaaccagtcagtgagcaatgaactgaatattggagtagggacttccttctgtctctgtactgatgggcagcttcatgtcaggcaaatcctgcatcctgaggcttccaagaagaatgtactattacctgaatgcttctattccttttttgatcttcgaaaagaattcaagaaatgttgccctggttcacctgatattgacaaactggacgttgccacaatgacagagtatttaaattttgagaagagtagttcagtctctcgatatggagcctctcaagttgaagatatggggaatataattttagcaatgatttcagagccttataatcacaggttttcagatccagagagagtgaattacaagtttgaaagtggaacttgcagcaagatggaacttattgatgataacaccgtagtcagggcacgaggtttaccatggcagtcttcagatcaagatattgcaagattcttcaaaggactcaatattgccaagggaggtgcagcactttgtctgaatgctcagggtcgaaggaacggagaagctctggttaggtttgtaagtgaggagcaccgagacctagcactacagaggcacaaacatcacatggggacccggtatattgaggtttacaaagcaacaggtgaagatttccttaaaattgctggtggtacttccaatgaggtagcccagtttctctccaaggaaaatcaagtcattgttcgcatgcgggggctccctttcacggccacagctgaagaagtggtggccttctttggacagcattgccctattactgggggaaaggaaggcatcctctttgtcacctacccagatggtaggccaacaggggacgcttttgtcctctttgcctgtgaggaatatgcacagaatgcgttgaggaagcataaagacttgttgggtaaaagatacattgaactcttcaggagcacagcagctgaagttcagcaggtgctgaatcgattctcctcggcccctctcattccacttccaacccctcccattattccagtactacctcagcaatttgtgccccctacaaatgttagagactgtatacgccttcgaggtcttccctatgcagccacaattgaggacatcctggatttcctgggggagttcgccacagatattcgtactcatggggttcacatggttttgaatcaccagggccgcccatcaggagatgcctttatccagatgaagtctgcggacagagcatttatggctgcacagaagtgtcataaaaaaaacatgaaggacagatatgttgaagtctttcagtgttcagctgaggagatgaactttgtgttaatggggggcactttaaatcgaaatggcttatccccaccgccatgtaagttaccatgcctgtctcctccctcctacacatttccagctcctgctgcagttattcctacagaagctgccatttaccagccctctgtgattttgaatccacgagcactgcagccctccacagcgtactacccagcaggcactcagctcttcatgaantacacagcgtactatcccagtatgcaaccgaggatggacttatacacacaaatgaccaggccaggactctacccaaagaatgggtttgtatttaagggccccagcagttagaacatcctcagaaaagaagtgtttgaaagatgtatggtgatcttgaaacctccagacacaagaaaacttctagcaaattcaggggaagtttgtctacactcaggctgcagtattttcagcaaacttgattggacaaacgggcctgtgccttatcttttggtggagtgaaaaaatttgagctagtgaagccaaatcgtaacttacagcaagcagcatgcagcatacctggctctttgctgattgcaaataggcatttaaaatgtgaatttggaatcagatgtctccattacttccagttaaagtggcatcataggtgtttcctaagttttaagtcttggatatttttgtatattcccgctcttttctcttcatttccctgtcttctgcataatcatgccttcttgctaagtaattcaagcataagatcttggaataataaaatcacaatcttaggagaaagaataaaattgttattttcccagtctcttggccatgatgatatcttatgattaaaaacaaattaaattttaaaacacctgaagataaattagaagaaattgtgcaccctccacaaaacatacaaagtttaaaagtttggatctttttctcagcaggtatcagttgtaaataatgaattaggggccaaaatgcaaaacgaaaaatgaagcagctacatgtagttagtaatttctagtttgaactgtaattgaatattgtggcttcatatgtattattttatattgtacttttttcattattgatggtttggactttaataagagaaattccatagtttttaatatcccagaagtgagacaatttgaacagtgtattctagaaaacaatacactaactgaacagaagtgaatgcttatatatattatgatagccttaaacctttttcctctaatgccttaactgtcaaataattataaccttttaaagcataggactatagtcagcatgctagactgagaggtaaacactgatgcaattagaacaggtactgatgctgtcagtgtttaacactatgtttagctgtgtttatgctataaaagtgcaatattagacactagctagtactgctgcctcatgtaactccaaagaaaacaggatttcattaagtgcattgaatgtggctatttctctaagttactcatattgtcctttgcttgaatgcaatgccgtgcagatttatgtggctgctatttttattttctgtgcattactttaacaccttaaagggagaagcaaacatttccttcttcagctgactggcaatggccctttaactgcaataggaagaaaaaaaaaaaggtttgtgtgaaaattggtgataactggcacttaagatcgaaaagaaatttctgtatacttgatgccttaagatgcccaaagctgcccaaagctctgaaagactttaagataggcagtaatgcttactacaatactactgagtttttgtagagttaacatttgataataaaacttgcctgtttaatctcaatgttt

SEQ ID NO: 39445 - DNA, 2366 bp, Homo sapiens
  misc_feature (1827)..(1827): n is a, c, g, or t
cccctctccccctccccacctatcgtcatgacggcctctccggattacttggtggtgctttttgggatcactgctggggccaccggggccaagctaggctcggatgagaaggagttgatcctgctgttctggaaagtcgtggatctggccaacaagaaggtgggacagttgcacgaagtgctagttagaccggatcagttggaactgacggaggactgcaaagaagaaactaaaatagacgtcgaaagcctgtcctcggcgtcgcagctggaccaagccctccgacagtttaaccagtcagtgagcaatgaactgaatattggagtagggacttccttctgtctctgtactgatgggcagcttcatgtcaggcaaatcctgcatcctgaggcttccaagaagaatgtactattacctgaatgcttctattccttttttgatcttcgaaaagaattcaagaaatgttgccctggttcacctgatattgacaaactggacgttgccacaatgacagagtatttaaattttgagaagagtagttcagtctctcgatatggagcctctcaagttgaagatatggggaatataattttagcaatgatttcagagccttataatcacaggttttcagatccagagagagtgaattacaagtttgaaagtggaacttgcagcaagatggaacttattgatgataacaccgtagtcagggcacgaggtttaccatggcagtcttcagatcaagatattgcaagattcttcaaaggactcaatattgccaagggaggtgcagcactttgtctgaatgctcagggtcgaaggaacggagaagctctggttaggtttgtaagtgaggagcaccgagacctagcactacagaggcacaaacatcacatggggacccggtatattgaggtttacaaagcaacaggtgaagatttccttaaaattgctggtggtacttccaatgaggtagcccagtttctctccaaggaaaatcaagtcattgttcgcatgcgggggctccctttcacggccacagctgaagaagtggtggccttctttggacagcattgccctattactgggggaaaggaaggcatcctctttgtcacctacccagatggtaggccaacaggggacgcttttgtcctctttgcctgtgaggaatatgcacagaatgcgttgaggaagcataaagacttgttgggtaaaagatacattgaactcttcaggagcacagcagctgaagttcagcaggtgctgaatcgattctcctcggcccctctcattccacttccaacccctcccattattccagtactacctcagcaatttgtgccccctacaaatgttagagactgtatacgccttcgaggtcttccctatgcagccacaattgaggacatcctggatttcctgggggagttcgccacagatattcgtactcatggggttcacatggttttgaatcaccagggccgcccatcaggagatgcctttatccagatgaagtctgcggacagagcatttatggctgcacagaagtgtcataaaaaaaacatgaaggacagatatgttgaagtctttcagtgttcagctgaggagatgaactttgtgttaatggggggcactttaaatcgaaatggcttatccccaccgccatgtaagttaccatgcctgtctcctccctcctacacatttccagctcctgctgcagttattcctacagaagctgccatttaccagccctctgtgattttgaatccacgagcactgcagccctccacagcgtactacccagcaggcactcagctcttcatgaantacacagcgtactatcccagtgtttgaaagatgtatggtgatcttgaaacctccagacacaagaaaacttctagcaaattcaggggaagtttgtctacactcaggctgcagtattttcagcaaacttgattggacaaacgggcctgtgccttatcttttggtggagtgaaaaaatttgagctagtgaagccaaatcgtaacttacagcaagcagcatgcagcatacctggctctttgctgattgcaaataggcatttaaaatgtgaatttggaatcagatgtctccattacttccagttaaagtggcatcataggtgtttcctaagttttaagtcttggataaaaactccaccagtgtctaccatctccaccatgaactctgttaaggaagcttcatttttgtatattcccgctcttttctcttcatttccctgtcttctgcataatcatgccttcttgctaagtaattcaagcataagatcttggaataataaaatcacaatcttaggagaaagaataaaattgttattttcccagtc

SEQ ID NO: 39446 - DNA, 2968 bp, Homo sapiens
  misc_feature (1827)..(1827): n is a, c, g, or t
cccctctccccctccccacctatcgtcatgacggcctctccggattacttggtggtgctttttgggatcactgctggggccaccggggccaagctaggctcggatgagaaggagttgatcctgctgttctggaaagtcgtggatctggccaacaagaaggtgggacagttgcacgaagtgctagttagaccggatcagttggaactgacggaggactgcaaagaagaaactaaaatagacgtcgaaagcctgtcctcggcgtcgcagctggaccaagccctccgacagtttaaccagtcagtgagcaatgaactgaatattggagtagggacttccttctgtctctgtactgatgggcagcttcatgtcaggcaaatcctgcatcctgaggcttccaagaagaatgtactattacctgaatgcttctattccttttttgatcttcgaaaagaattcaagaaatgttgccctggttcacctgatattgacaaactggacgttgccacaatgacagagtatttaaattttgagaagagtagttcagtctctcgatatggagcctctcaagttgaagatatggggaatataattttagcaatgatttcagagccttataatcacaggttttcagatccagagagagtgaattacaagtttgaaagtggaacttgcagcaagatggaacttattgatgataacaccgtagtcagggcacgaggtttaccatggcagtcttcagatcaagatattgcaagattcttcaaaggactcaatattgccaagggaggtgcagcactttgtctgaatgctcagggtcgaaggaacggagaagctctggttaggtttgtaagtgaggagcaccgagacctagcactacagaggcacaaacatcacatggggacccggtatattgaggtttacaaagcaacaggtgaagatttccttaaaattgctggtggtacttccaatgaggtagcccagtttctctccaaggaaaatcaagtcattgttcgcatgcgggggctccctttcacggccacagctgaagaagtggtggccttctttggacagcattgccctattactgggggaaaggaaggcatcctctttgtcacctacccagatggtaggccaacaggggacgcttttgtcctctttgcctgtgaggaatatgcacagaatgcgttgaggaagcataaagacttgttgggtaaaagatacattgaactcttcaggagcacagcagctgaagttcagcaggtgctgaatcgattctcctcggcccctctcattccacttccaacccctcccattattccagtactacctcagcaatttgtgccccctacaaatgttagagactgtatacgccttcgaggtcttccctatgcagccacaattgaggacatcctggatttcctgggggagttcgccacagatattcgtactcatggggttcacatggttttgaatcaccagggccgcccatcaggagatgcctttatccagatgaagtctgcggacagagcatttatggctgcacagaagtgtcataaaaaaaacatgaaggacagatatgttgaagtctttcagtgttcagctgaggagatgaactttgtgttaatggggggcactttaaatcgaaatggcttatccccaccgccatgtaagttaccatgcctgtctcctccctcctacacatttccagctcctgctgcagttattcctacagaagctgccatttaccagccctctgtgattttgaatccacgagcactgcagccctccacagcgtactacccagcaggcactcagctcttcatgaantacacagcgtactatcccagccccccaggttcgcctaatagtcttggctacttccctacagctgctaatcttagcggtgtccctccacagcctggcacggtggtcagaatgcagggcctggcctacaatactggagttaaggaaattcttaacttcttccaaggttaccagtatgcaaccgaggatggacttatacacacaaatgaccaggccaggactctacccaaagaatgggtttgtatttaagggccccagcagttagaacatcctcagaaaagaagtgtttgaaagatgtatggtgatcttgaaacctccagacacaagaaaacttctagcaaattcaggggaagtttgtctacactcaggctgcagtattttcagcaaacttgattggacaaacgggcctgtgccttatcttttggtggagtgaaaaaatttgagctagtgaagccaaatcgtaacttacagcaagcagcatgcagcatacctggctctttgctgattgcaaataggcatttaaaatgtgaatttggaatcagatgtctccattacttccagttaaagtggcatcataggtgtttcctaagttttaagtcttggataaaaactccaccagtgtctaccatctccaccatgaactctgttaaggaagcttcatttttgtatattcccgctcttttctcttcatttccctgtcttctgcataatcatgccttcttgctaagtaattcaagcataagatcttggaataataaaatcacaatcttaggagaaagaataaaattgttattttcccagtctcttggccatgatgatatcttatgattaaaaacaaattaaattttaaaacacctgaagataaattagaagaaattgtgcaccctccacaaaacatacaaagtttaaaagtttggatctttttctcagcaggtatcactcgggataatgcctttggggccgttatgcaaacgacggacagtgcacacagctacatgtcatgtcagttttatctaatacaggatccacctgggacaacccagttataattactggagaataaggatgagatcgtttcggccagcaagactgtcttagtaatccgcattaccggatatacaggcgtggcgaggtcgctacgcgt

SEQ ID NO: 39447 - DNA, 2112 bp, Homo sapiens
  misc_feature (1827)..(1827): n is a, c, g, or t
cccctctccccctccccacctatcgtcatgacggcctctccggattacttggtggtgctttttgggatcactgctggggccaccggggccaagctaggctcggatgagaaggagttgatcctgctgttctggaaagtcgtggatctggccaacaagaaggtgggacagttgcacgaagtgctagttagaccggatcagttggaactgacggaggactgcaaagaagaaactaaaatagacgtcgaaagcctgtcctcggcgtcgcagctggaccaagccctccgacagtttaaccagtcagtgagcaatgaactgaatattggagtagggacttccttctgtctctgtactgatgggcagcttcatgtcaggcaaatcctgcatcctgaggcttccaagaagaatgtactattacctgaatgcttctattccttttttgatcttcgaaaagaattcaagaaatgttgccctggttcacctgatattgacaaactggacgttgccacaatgacagagtatttaaattttgagaagagtagttcagtctctcgatatggagcctctcaagttgaagatatggggaatataattttagcaatgatttcagagccttataatcacaggttttcagatccagagagagtgaattacaagtttgaaagtggaacttgcagcaagatggaacttattgatgataacaccgtagtcagggcacgaggtttaccatggcagtcttcagatcaagatattgcaagattcttcaaaggactcaatattgccaagggaggtgcagcactttgtctgaatgctcagggtcgaaggaacggagaagctctggttaggtttgtaagtgaggagcaccgagacctagcactacagaggcacaaacatcacatggggacccggtatattgaggtttacaaagcaacaggtgaagatttccttaaaattgctggtggtacttccaatgaggtagcccagtttctctccaaggaaaatcaagtcattgttcgcatgcgggggctccctttcacggccacagctgaagaagtggtggccttctttggacagcattgccctattactgggggaaaggaaggcatcctctttgtcacctacccagatggtaggccaacaggggacgcttttgtcctctttgcctgtgaggaatatgcacagaatgcgttgaggaagcataaagacttgttgggtaaaagatacattgaactcttcaggagcacagcagctgaagttcagcaggtgctgaatcgattctcctcggcccctctcattccacttccaacccctcccattattccagtactacctcagcaatttgtgccccctacaaatgttagagactgtatacgccttcgaggtcttccctatgcagccacaattgaggacatcctggatttcctgggggagttcgccacagatattcgtactcatggggttcacatggttttgaatcaccagggccgcccatcaggagatgcctttatccagatgaagtctgcggacagagcatttatggctgcacagaagtgtcataaaaaaaacatgaaggacagatatgttgaagtctttcagtgttcagctgaggagatgaactttgtgttaatggggggcactttaaatcgaaatggcttatccccaccgccatgtaagttaccatgcctgtctcctccctcctacacatttccagctcctgctgcagttattcctacagaagctgccatttaccagccctctgtgattttgaatccacgagcactgcagccctccacagcgtactacccagcaggcactcagctcttcatgaantacacagcgtactatcccaggtaaggctctgacagaggtggaaatgaggggcagaaacaaaggactcctttgatagccagtgcaagagctcacaaaagaatattgtctgccatgttgaaggttagcgtggcaggccacagcctctggtcatatctctgaccaagaaggttgtttcaagacaaagcaaaagcagtatagtttttaaccatatactgacagcatgatcttttaggtcacctatgtctacagctttccttttttacctctcctgtcataggaccccaa

SEQ ID NO: 39448 - DNA, 689 bp, Homo sapiens
cccctctccccctccccacctatcgtcatgacggcctctccggattacttggtggtgctttttgggatcactgctggggccaccggggccaagctaggctcggatgagaaggagttgatcctgctgttctggaaagtcgtggatctggccaacaagaaggtgggacagttgcacgaagtgctagttagaccggatcagttggaactgacggaggactgcaaagaagaaactaaaatagacgtcgaaagcctgtcctcggcgtcgcagctggaccaagccctccgacagtttaaccagtcagtgagcaatgaactgaatattggagtagggacttccttctgtctctgtactgatgggcagcttcatgtcaggcaaatcctgcatcctgaggcttccaagaagaatgtactattacctgaatgcttctattccttttttgatcttcgaaaagaattcaagaaatgttgccctggttcacctgatattgacaaactggacgttgccacaatgacagagtgtatcctttaaatcattactcaagaatcatttgaaaagatagttccagaaaaggtaattcaagaaactttcaaacattttaaattttgtcagcatatggataaaattggcctatccaaaatttgtttactctgctgagaaactaaaatacaattatagacatctttgaaagt

SEQ ID NO: 39449 - DNA, 408 bp, Homo sapiens
tcccagtgggggtcagggcgtgactggcctgagaggcagctctgccccatgggaggccattgaggacaggagctgggagaggagtgagtaggcccagccttgtgtcttggccctgccccataagccagagactggtggaagtaggctaaggaggatgaggggaagtccccagggaaagggacctttatacgatcccctccaatgagcccctgctgggccccatagatgaacccctgggctgaggcctggcgtgcgtctggctcaaagcagagtgtccccaaagccagctgactctcagaactctgcagctgtaaccaggccccactcacacagtatgacctgtgctcacacacctgtgctaggacgaaagcactttccactcctgccggctggcacacaggaggccca

SEQ ID NO: 39450 - DNA, 307 bp, Homo sapiens
tctcagactgttgccctgcatgaatcaagaatttggctagtgcctcgtgatgaaggtgctggctgtcaggcatacttcttctctaggctttctctcaaggaacttggcttctcaaaatcaacttattttgtcctaaaatccagtctttataccccaagtcctttgaggttgacaaagctctgctggattattggcctcttcactgcttggctacttcccatatccctatcactcccctccaacctacctagatgcagctaactaatagactgagggaaaacgtggcttgcagaatatgagcttattc

SEQ ID NO: 39451 - DNA, 302 bp, Homo sapiens
tctgggttagaagtacattatgttatttccaaacatttcaacattttctggatatcttttagttgtaaatttcttgttcagtttcactgagggcagataatacgttctatatgatttcaaacatttgaaatttgttgagacttgctttgtgtcccagcacttgttttctttctttcttcttttttttttttttttttttgagacagtgtctcgctgtgtcacccaggctggactgcagtggcatgatcacggttcattgtagctcaggagttcaaaaccagcttgggcaacttagtgagacc

SEQ ID NO: 39452 - DNA, 346 bp, Homo sapiens
aagaatcgcgtctcaaatgcaaggcctacacaagagtatttgtttcttgagctgaaagaagtgaccagaaaatttagtcacgttccttggccaaaggcatctacattaggaaaattaggtgctttctgcgtttctgggagaatgagttgatattggcatacaactaactttcttttggaagagtttccatggaaaggtggtcattagatgaaatggtagttccgtctttcctgcaacataactcttgggagcatctgagaggaaggttaggagatacttgctattcccaaaactcattctcatcagaaactttaatattccaaggtaagaattttcttattcagta

SEQ ID NO: 39453 - DNA, 244 bp, Homo sapiens
atcccatctctactaaaaatacaaaaattagctgggtatggtggtgggtgcctgtaatcccagctactggggaggcagcggcacaagaattgcttgaacccgggaggcggaggttgctgtgagccaagattgggccaccgcactccagcctggatgacagagtaagaatctgtctcaaagaaaaaatatatgtgtatatatatagtattaccacccaagggattattacacagccactaaaaaa

SEQ ID NO: 39454 - DNA, 430 bp, Homo sapiens
taaatagatttttcattcttctagctttattaaagtatgatagacaaacattgtatatatttaagatgtgcaacttcatttctgcttcatttttttctgttctaatcttccttctcctaaatctagagcaagagtctcttgtaacagcatagaattggatcttggttttctttttctctgtttaataagactttttttttttgcccccacaatgacatttgtttctaatcttcctttcagaaccagaaaatgtctgaagatgttaagatcccctgattactttgagaaaaacaactaaaacaagaaccgtgtttatcactgttgtggagatttccttttattcttgacacaatttgatgacctaaagtgtgttttcttctgtgtaaagtacatgagctgcctcactaagcattcccaactcattgaatgt

SEQ ID NO: 39455 - DNA, 782 bp, Homo sapiens
gaggccgggtctcacaatccgcttggctggggagtccactgaggttcttgcatcctgaagcaaaccatggagagctggtggggacttccctgtcttgcgttcctgtgttttctaatgcacgcccgaggtcaaagagactttgatttggcagatgcccttgatgaccctgaacccaccaagaagccaaactcagatatctacccaaagccaaaaccaccttactacccacagcccgagaatcccgacagcggtggaaatatctacccaaggccaaagccacgccctcaaccccagcctggcaattccggcaacagtggaggttacttcaatgatgtggaccgtgatgacggacgctacccgcccaggcccaggccacggccgcctgcaggaggtggcggcggtggctactccagttatggcaactccgacaacacgcacggtggagatcaccattcaacgtatggcaatccagaaggcaatatggtagcaaaaatcgtgtctcccatcgtatccgtggtggtggtgacactgctgggagcagcagccagttatttcaaactaaacaataggagaaattgtttcaggacccatgaaccagaaaatgtctgaagatgttaagatcccctgattactttgagaaaaacaactaaaacaagaaccgtgtttatcactgttgtggagatttccttttattcttgacacaatttgatgacctaaagtgtgttttcttctgtgtaaagtacatgagctgcctcactaagcattcccaactcattgaatgt

SEQ ID NO: 39456 - DNA, 918 bp, Homo sapiens
gaggccgggtctcacaatccgcttggctggggagtccactgaggttcttgcatcctgaagcaaaccatggagagctggtggggacttccctgtcttgcgttcctgtgttttctaatgcacgcccgaggtcaaagagactttgatttggcagatgcccttgatgaccctgaacccaccaagaagccaaactcagatatctacccaaagccaaaaccaccttactacccacagcccgagaatcccgacagcggtggaaatatctacccaaggccaaagccacgccctcaaccccagcctggcaattccggcaacagtggaggttacttcaatgatgtggaccgtgatgacggacgctacccgcccaggcccaggccacggccgcctgcaggaggtggcggcggtggctactccagttatggcaactccgacaacacgcacggtggagatcaccattcaacgtatggcaatccagaaggtaactgattgactcacccggtcccaacctttaataagagcacactctcctagatcagtgctgggaggagctgtgtgggcttctgtttcccaacctcatgactttcacggagcactcatactttgtatgtatataaagtagctcctgaataaaaatatctgaccttcagcacaggaccaatcagagttcagagaaaggagaggcaagcattggttttcactgcagaagatgccccttagctctcaaagcaaggctgtgaatgagtgctgagactattacatttctcccagtaccaccattactcccctttctttgaccagcactaacttgaaacccaagaaggacaggagaaaggaaggtatgaacactctgcccaaagaagccatcagagtgcactgtcaatcccgtctcaggtcaaaggagggagaacttgaagcccagaa

SEQ ID NO: 39457 - DNA, 379 bp, Homo sapiens
ggcgcctgtgcaccttccctggccttgggagagcattggaatctctgcagcttttaagagcatcttgcttcaggtttgctgacctgcttgcttctgtaagatcatgcagacttcctgagcaatatctagcatttcatggtctcttttctatcctgcaggaagagggggctatagacccaactctcgttatggaaatacttatggtaaaggaattatgtcttacagaatatgtgaggcaaaactgtccatttgcaaataactaacacactgtctgcactgatgggaagctgatgctttcatccagtgcacaaccaactggccgttcgagtctctcatttgcattttccttggtcatccatgctggggggagatgttgtgc

SEQ ID NO: 39458 - DNA, 827 bp, Homo sapiens
gaggccgggtctcacaatccgcttggctggggagtccactgaggttcttgcatcctgaagcaaaccatggagagctggtggggacttccctgtcttgcgttcctgtgttttctaatgcacgcccgaggtcaaagagactttgatttggcagatgcccttgatgaccctgaacccaccaagaagccaaactcagatatctacccaaagccaaaaccaccttactacccacagcccgagaatcccgacagcggtggaaatatctacccaaggccaaagccacgccctcaaccccagcctggcaattccggcaacagtggaggttacttcaatgatgtggaccgtgatgacggacgctacccgcccaggcccaggccacggccgcctgcaggaggtggcggcggtggctactccagttatggcaactccgacaacacgcacggaagagggggctatagacccaactctcgttatggaaatacttatggtggagatcaccattcaacgtatggcaatccagaaggcaatatggtagcaaaaatcgtgtctcccatcgtatccgtggtggtggtgacactgctgggagcagcagccagttatttcaaactaaacaataggagaaattgtttcaggacccatgaaccagaaaatgtctgaagatgttaagatcccctgattactttgagaaaaacaactaaaacaagaaccgtgtttatcactgttgtggagatttccttttattcttgacacaatttgatgacctaaagtgtgttttcttctgtgtaaagtacatgagctgcctcactaagcattcccaactcattgaatgt

SEQ ID NO: 39459 - DNA, 354 bp, Homo sapiens
gctgcttgcaaatactgcatggcaagcccagtgctgtggggtgaagaaaactccctgctcttgacctagcaaccacgactacagtgacaactactattagtattaccacaatactactatattacaaccacagctgctacgattgccatataacaggtaactgtggtcatctcttgccctagaccaccaaaacacccttctacactactactctgcttctcctctcctctcacgccattgtccacccagcagccagaattcaccatttgaaacataagacatcacttgctagctcaaaattcatgtgacttcccatttcacttctagtaaaagccagcagcaatttttatgacc

SEQ ID NO: 39460 - DNA, 648 bp, Homo sapiens
cagcagcccaagcaacaaggggaataagattagccacaggtctggcatgttgcccagttgccaggcacttgctggcagcgagaaatttctcttgtgcatctcctacaaggactgcagtctgtgtagtagctgacaaactcacagcctcagaaacaggccaagggaaaaatgcaaaagcaagttccacatggctcagtggggaggctaatccgtatataaaaatatatctttatagctctgttcactgaaaaggccccgaaataatgattaagcctgtggcattgagcatccctagctcccagatgctggtctggagatgcagtttctcatggaaaccgacttcttggagaagtggctggctctgggtctgggcaggaagtgtatgagatgatcttggagcgcctgtcctggcagatggcaaggaggccatcagagactcctggggccatgtccagagccctcaggagccagcttgaagaggttccaccggccgcagagcttctatgatgacactagttgccatggatcgaaacccacccagtgtgtttaaatcagagctcataatggtattttttaaaaaagaacgtgtcatctttgaaggatgaaagggaaccgatgtattatgctgaaaactggtaaagaaagaaa

SEQ ID NO: 39461 - DNA, 498 bp, Homo sapiens
actaaaaatagaaaaattagctggcgtgcatctgtagtcccagctgctggggaggctgaggcaggagaatcgcttgaatctgggaggcggaggttgcagtgagccatgatcggaccactgcactccagccagggtgacagagcaacactatgtctcaaacaaacaaaaacacgacaacaaaataaagcttaaggaacatcaaccaaatgcaatatatgagccctatttaggatactataaaaagacattcacaataacacaggcaaaatgaacataaactaggtataggtgacagagaaatccaataaacattgaattattcactggggaaagaaatgatgtgtgggatttaagtctctaactctcccctatttacgccaaaagattgtccatgagttgaaaacttagagatgggtgacaacgcaagagagattatagtgtcttccttgtatgcttgtaaatgtcaaaaataaaagtaatttaaaactaaaacaaaca

SEQ ID NO: 39462 - DNA, 353 bp, Homo sapiens
gagcaccaatttgagctaattctggaaaaaaaaattctgaaatatatagaatcctgtagccttaataatgataaatcttctaagtgataaaactttaaaataagtaccactagtgacaagcagaattatttttattaaaaaattttatccatcttattcctttttaccaactcacattgtactctttaataaaccttattaaggaagcactagtatattacattagctaggtgtaattttcacacataaattatatatgctgtattcagcaaggccagatttctattcaaacttaaccctctgaagtaaagttgtaaaactggaaatcaatgaaaaagacctataaagaactg

SEQ ID NO: 39463 - DNA, 607 bp, Homo sapiens
gattcgagctccgtacccaagcccttgtcaatgggaccaaccccccttctctttgcccttcctaacttaatccctttttttttttcctcctcagatgattcatactttccttgcccttattatgtctgcagtcagttcttaactctcttctgactagtttggtttttttcaccttctatatcttccgattgctcctccaattcctctcacactttgcgcttctcataccctatgtcctgaactgctctctgcaacccaccaaccccagtcctgaactgtgcatcaccagcgtctctgacccactgccacaaacctggtcattctactcttctctaccagaggacaggggagaagcaaaaaggagcaaagtatgtgagaggcaaggaagctaagcagagctaagaagcacctaagaggctcacaacatattagtcctgaaaaaggtttgtggcagaccactgaattcaaaggcatctaacttggtatgtccacgctggctctcctcagtattccagcccatttccatgaggtccaaccatgttccacttccagtgttccctattgcaagatgagaccatgactggctgcccaagccagaaatctgagg

SEQ ID NO: 39464 - DNA, 554 bp, Homo sapiens
catggacggggtatgaggaagcggatattgtcacattctcagcctgttgcggctagtgagttacatggagcgggcgctcccggaagatgctagtaaaactcggattagtgactgagtgtttttggaagttcttcctggcactgtgtagctagtttcaatgacttcaaagtggttataggaaggacatggtagcgagctgatagaacatattggtgaatgcttttacaagtaaatcagatcagctctgcttcctgagggatggggatgaaatgatttctcactgtgctgagcagtttagatctggaacatgacggccatcagtttagtggcagaagtgcatggtgatgatgctctgtttacacatctgttccattaatttgtatttattcactcattcaacaaatatatattgggctctcctataggtcaacttcagggctatattttttgtttctgatgaggggagcaaatatacagaagtgaataatatatggaccttgcctttgaggagctcggagcctaataaagaggttcccaaactttctcaacttata

SEQ ID NO: 39465 - DNA, 360 bp, Homo sapiens
ggcactggattcaggcactggagggatggccttgggcacactgtgtacacgtgaaagaggatttgtggggaagaaaaaagcagaaaagagaaagatgctatcaagaactatgggtggggatgcagggcagaattggttaaggaactggtttgtgctacagatacaggctcaggcagcgctatgttctgacttattcctgtgttcacacaatcagaagagattatgatcaggtagtccaagaaacctgggttggtgaaaaaaacaggttcccgatagagattcattgtctacagtttagataagccaggagtcttctaggcacctgtgtatgttctcggcagaaatctctaggaggaaagc

SEQ ID NO: 39466 - DNA, 1307 bp, Homo sapiens
gtttggttttctgtgtctttcagggtgagactggtgtattctataccagcctccctgtgtgtgaacaatgacgagaacaatgttgtcttgctttcccaaaaaataagacactatctatttctcattagttatacacgttcattataaaacgtaatttaagcaatactgaaatgccaaaaagaaagtaaaattcactccaaaagtaaaattcaccccaaatctcactactcctgtaactatgtctgacagccagctgttgggtcttccatcgtttttaaccttcaggtgagcacacagatccttattttttcttttcttttcttttttttttttttttttggaaacgcagccggggcaaaagagggaagattcttgaccaaaaaaagaaatttgggacaggttccaagggcttgagaaggtattttatgtgtggccagggggataaagacgcttgggtgagaagggcgtataaaaagacataaaaactatatggaaagattgcccttttatatacgtgctaagataaagctgtgcgtggaaaaccaaaagaaaggttgtttactcggcggcatacgagggggaacatgtggagaaattaactaagataatacacatatgttgaaaattcaaaaatataagggggttaacattgcgcgtctggcgtaaaggtggaaccgcacaatacacaaccgatacgtgcccacaaaacaccctggcccaaaacgggtgattcaccaccgcggaaaacacccggaggggcaaaaaagcgggagcaacaaacttcaaaaacaaaccgaggatctggacctttggcacacatcaaatcacaagggcaggacacataaaaaagttgcggggaagaaccacaagacacccaatagggaaataaccagacgggacacaccacaagataaaggcagcactaggagaaaagggcactaaaacacacaacagtctcttacacaccaggggcacaactaaaaacccgccgctacataaaaagataacagagccacaacaaacgggacaatagtgaccccagaaaaacaaaaaaacagcgcgcgcgcaaaaaaaaaccacccaagaggcccaaacaagcgaccccgcactgtgccaaacatgccacaaacgacaaaatacaacaaacacgaggaacaacagacgacagacaaacaacagaagacgaagaacaaacaccgtgaacgagaaacaaaacacacaaagaagaaacgcgactaagaacagcagaaacagagtgaacaacagaaaacaagaacgacacaaaccaaaacagacctcaaaggacc

SEQ ID NO: 39467 - DNA, 334 bp, Homo sapiens
cctggactgcttatccaacaaccagtgtagttgacctcagagaataatccaaaaaagtggtaagggctgaatcaagcttaataagtggcctacctcttgcatctgcaagatttgtcttgggaacactgtatgacacaactgtggctgcagttgcagctgaactgttatggttcagaatgttccaaagctcaggtcttcctcttcttaactgtctgccattcttctttccttgaattatctttctttaagctctttattcatttttctttttatcctctcacctttcacttttctgcctatgaggaaagacaaaaaacaataaaaggaagccttg

SEQ ID NO: 39468 - DNA, 261 bp, Homo sapiens
gtcctgtctccataaattctttattaattgctctggtgtgtggccagagcaatttcttcagatattctgaagttcagccagggttgagaaccactgccctaaggcctgttctcaacgccttaagtagttttactgcaaaggcttctgtgtccctgggtcagccacaagtatcaagtcacataagaggactgaacagtgatacaggagactccggtttgatttccagccctcttgctgactagttgtgtaactttggataca

SEQ ID NO: 39469 - DNA, 378 bp, Homo sapiens
ccaggatggtcttgatctcctgaccttgtgatctgcccgcctcagcctcccaaagtgctgggattacaggcgtgagccaacgctcctggcctggctagggaaatattaataaaatggcagaggtggagacagatgttaaagaagtggaggcattgggtgctattttgagaagcattgctctgaaggaaagaagggagaagacagtagtttgtacaggaagcaaggttgttgggagagagttctccacggatatctcacatttcttcatgtttcatgagtaaggcactgactgcctttgttctagactgttttctcaaggatgtttatatagtgagcacccttgaaagacagagatagtatctccctccacagctcaaa

SEQ ID NO: 39470 - DNA, 179 bp, Homo sapiens
atgggcttaatcagtatttattaatgattcatttctgtgctgtccaatatagtaaccactggtcacatgtggcttttgatcatttgcaacacggctagtccaaatgagatgtattgcaagtgtaaaatacattttgaagtctcactataataaaagaatgtaaaatgtcttaatgatac

SEQ ID NO: 39471 - DNA, 147 bp, Homo sapiens
ccttcctgtgtctcagtggggccatggccagcgcctcagggtctgagaagcctgccctgaccaggggtgccttcttcagatgacccaccatggggacaaaatctctgcttctcctggactgaattgggagccacgaggagaaccagt

SEQ ID NO: 39472 - DNA, 340 bp, Homo sapiens
gcgcgcgcacgtttgtttttgtataccccatctgaccacaacagctgttgggtttgtggcacttcactccagactaaaagataagtttgtctgtacctggcctctcaaaaacgtcatttggaaagttgtttcctaatatgaggggttgggggaagggagcagcggaagacgaggagagggtgccccctttctgtaacttcccagctacagcagagacagacaaatctcacactgtaagccgagacaggctggggattatctggctcactcctgatttaatacatgaagaaatgaagcctcagagaagcccagagcttgccctaagccagacagctgaacc

SEQ ID NO: 39473 - DNA, 450 bp, Homo sapiens
ctaatgtaatgtaaatgctatgtaaatagttgctttactatattctttagggaataatgacaagaaaaaaagtctgtgcatgttcagtacagatgcaatttcttgtttttctaatattttctatccactgttggttgaatccatgcatgtggagtcaacctatggatggggatggcagactgtactctcctgacaggtggttacaaagtatttctatctgaaaagagctggctgcaaagcagcatgcccagtataactttcctcaggcccagggaaaagcttggagggaggttcccacagaaacattagcagtggtttcctgggccagtgggataaggaccaggcattgtgctagcagtggagaaacagtggtgaataaggtaggtctggctctgtctcctggagcttactggactgaagatgaacctttctccactaatttttattctg

SEQ ID NO: 39474 - DNA, 169 bp, Homo sapiens
ccatatttgtgatcttttagttcatgggttaaatcatttggcagttactttttctttaaaatcaactttattgaaataaaatctatatacaataaaagtcactttttaaaagtaaaaaattcaatgagctgtgatagatataaactatcaccacaggtataaccatctc

SEQ ID NO: 39475 - DNA, 1047 bp, Homo sapiens
ttctccattgccatgtatcaaaccattccaaaacgtgtggttaaaacagtattctcataattctctgggttaacaggactcagctagatgtctttagtgtcatgtggtaccagcaagggccactcatgagggtgcgttcagctgggagtctggcggggttgaaaccttcaagagacacaagtctgggcttttagtgctgtgactagagcaccttggttctcctatgcatcgtctctcaccattcagtaatttagcccaagcttctcgtttggaaacgtgtcagcttattttcaagagcaaaagtggaagctgccaaaatatcacttccatatcctattagtcaaaacaagtcacaagttcagccctcactgtagaaaaaaatagaccttattggaaatagcacgtgcacagaggatgagagcaactgttggtggccatctttggagatgatctaccacacctctaaatttgtgagataagagtgtaggtttctgataactttggaattgaatgtatggtaagctgtttgcagaaacaaatgtccaattaagaacaaagactggtttcttggaatgaacatgacttgtcgaggataaagatgtttatatctcacatggaacatttgtgaggagccatggagccagagttgtacaatagtacaggttattttctccattcttgggcacaagtaaacaaatccgcaaacccccaaatggtaacaacatgacctggacttaaaggtattgcacaagaggttaggggcaaactgatgttttggcaccagggacatttctcatcgctgggcaatcctttgtttccttcttggtgacattcattgggattttgttgcagataccacacaggaagaaggctattaaactgcccctatcagcaggaaacagtctggaggaggcagtcacacataattttgtgaaagaaagtgctgaggcaaaaccagctgaggtccgattccatgatcccaatgaacagcaaagcaaagggtggcttctagaagtcctagcacacatcacatactatcattcagca

SEQ ID NO: 39476 - DNA, 940 bp, Homo sapiens
taggcactcggctttataaatacatatggttgatgtacttaagttagcctgcaaagactgagattcttgaactgtaagtcaagttgtatcagtggtaggtcattgttgatgtaacagtaactgcataaagatgaatatagctactttaacagtttcatagcatttatagcacatggtcctttgaaactctgttagtgttaggtgaattgattatcactgaaaatatcatgccactgtggttgcttgtaaagttttgtgtcgaagttttaaaaatttggggatgctagaaagtttgataaatctgctttgaattttgtctattttgtaggcaaaatactgttttctcagtaagaccaaatgagataatacatataaaagttcttcataaatggtaagaaagcatgcagatattaagttgttgagataggtaactaattaatacatggacagaagcttctgtctttaaatgctaactttttccatatcagttgagaaagtaatacatttaaagtgcaccctggacactatagtttttttatttttttattttttgagacggagtctcgctctgtttcccaggctggagtgcaacggcgtgatctcggctcactgcaacctctgcctcccaggttcaagcgattctcctgcctctcagcctcctgagtagctgtgattatagaggtgtccgccactacgcccggctaagttttgtattttgagtagagacggggtatcaccatgttggtcaggctggtcttgaactcctgactcaggtgatccacctgccttggcctcccaaagtgctgggattataggcgtgagccaccacgcccggcctaaatttttgttttttaaatactgctgtggttaccaaaaatgtctttgttatagttttgaagctgcttttgaaaaaatgctgcctagtcagtttctcataatt

SEQ ID NO: 39477 - DNA, 252 bp, Homo sapiens
gagtcagaacagaaaaaaatagagtaattacagttgtgatgttgtaaaccagagtggcccatagacccctgggggtccctgacaccctttcagaggatctttgagatcaaaattattttcataatacttctaagatgatacttgcttatttcacagtgttgacatttgcactgataatacaaatgcaatggtgaacaaaactgctagtgtcgagacagtgggaccaaagtgtactaatagtattgtattaaa

SEQ ID NO: 39478 - DNA, 415 bp, Homo sapiens
ctcccctaattgctgctttcccagccactcccattgtgcccatcgcccgagagcatttcaggatcatttctctcccctgggaagtgcttgtagtgagaaacagagagtgaagctgtttatcacaataccccaggcttaaccctggaaagatatttcacttggtttcaggccttttgaaaaaaggagagtgctaactctcttaacagagcttttgttcggttagaaaaacaaaacaaaaaaccaaccccaaacaattattttaaaaataaataattaaataaataaaggcttggcgaagtggctcctgcctataatcccagcactttagaaggccaaggtgggtggattacttgagcccaggagttcaagaccagcctgggcaacgtggtaaaatcccacctctactaaaaaacaa

SEQ ID NO: 39479 - DNA, 453 bp, Homo sapiens
tagggtcggcgtgggcaagtcatttctcttcctcaccaagccttcttccatttgaaaaggaagagatgatactacccaacttgcctgcaaatggattagccagggcaaactttgcaaatcaaatgcctttgcattcattaacgcctcccaggcagaacgtaccctccctagggcaatgaaatgttcccaaggtttatggagctcagaaactctcaagggagaagggcgggagtcctcaagaatttgtttcttgtttggtctcagaggagggcaactaagccccaagtgtggggagagctgctgttacaggccacaaggaaggatggctccagagaaaacacaagtgacagctgctgctgaacatgttttgaggaccttgggacaagtttcactgcctctgtggggaaggggaacaaagttcttgattttcctctgagactcaaagaaaatttg

SEQ ID NO: 39480 - DNA, 1249 bp, Homo sapiens
agaaagagtagtttttggtaccacagtggtattaggtaaacccaggaaaataatgtcagcacaaggtgagggtgtgctgatggattataatatcctttcttagagaatcaattaaacttgcttagggtcttttatcgattttggcttataactggactaggataggtcaaagtattcaaggagtagaggcatagctggctaaaaatagtgaagcaagtatggaatcctgtctttctgagatggctgtgaaatgttttagttttgatatactgcatgacttttacagaattaattggcattgtgattaggttgttttatttcttcactcaaacatgttggaagccgattctaatatgcggtagtaatgaaaatagagtaatgctgtaataatagtgccattgtaaagtgaattacaccattaagcatctattttgtctaatttgtattgtggtagtgtgagtgatacacacacatgcagacgtagaggagctggtctttaagaaatagactctagctgagaagagaaaccccagtcctataatattgaacagtcagtgaacaaaaataattggttctgtgcaaagtgaatttatttatacatatacatatatatacacagccacatatataaatatacacacacatgcacacatacatattgtgtcaggcagatcaagaagatatatgactttggcataaaaaaatgcttggcttatgttgccttttaacaagttgattatgaatggggacacatattaattatgacaagtcaagtcaatgatggcatcaatgccaggctttgaaaacaaggctttctacgtttgtttcaacctcttcatccttattaccatgtctgagaacccctattaactggtatttctcaagttttggaaagaagtattaagggcccaggaatgatcattttattttgtcatttatctcctaaggaaggacatttgtcaaacaattttctttccacagcagaaagatagaggcacatttctatgccttaagtcacacatgaaccctaagagcagaaataggacctgagaaggcagtgtccaacatggctgctcccagtgggacaggtagatttaaaagtacaagaagggccaggcgcggtggctcacacctgtaatcccagcactttgggaggctgaggcgggcggatcacgaggtcatgagttcgagaccatcctggctaacacggtgaaaccccatatctacctaaaatacaaaaaaaaaaaaa

SEQ ID NO: 39481 - DNA, 248 bp, Homo sapiens
  misc_feature (129)..(129): n is a, c, g, or t
  misc_feature (131)..(132): n is a, c, g, or t
gaaagaccgcttctctttctaacacagcctcactcccacacctgcccctggacaggacagcgcagagggcaactagggtgccccatttctgtgcacaaaggctgtccctaagctcaggtgggagattgnannggggatgcaacccctcaatgcctgttccttccatctggctaagcaagcggagaggcagggagaagttctgcttgtgatcactgctccaaagtcctttctcagactcatccctgctc

SEQ ID NO: 39482 - DNA, 292 bp, Homo sapiens
aggctgaagtgggaggatcacttgagtccgggaggcagaagttgcagtgaacagtgaccgtgccactgcactccagcctaggtgataaagcaagaccttgcctcaaacaaaaaaaaagcaaaccctgaaaagtctacatgcatattgaatgtttaaaaacatataaaatgaattagataaagcaaatatcttgaaagataaaactgtgaaaaattttatactaagaaatgagccaacttatttgacattgataaattatttcctagagaaaagtgtaattgaagtttgacta

SEQ ID NO: 39483 - DNA, 804 bp, Homo sapiens
ccatttcccccactcctcccctttctagcccctggcaaccaccattacattctccacttctgtgagtttgactattttagattccacatataagtgaaatcatacagtatgtgtttctctgtgtctggtttatttcgtgtagcataatgtccttcagattcattcatgttattgcaaatggcaggatttccttccttttatggcttaatagtattctactatatgtgtctatttgtgtgtgtaccaccttttccttttccattttttatatttgtaaatatgttttcatattcataaaagtaataatcttcataaaaattaattgaagtaaaagtcccacattaatgtgtatgcatatataatttttctatttaccctaatcaacctgacaagcacattggcatctattctataaatgtaaagatcttgtctctatttagttttgtttaaacacaactttaggaatctgtactgaagagttcagatcaatatgattagtttaatatagaaacagaagctattacgaagagaaaatattgataaattttgagccatttgcatacacaggaggaaaatatttgcttgtcaaggaattttaaaaatcaattattaaaattgtcagtacatttttacagcatatccttgtacttcatgggttctccaggtaagggacatccaaagaggtggacacatttataatatctcaagttttccagccaagttacatcagaatcacttttttatgcttcctcaacaaccaacatagcagcagcaacactcatttctttgaaaagatcatattta

SEQ ID NO: 39484 - DNA, 462 bp, Homo sapiens
tgagatggagtcccgttcagttgcccaggctgctggagtgcagtggtgatctcagctcactgcaacctccacctcccaggttcaagcgattctcctgcctcagcctcccgagtagctggattacaggctcccggcatcatgcctggctaattttttttgtatttttagtagagacggggtttcaccatgttggccaggctggtcttgaactcctgacctcaggtgatccatctgcctaggcctccaaaagttctggtattacaggcgtgagccaccgcacccagcccctttctttcttcttcacctgtagtgttgctctagtttcttgtagctcagcaactgggcagtgaaagaattggtttccctgaattatttgggggaatttatttatttcacagcagcaggaattatttatctagcctaggctgccagacacttctgagcatctagtcatttggaggt

SEQ ID NO: 39485 - DNA, 416 bp, Homo sapiens
gcacttacttgctttggaacttcgggcttttaaatctcgatttctttgtgtctcattttgctcatctgtaaggtgaaggtagcagtactgtgcttccccaggcagcttgcacaatcactgagctgccaactcggagttcttggagcagtgctgacagtgagcgcagtgttggtgtttacttgagtcatcgtcgtgtggtcatgatgacgagtcacaaagatttgagtcctatttggattttacttgtatctgacctgtttttcctttttctttttttttttatttgagacggagccttgctctgtcaccccagctggagtgtagtggtgcagtctcagcttactgcaacctccacctcctgggttcaagcggttctctcacgtcagcctccagagtagctgggattacaggcgtgt

SEQ ID NO: 39486 - DNA, 362 bp, Homo sapiens
tggtggacagagtctcactctgttgcccaggctggagtgcagtggcacgatctcggctcactgcaacctccgcctcctgggttcaaacaattctctgcctcagcctcccgagtagctgggattacaggcacccgccaccatgcccggctaatttttgtatttttagtagagatggagtttcaccatcttggccaggctggtcttgaatttctgacctcatgatccacctgcctcggccttccaaagtgctgggattacaggcgtgagccactgcacccggcctcaaagattcttttggctgttgttgtgtctcttgatgtttaatgaggaaactgaactaagtgctatggtcccttcatatc

SEQ ID NO: 39487 - DNA, 495 bp, Homo sapiens
gagtttcaccatgttggccaggctgcgaactcctgagctcaagtgatcctcccacctcagcttcccaaagtgctagcattacaggcatgagccaccacacctcaccagatttttaaaaaatatataactgcatctctcttgattctggggcttggtaaaaatggatagataagatagtattctaaattcaaattcgtggctaggcacagtggcccacacctgtaatcccagcactttgggattccaagacagaagactcacttgagtacagtatgagaccagcctgggcaacatagatcttgcctctacaaaaaaaaaaaaaaatagccaggtgtggcacatgcctgtagtctcagctgcttggaaggctgaaatgagaggatctcttgagcccaggaggtctaggccagagtgagctgtgatcgtgccattgcactccagactgagtgacagagtgagactgtgtctaaaaaaaaagtttgaattaaaaaaaaa

SEQ ID NO: 39488 - DNA, 327 bp, Homo sapiens
gaagctggtctaagagaggaagaaggaaggaaaggagacgccccctcttctgcccaacaatgcaaagaagttaagttgactagtgctggagctgggagccaaacccaggctggactcttaaccagctgatctaagagaggaagatggaaggaagggagaagctcccacttctgccccataatgcaaagaagttaagctgactagggctggagctgggaaccacagtcaggctgggcccgagttttaaccatgtctgcagggctgcctcccaaaaaggcagagagagaggcggaaaagggggatggagacagctgaagagagagggag

SEQ ID NO: 39489 - DNA, 298 bp, Homo sapiens
aagcacaccaaatggaagacaagttctcaatctagtctgaggatttaacttgtaacttggctttcaggcttcaaactgtcttcagctcggaggtagggtttcactgggggcccaccccagtctgcctaggtatttggctgactcctgtactcttgagagggatggcagatggcacgttgtttcagcatctgaaatataatgtggatgggcaactggaaagacaaaacagcagcagtggcatgaacagagcttagcacagaggggacaacacacaaatcgttgatgaatttttaaaatg

SEQ ID NO: 39490 - DNA, 250 bp, Homo sapiens
tccatgtagaacaaagaagagaataagaaaataatcatctggcaaccatcaaagtaataattgttcaaacacaagtcatccatgaaatgctaaatctagtgggttctgaggagttaccagatatttacagagcctcaaagtatctccatacaaaatacggttgaactacaaaaagaaaatcataacattagtatggacaaacctggcaggtactccttaagtctcctaagtaataaaaactgtaaaatgc

SEQ ID NO: 39491 - DNA, 423 bp, Homo sapiens
tttcacaattatgggcaatgccatattctatctttgtggaaaagctttttcagtatttaggattatttacttgggatcaagttccagaagttgaattactgagtcacggtttgtataaacaatttttagacatcctatacctatcatcaaattgctttctccaaagcactacctgtttcagcacaccttgtgaaagcactggacagcctcttttttataaagcttttctaatcacataagtaaaaaacagttatttcatatggttctatttgtaagtctttaattgctaatattatttccccaaatatgtattagacatttacatttgtggttcttagtcacctggccatatcatttatcaatttatttattcactctgtattccttgggcccacagaacacactgttctattccctgcatga

SEQ ID NO: 39492 - DNA, 455 bp, Homo sapiens
actgaggctgaagacggacagcccctagtgcctccttgacccccaagaaggaggccctcagcggaaggatgtgttttctcaagtccacagcttctgtgcctacatagtaggtgctcaataaatatcttatggatcccaggggttctaactgcaatctcctctcagtgcaatatatacattttcccttccctaaatgtaatgactggggcccagagtcagcaaatgattcacctgcgattacacagtgacttggttgcagagggagggctagaacccaggtctcctgcctccaaacccagggctctctccaccacccccaggtgggcctcctgccctcattgctaaaatcagagaagagggagcaaatctgtgagtctgggagtcagcaccgactcatttcctcttacaggatatttgtatttaaatctgtgtgccaggccaacgaagagaaatcg

SEQ ID NO: 39493 - DNA, 326 bp, Homo sapiens
tagaaggggcagaaattcaacaaactttgcctaatctgaaagagacttcagtagaataattactctacttgattcagtatgagaaaggaaggagttattttgtacactgcagatattcatgtagaccaaaatatcatctccatcattaagtgtaggtaatatttaggggttatctcattcatttccatttggtagtatagaatgcttagatgataccttattactctaaagcagtaagaatttcaacagatacaataataatcttatattaaaaattaatcatgggctgggcacagtggttcacgcctataattccagccttttgg

SEQ ID NO: 39494 - DNA, 353 bp, Homo sapiens
tgaaagagaatgttcttttaataaagcatatgttttctaatttacacttgagcaaacctttattttaaagaaaaattgagaaatttatgtttcagagttatgagacaccgtcttcttatctaagatatgaaggatgcagcaataaattatccagatgttttggctatagtctttttttattgttgagtaacaaatttccatacacttagcaacttaaaacaatatccttttttttttttaatgtcgcagctctttaggtcagaaattcaggataacagggctggtttatgtgctcagagtctcaaactcaaggctgaaattaaggtgctaaccagctgtgatcttatctggaa

SEQ ID NO: 39495 - DNA, 578 bp, Homo sapiens
acattgtataacaatcaatgtggcctttcttttggttgtatttttgcattagttttttttctgattgtaaagtgaaaatctctagcctcttaaaaggaattatcagcaccattagaagaagtagagtgatggttctattccagtccaatagctataacaatagtaatgataatagctgacatttatgtagcactatgggccaagcactttatatacatcatttcatttaatgctctcaacaatctataaggtagatataagtaatgtccacatcacatttcagatgaggaactagctccagtgcataatctgcctttaaaatttttacctaggagctaaagttattagatattacttcagcttcagtgggattcagactaaatagaagaaatattttaaatttcttctagcactactcaacctggaagtaatagcagctgtcatgacctatcactgtaatccattgtggtaggggtttagtaaaccctggatgaatggatggatggatgaatgggtagatggatgggtggatgggtggatgagtaaatgggtggatggatgatagataggtggataga

SEQ ID NO: 39496 - DNA, 502 bp, Homo sapiens
gtgtgggatgatagttcttgagagtcggggaggagagtgcagcattgttggggctggcattgtatccaccgaaaacattttcagcatctcttctcttctatacaagacttgtcctcttggtgtccctgtgggtcaccattaagtcgcttgcttattctttctcaccatgtatcttcatttacctttctctaaaacttctgtaatttgcttttatcaagagattttggtcgcgtgcagtggctcacacctgtaatcccagcactttgggagactgaggtgggcagatcacctgaggtcaggggttcaagaccagcctggccaacatggtgaaaccccatctctactaaaaatacaaaaattagccaggcatggtggcgagcacctgtaattccagctacttgggaggctgaggcaggaggatcgcttgaacccacgaggcagaggttgcagtgagccgagatcacaccattgcaccctgggcaacaagtgcaaaactccatct

SEQ ID NO: 39497 - DNA, 446 bp, Homo sapiens
tccaatcagagaagttttgttaggtaatgactacagatactaagggaggattatcactgagtattaattagctcctggctaagtgaaggagtttatcaatgtgagttttgctcatctctgtatgcttatccactgtgtccagagtcattctttaatattagccatataccctagtgtaacattatggttccatttgttttgtctttgtattccttttcaaaacgtgtatacctgattggcttttaatattggaactggccgggtgcagtggctcacgcctgtaatcccaccgctttgggaggccgaggcgggcaggtcacctgaggtcaggagtttgagaccagcttgaccaacgtggagaaaccctggctctactaaaaatacaaaattagccgggcgtggtgacgcatgtctgtaatcccagctgttcaggaggctgaggcagg

SEQ ID NO: 39498 - DNA, 293 bp, Homo sapiens
ggtcgacgaattgcacagcaacttgaactattacacacaaatacatattgctttgctgtggcaattaaaagcccagcattttaatgtattcctatccctgatgtcacacttaatgctttgggtttttagtatgaattttctttttccctcccaattaagttaaaattaaatgaatcaaatggtcaaaactagtgcatatttttattctatgaaacaattcagatacttattgacattaaaagatcaggggaggagtctttgagcatactctggctagggaagctgctcaataa

SEQ ID NO: 39499 - DNA, 208 bp, Homo sapiens
tgtaaactagattaacaaatcagttaatgagtcagtgtatcaccgggagccctaaaattcccaaactatcaatatcaaactttgccactcgtttataaccatcagtaggatttgaagacacactatgaaatctgcattggagggtatgtgagttatctagccagaatctgtcacaatcgtttgacactagagcaaaattaatgttcct

SEQ ID NO: 39500 - DNA, 363 bp, Homo sapiens
aaaaatgtagaatgtgtctctgattgtttcacagtatgttccttaacaaccagatatgtaagaaaacgtttgggattgagtggtgagaaaagcagactggaaagtacaaataaacccaatccaaatggaaaacaaattaaacagatgaaatgattatgaaagaagatgggggaattaacttgtctggaaaaaatcgagtttagggtctgaactttacagattaaatggcaacacagaacaaatccaaaggaattaaatctattcttttgccctcctaggcatctgggtcagatgcacattttgaggcatttcaacagacagatcagctctgggacacttgcacacttttttggtaaactgcaa

SEQ ID NO: 39501 - DNA, 385 bp, Homo sapiens
tgagacagtcttcgctctgtcgcccagactggagtgaggtggtgcgatctcggctcactgcaagctccacctcccaggttcacgccactctcctgcctcagtctcctgagtagctgggactacaggcgcccgccaccatgctcggctaatttttttgtatttttagtagagatggggtttcaccgtgttagccaagatggtcttgatctcctgacctcatgatccgcccgtcttggctttccaaagtgctgggattacaggcatgagccaccgcacccagcctcaaattagtttttatgaacattatctttacagactttaaaatgctttgaccatgggtatgttataaaactagaagccatttaaagatattttatatagtaaa

SEQ ID NO: 39502 - DNA, 739 bp, Homo sapiens
  misc_feature (33)..(33): n is a, c, g, or t
  misc_feature (35)..(35): n is a, c, g, or t
gcggccgcctactactactactactactaaatncncggccgcgtcgacgtttattgaaatgatgtaattattttctattgctgcataacaaattaccacaaatgtagtggcttgtaatagcatccatttattagctctcagtttagtagattataaatccttatgagacctaaattattgtgttagccagactgagttcttgtctggaggctgtgggtaaaaatctacttccaaactcatttttgttggtagaattcagttcctgtatttgttccccaaggttccagtttccttgctggctgttagctgggggttatcttcattcttctcatttgtctcttccacctttattttttcttttttttttttttgacacgtctcgctctgttgcccaggctggagtgcaatggtgcggtctcggctcactgcaacctctgcctcctgagttcaagcgattctcctgcctcagcttcccgagtagctgggattacaggtgcctgccaccacacctggctaatttttatagttttagtacagacggggtttcaccatgttggccaggctggttcgaactgctgacctcgtgattcacccgcctcggcctccaaaagtgctggaattacaggcgtgagccaccgcacccagcctgggtcttcaatctttaatccagtaaaagtgtgtcaaatcctttccatactttaactttctgacttctaaacccccttctgtctgacctcta

SEQ ID NO: 39503 - DNA, 539 bp, Homo sapiens
tctaatacatcattggttagagttcataaagtgatataaaccctttctagagagaaacctagtcatcttttcaacagccttaaaaatgtccttactgtttgacccagaagtacatttaaaggaattgtctaaggaagtaattagagctgtggagcaagacttttctctataaggtgtttacctaaatgttacaataccaaaaaaacacaacaacccacaaacaaaacaacacagcaacaagaacaaacccataaatgagcaataagaaagcatatccacaacatggactgtcatgtttttctagaacatatcatgatgggggaaaggcatgtaataaaataaggggataggatacaaaattgtattatgctaccagttctgttaaaatgtgtgcacatgcacggacacatgggattggaataaagacaccaaaataatagtagtggtgatttcttgctgatgtgattatgggtggctttttctctctattttctgaattttctataataaaaactaattttataatttaagaagacaca

SEQ ID NO: 39504 - DNA, 334 bp, Homo sapiens
tctaaacttaaaaaaaatgacttcatactctgtattttttgcaacttttttaacctcagattgtttgacttcagagccaaactttctgggtcggcttccaggcacctccgaggaattgctgggtggccttgagctagttatttaatctctgtccttttgtttctttgcctttaaatttgggataatagcccgtactttatgaaggctgttggaagaataaatgagtgaacatctaagtcaggtgcccaaaatattgtgtgtggtgtagtctgcagttttagctacacacacacagacacacacacacacacacacacacacacacacacactgt

SEQ ID NO: 39505 - DNA, 282 bp, Homo sapiens
ccagatatacaatacagatcttttcatttatgcctgaagttcagacatttattcaacagacagttgtcttcctgctgtgcccttgatattgtgctaggcatggaagtacttctttgcctttagtcttcaattaaccttactagagctcttattcaaagactatgccaaaattttaaaaaattatttgtttatggtacttagaggtaatgctttattggagcgatataaaatggattggattcctttaccttcagactttaaagatacaataatgtgaccaaa

SEQ ID NO: 39506 - DNA, 306 bp, Homo sapiens
gcgtcgaccacctgggccctgctgggcgagcactcggctcggccacttagaacctgtgggaccttggtgagttacttcacctcactctgcctcagtttcctcatctgtaaaatggtaacattgtaactgtgtctacgttatgtggttggtggtggctcaagcctggcatataggtgattgtcagtaaatactgtggcataaatgaaggaatgagactctaccttctcaaaatattcttagatgttaacttcaattaatggaaagtttattcccaccccagagccgtgcttggcatgtagtcgacgg

SEQ ID NO: 39507 - DNA, 452 bp, Homo sapiens
gttgtagagacaggggtctcactatgttgcacaggctggccttgaactctggggcttaagcagtcctcctgcctcagcctcccaagtagctggcctataggctagggctaccatgcctggctgttttatttatttagtttttaaatttattcattctcttttattcacaaaggatttaagatgatcacaacaaatacatataagatcagatattatatgtcagtcaagagtaaaaacaaaacataatacaaaggccagagaaaaacaaatacagtgagggtctacacagttactagagttagacctcaaagttagccctgtgttttggggcagccaaagtgaaaaaggaacattaattatatgattcttatttttagaaaagaaaacaacaacagacacccattcttcatttctcaaaggaaatgaagtattttctagcactaaattcttta

SEQ ID NO: 39508 - DNA, 633 bp, Homo sapiens
gagaaatgttatgttctccagaatgaaactgctgttttgtcagcagtgttctgaagcctaacagatagtagtttttaaagaatttccaatttaataaacaaaaaagacattcttggattattttatttggttgatttagtagtgtatttcttttgtatttatttgtcacttttttatataaagaaatctgtaaatctttgtgtctttttgagttatttgaaagggtttttttgcattttaaaagcataattaaaatgcaaattgttttccctagctttttatttatttatgttttaatttttatggtttttgaatgatagaagttttaaatttctttagtcagatccatcagtctttgtaaaataccgttttaaaagcctgggcttttcattggaattagatagactctctgaaaatctttggctgctttgcgaggcatgcacatggttactgctgtgaactattcatgaataggatatccccttctccacctgccactgccaccatcactaatatctatttaacagacctttattgaatgcttactgcatacataaaaggaaactattaaaatggtgtggatacatcagtgaataaaacaaagacgaattcctactctcttggaatttacgt

SEQ ID NO: 39509 - DNA, 2274 bp, Homo sapiens
ctcgcctgggtgcctggagctgagctgcggcaaggcccggctcctgttcgaccgcccgaggggtgtgcgtgtgcgcgttgcggagggtgcgctcagagggccgcgtcgtggctgcagcggctgctgccgccgcaggggatctaatatcacctacctgtccctgtcactcttgacacttctctgtcagggctgccgcgtgggggggggcgggcagagcgcggtcggcgttagctttccttattggaggggttcttgggggagggagggagagaagaagggggtctttgcccactcttgtttcgctttggagcttggaagcctgctccctaaagacgctctgagtggtgcccttctgcccacatcccatgtcttcgtttgcccgctgactttccgtctccggactttttcgcttgagccttccggaggagacgggggcagcttggcttgagaactcggcgggggttgcgtcccctggctctccccgcagcggggaaactccgcgcctagagcgcgacccggagcgggcagcggcggctacgggggctcggcggggcagtagccaaggactagtagagcgtcgcgctccctcgtccatgaactgcatgaaaggcccgcttcacttggagcaccgagcagcggggaccaagctgtcggccgtctcctcatcttcctgtcaccatccccagccgttagccatggcttcggttctggctcccggtcagccccggtcgctggactcctccaagcacaggctggaggtgcacaccatctccgacacctccagcccggaggccgcagagaaagataaaagccagcaggggaagaatgaggacgtgggcgccgaggacccgtctaagaagaagcggcaaaggcggcagcggactcactttaccagccagcagctccaggagctggaggccactttccagaggaaccgctacccggacatgtccacacgcgaagaaatcgctgtgtggaccaaccttacggaagcccgagtccgggtttggttcaagaatcgtcgggccaaatggagaaagagggagcgcaaccagcaggccgagctatgcaagaatggcttcgggccgcagttcaatgggctcatgcagccctacgacgacatgtacccaggctattcctacaacaactgggccgccaagggccttacatccgcctccctatccaccaagagcttccccttcttcaactctatgaacgtcaaccccctgtcatcacagagcatgttttccccacccaactctatctcgtccatgagcatgtcgtccagcatggtgccctcagcagtgacaggcgtcccgggctccagtctcaacagcctgaataacttgaacaacctgagtagcccgtcgctgaattccgcggtgccgacgcctgcctgtccttacgcgccgccgactcctccgtatgtttatagggacacgtgtaactcgagcctggccagcctgagactgaaagcaaagcagcactccagcttcggtacgccagcgtgcagaacccggcctccaacctgagtgcttgccagtatgcagtggaccggcccgtgtgagccgcacccacagcgccgggatcctaggaccttgccggatggggcaactccgcccttgaaagactgggaattatgctagaaggtcgtgggcactaaagaaagggagagaaagagaagctatatagagaaaaggaaaccactgaatcaaagagagagctcctttgatttcaaagggatgtcctcagtgtctgacatctttcactacaagtatttctaacagttgcaaggacacatacacaaacaaatgtttgactggatatgacattttaacattactataagcttgttattttttaagtttagcattgttaacatttaaatgactgaaaggatgtatatatatcgaaatgtcaaattaattttataaaagcagttgttagtaatatcacaacagtgtttttaaaggttaggctttaaaataaagcatgttatacagaagcgattaggatttttcgcttgcgagcaagggagtgtatatactaaatgccacactgtatgtttctaacatattattattattataaaaaatgtgtgaatatcagttttagaatagtttctctggtggatgcaatgatgtttctgaaactgctatgtacaacctaccctgtgtataacatttcgtacaatattattgttttacttttcagcaaatatgaaacaaatgtgttttatttcatgggagtaaaatatactgcatacaaaaaggt

SEQ ID NO: 39510 - DNA, 486 bp, Homo sapiens
aacaaaaaaaaatttgggttttttttggaacttggatatgacattttaacattactataagcttgttattttttaagtttagcattgttaacatttaaatgactgaaaggatgtatatatatcgaaatgtcaaattaattttataaaagcagttgttagtaatatcacaacagtgtttttaaaggttaggctttaaaataaagcatgttatacagaagcgattaggatttttcgcttgcgagcaagggagtgtatatactaaatgccacactgtatgtttctaacatattattattattataaaaaatgtgtgaatatcagttttagaatagtttctctggtggatgcaatgatgtttctgaaactgctatgtacaacctaccctgtgtataacatttcgtacaatattattgttttacttttcagcaaatatgaaacaaatgtgttttatttcatgggagtaaaatatactgcatacaaaaaggt

SEQ ID NO: 39511 - DNA, 1894 bp, Homo sapiens
  misc_feature (90)..(90): n is a, c, g, or t
  misc_feature (93)..(93): n is a, c, g, or t
  misc_feature (329)..(329): n is a, c, g, or t
  misc_feature (388)..(388): n is a, c, g, or t
  misc_feature (392)..(392): n is a, c, g, or t
  misc_feature (417)..(417): n is a, c, g, or t
ccgccgggcgcagagcagagccccagcagaaaggcgggcaaggggccggcggcggcgccaaagaggacaacagcaaagcaagaagggcgnganaggaaaggggagggggacgagcccccaggcgacagagggcccgccgccagccggggcggaacgccgagagcgggccggggcaccgccgcgcggaagaagagcgaccggggaggccgaggcgcaggacgaagagaacggggaagggagaccaacggccgcaaacggggggcggcgggggggcaaggaggcgggcagccggcggccggggaagggcgcggcgccaaagacgccgaaancaaaaagggcgagggcacggacgcgccggagagccgaaaagaggcagccagcagcaagngcgncccgcggcagcagccgggcgccaangagaaagataaaagccagcaggggaagaatgaggacgtgggcgccgaggacccgtctaagaagaagcggcaaaggcggcagcggactcactttaccagccagcagctccaggagctggaggccactttccagaggaaccgctacccggacatgtccacacgcgaagaaatcgctgtgtggaccaaccttacggaagcccgagtccgggtttggttcaagaatcgtcgggccaaatggagaaagagggagcgcaaccagcaggccgagctatgcaagaatggcttcgggccgcagttcaatgggctcatgcagccctacgacgacatgtacccaggctattcctacaacaactgggccgccaagggccttacatccgcctccctatccaccaagagcttccccttcttcaactctatgaacgtcaaccccctgtcatcacagagcatgttttccccacccaactctatctcgtccatgagcatgtcgtccagcatggtgccctcagcagtgacaggcgtcccgggctccagtctcaacagcctgaataacttgaacaacctgagtagcccgtcgctgaattccgcggtgccgacgcctgcctgtccttacgcgccgccgactcctccgtatgtttatagggacacgtgtaactcgagcctggccagcctgagactgaaagcaaagcagcactccagcttcggtacgccagcgtgcagaacccggcctccaacctgagtgcttgccagtatgcagtggaccggcccgtgtgagccgcacccacagcgccgggatcctaggaccttgccggatggggcaactccgcccttgaaagactgggaattatgctagaaggtcgtgggcactaaagaaagggagagaaagagaagctatatagagaaaaggaaaccactgaatcaaagagagagctcctttgatttcaaagggatgtcctcagtgtctgacatctttcactacaagtatttctaacagttgcaaggacacatacacaaacaaatgtttgactggatatgacattttaacattactataagcttgttattttttaagtttagcattgttaacatttaaatgactgaaaggatgtatatatatcgaaatgtcaaattaattttataaaagcagttgttagtaatatcacaacagtgtttttaaaggttaggctttaaaataaagcatgttatacagaagcgattaggatttttcgcttgcgagcaagggagtgtatatactaaatgccacactgtatgtttctaacatattattattattataaaaaatgtgtgaatatcagttttagaatagtttctctggtggatgcaatgatgtttctgaaactgctatgtacaacctaccctgtgtataacatttcgtacaatattattgttttacttttcagcaaatatgaaacaaatgtgttttatttcatgggagtaaaatatactgcatacaaaaaggt

SEQ ID NO: 39512 - DNA, 618 bp, Homo sapiens
  misc_feature (9)..(9): n is a, c, g, or t
  misc_feature (11)..(11): n is a, c, g, or t
  misc_feature (21)..(21): n is a, c, g, or t
  misc_feature (23)..(23): n is a, c, g, or t
cctcggcantntcggacacgngnagaagctatatagagaaaaggaaaccactgaatcaaagagagagctcctttgatttcaaagggatgtcctcagtgtctgacatctttcactacaagtatttctaacagttgcaaggacacatacacaaacaaatgtttgactggatatgacattttaacattactataagcttgttattttttaagtttagcattgttaacatttaaatgactgaaaggatgtatatatatcgaaatgtcaaattaattttataaaagcagttgttagtaatatcacaacagtgtttttaaaggttaggctttaaaataaagcatgttatacagaagcgattaggatttttcgcttgcgagcaagggagtgtatatactaaatgccacactgtatgtttctaacatattattattattataaaaaatgtgtgaatatcagttttagaatagtttctctggtggatgcaatgatgtttctgaaactgctatgtacaacctaccctgtgtataacatttcgtacaatattattgttttacttttcagcaaatatgaaacaaatgtgttttatttcatgggagtaaaatatactgcatacaaaaaggt

SEQ ID NO: 39513 - DNA, 1965 bp, Homo sapiens
  misc_feature (90)..(90): n is a, c, g, or t
  misc_feature (93)..(93): n is a, c, g, or t
  misc_feature (329)..(329): n is a, c, g, or t
  misc_feature (388)..(388): n is a, c, g, or t
  misc_feature (392)..(392): n is a, c, g, or t
  misc_feature (417)..(417): n is a, c, g, or t
ccgccgggcgcagagcagagccccagcagaaaggcgggcaaggggccggcggcggcgccaaagaggacaacagcaaagcaagaagggcgnganaggaaaggggagggggacgagcccccaggcgacagagggcccgccgccagccggggcggaacgccgagagcgggccggggcaccgccgcgcggaagaagagcgaccggggaggccgaggcgcaggacgaagagaacggggaagggagaccaacggccgcaaacggggggcggcgggggggcaaggaggcgggcagccggcggccggggaagggcgcggcgccaaagacgccgaaancaaaaagggcgagggcacggacgcgccggagagccgaaaagaggcagccagcagcaagngcgncccgcggcagcagccgggcgccaangagaaagataaaagccagcaggggaagaatgaggacgtgggcgccgaggacccgtctaagaagaagcggcaaaggcggcagcggactcactttaccagccagcagctccaggagctggaggccactttccagaggaaccgctacccggacatgtccacacgcgaagaaatcgctgtgtggaccaaccttacggaagcccgagtccgggtttggttcaagaatcgtcgggccaaatggagaaagagggagcgcaaccagcaggccgagctatgcaagaatggcttcgggccgcagttcaatgggctcatgcagccctacgacgacatgtacccaggctattcctacaacaactgggccgccaagggccttacatccgcctccctatccaccaagagcttccccttcttcaactctatgaacgtcaaccccctgtcatcacagagcatgttttccccacccaactctatctcgtccatgagcatgtcgtccagcatggtgccctcagcagtgacaggcgtcccgggctccagtctcaacagcctgaataacttgaacaacctgagtagcccgtcgctgaattccgcggtgccgacgcctgcctgtccttacgcgccgccgactcctccgtatgtttatagggacacgtgtaactcgagcctggccagcctgagactgaaagcaaagcagcactccagcttcggtacgccagcgtgcagaacccggcctccaacctgagtgcttgccagtatgcagtggaccggcccgtgtgagccgcacccacagcgccgggatcctaggaccttgccggatggggcaactccgcccttgaaagactgggaattatgctagaaggtcgtgggcactaaagaaagggagagaaagagaagctatatagagaaaaggaaaccactgaatcaaagagagagctcctttgatttcaaagggatgtcctcagtgtctgacatctttcactacaagtatttctaacagttgcaaggacacatacacaaacaaatgtttgactggatatgacattttaacattactataagcttgttattttttaagtttagcattgttaacatttaaatgactgaaaggatgtatatatatcgaaatgtcaaattaattttataaaagcagttgttagtaatatcacaacagtgtttttaaaggttaggctttaaaataaagcatgttatacagaagcgattaggatttttcgcttgcgagcaagggagtgtatatactaaatgccacactgtatgtttctaacatattattattattataaaaaatgtgtgaatatcagttttagaatagtttctctggtggatgcaatgatgtttctgaaactgctatgtacaacctaccctgtgtataacatttcgtacaatattattgttttacttttcagcaaatatgaaacaaatgtgttttatatttgtttcatatttgtttcatatttgctgaaaagtaaaacaaatatgaaacaaatataaaacacatttgtttcatgggagtaaaatatactgcatacaaaaaggt

SEQ ID NO: 39514 - DNA, 1368 bp, Homo sapiens
attgagtgacacacagcgtgatgctgggcaggccccaagctgaaaagcatctcctccaacttactttattcttagcaattcattcctttggtttgaaaattcttcagcatcttcaagagtcctttactaatgcatcctttgggggagttgtgctaaattatcaactcacaaggatgagatggctggctctagggagccagcctgccaacatggatgggctgtcccaggctctcaagtgagctcaggtctgtacactgcactccagggaagagtaaatgtgcctggggcatagaatggagactttggagtttggagtttggagtgggtttggggacatcagcttctctcttccagttagtctgataagtcctttgttgcctggccctggaaaccacttgtgctccgaaaatgccattctctggaatgtagctgtggagtagggagagagttggcccctgtgttctgtaacccaagcaagtactgtctcactgccatcttggggcagactccgcagtaaggagaatctctcttgcctttttgtgtttcttggtttcttcctttgtaaatacaaggcatagtctctgcccttcccccagattgccagaagagtgggatatattgttctagcaatataaagctctgaggcctttctgcaggactgtagacaccactttgctgtgatagtgaagaatgtggggagtgttgtgaggctaggcgagcggcccggccttgcccatgacagctcagtctcctcccctcataacttttttacctaacagagaattaaaaaaaaaaaacaatttagctgggcacagtggctcatgcctgtaatcccagcactttgggaggctgaggcaggtggatcacttgaggtcaggagttcgagaccagcctaaccaatgtagtgaaacgctgtctctactaaaaatacaaaaattaggcaggcatagtggcgcatgcctgtaatccgagctactcagatgctgaagtgggggaatcacttgaacctgaaaggcagaggttacagtgagccgagatcatgccactgcactccagcctgggtgacagggtgaaactccggctcaaaaaaaaaccaaataattaatcaacaaggaataactccattggtctctaataatgagacagagggggaagaaacttcgtccaactattcaggaagattaagcaattctgaaccgttaggagtagaagaagtgagcgtattctcgtccaaaacacttggaaaatgtctgttattctctgaagtgaatggatctaaattcagaaatgctgagagaaaaaatgaaagtgataaatatggctccttcgctgcattggttcttctatgaatgaagttttttttcattc

SEQ ID NO: 39515 - DNA, 440 bp, Homo sapiens
actcccgacctcaggtaatccacccgcttcagcctcccaaagtgctgagataacaggcgtgagccaccgcgcccggccaacaccattaatttttaagtacactaatatattggaaattttctaaaacaaagcttgaaacaactatcaccaaaagttctgtaacacaaagagtcaataccactgaacacagtgttttcacctgtaacggagtaaacattctcatttcagaatattattgaaatagttaaggtattatcatgaggtacagtacctgacacagaatgggtacttatttaaaaaaaaatttttttttaaaaggatgactgtaaggggtcattccccatggattatggataattagggccttaccttctcaataatgcaaaactacattttcaatattgtagcatcactgaatgttttgtccaaaactagattta

SEQ ID NO: 39516 - DNA, 400 bp, Homo sapiens
acagattttcattgcaaggactggagtaagttttgtggggcagatgaatgcctgagtttgcccttgagccaagtttcagcacctgaagaccacaagacttggaaaggacattcgaagcaaaggggacccccagccttgaaaacatggaggaggggaagctgctgtagaggtgttggggaagtcagttgtgtaggtgatttatgtccatatcattgagaagttgaacctcagattacttcttgatgaataacttagcagtggttctcaaactttagcatctgggctgggtgcagttgttcatgcctatgaccccagcactttgggaggccgaggcagtaggattacttgagcctaggagtttaaaaccagcctgggcagcacagtgagacccagtctctac

SEQ ID NO: 39517 - DNA, 4028 bp, Homo sapiens
  misc_feature (434)..(434): n is a, c, g, or t
  misc_feature (1650)..(1650): n is a, c, g, or t
  misc_feature (1744)..(1744): n is a, c, g, or t
  misc_feature (2095)..(2095): n is a, c, g, or t
cttcaaagggttgagtctgggggctcatcagaagaggtaatcccaagtgacttggaatctgcaacaggtgggttaggacctcatccttagatattgctttaaccaatttatgggtaagccatagttctgagcagagtcacgtgctcacgcgccccacgtgtagtgacaacgggaatgtaggcttaaacataggtaacagcttcaaaagagtttgtaaaaacaaggctgtgaatatcaatataattgtgagacttttggggatttattgtaggtttgaacgtaacttgaaatacagtgatttgtagacagtcagtaattgcttcacttgctccatttggaattttgtaactattcacttctccagcagcataaggtggttaagaagacagtttctgttcgttgtaaaaaattactccaggcttaaggaggacaantattgtgtctttatattcatatacccaggatttagcacagtgcctaatccataagggccacactaaaatgtttgcccagtgaataaatcctggataatatcatcctgtctgcaaagccagtattacagagtgattggttgccagtaggggagatagctccctttggttacacaaattgtggcagacattgaaccactccaaaagaaactaaagctatttatttggggattgaaacaaaaaagcctacacaacttgaaaaaagcataaagacactcagatggaaccatagtgtctcccagcagatatcaccagatgggggtgggggtaaataattgcagtcacatatgcagcaggtatatatatttttactaatggcttattcttaaacaggacttgaggccagagaaatttcaaggataaattgctttgggagaatgcctgatatcaatgtctcctgagacatagaagttttccaaaataacaaatcaccagatatattattttgttgcctcctcttccttcccctggcccctgccaatatgcttatttacaagagttaccttatcagttgtcttaggagaacacatttccttcaacagaagtcacagtatcatcttatggtcataattttacaatatccctgcctctactgagaagagatacatagcgaatggagatgtgctgagccaatgaggaattaatcctaggcagcactagtagatgtggccacagctctggccccaccccactctggtggtcaggccaaaaaagaagtcaggtaagaagtgtgaaaggaaattcaatcttgggacccccaaactcattaagccacagggaaaattcaagctgggaactgggtcacgcaaacatgcctcccccttttggttcctaaataagatggctacaagatgaaaagctacatgcctcccccatattttgcccacaagggaattcccagtgagctgctagatctttacactaaaggtgtttctattaaaatttcaccatggcaatataaattgatagtttatagatgcagtcacccctggcccaccagacacaaatgcatatctgattgttcccctggcccagttttgtctgttatcttatataaaatgcagattccctgcaattttcctctgcctcatttgtctgtgtcatcttatgttaaaaaaaaatgcagattcactgagccagacaaaggcatgaatgactntttttccctacccacctcttacatgaaaattgtgtacttctcaatatcctgccctttcccctttaaatttggagccttcaaaatcatctttggngaaaggcatagacctgtctcctaggtgtgcatccttaactttggcaaataaacctcctaaaataattgagacttgtcatttttctcgattgacagaagaaaagacagagccaagaggatggcagtgtacttggctacccccagagcctagctgaggctccagccctgggcacttcactggagcattcccttgccagcagaggaacctgcagcctaacctcatgctggggtaaccttaatgtgggcaatccgtcttactgtaatagacaaattgcctgctttcacttaatccacagatttacaagggacaaactttggccctaggaatatttattgaatatcatttcatccntgtgacttccacttctttctgattcccatatcaccagcccaagagaacttgagtatctgttcacagctttgctcctctttccccacattaaccacaaagcaacggaaatagaataaagagacaaatgggtaactctaagtaggttcatcacattcattacatgccctgtatccagagccaatataaatggtcttgattctgattgtgttgaggtataaaaacatgctgatttctgtggcaggtattaatgattattacttgtgtattcatttgctcactgctccattctggatgttcttggtctcagggcctaaggatcattttctcggatgcatcacggctcatcttccggctcagttcctccagtggtgtgcgggccaccctcagactgtacgcagagagctacgagagggatcccagcggccatgaccaggagccacaggcagtgctgagccctctcatagccatcgcactgaaaatatcccagattcatgagagaactggccggaggggacccactgtcatcacctgaatagaggaaagatcactcaccagggccaaagagagtgctcagcgggagatgcttcactgatgccttcttgctacctgtttgtgcctcttatgactttggaaaaacaaaagatattttgcttttgggggatagagggtgggtgggaaaagaaaaaaaatccatttggttttggttttgtcctattcctccaaatgcagcagggcctttagttgtctgttaaagctgcactataatttggtatctacattttatcacacaaaggaacctccccttttgacaacaactgggctaggcagctgttaatcacaacatttgtgcatcacttgtgccaagtgagaaaatgttctaaaatcacaagagagaacagtgccagaatgaaactgaccctaagtcccaggtgcccctgggcaggcagaaggagacactcccagcatggaggagggtttatcttttcatcctaggtcaggtctacaatgggggaaggttttattatagaactcccaacagcccacctcactcctgccacccacccgatggccctgcctcccccatcccatccccaacatccctgtaccaccttctctcacatcttctaaagctttgtacaaatcacaatggtgcacttccaacaaaatatatcaataggtgttttcctctcttattttgtaaatagtattattttagctattaagctggataccttctttcaaattcagccattcagttgtaaagttgggaagaagtttcttgacaagactctgcaattaaatgcttaaaatttggaggggatccttccttgattacatcaagtatgttggtacatgggtttatacaagttcctcttgagaaggcaaaaagaccaccatgtgtgagagctctttgacttggccaataggggcctatcttaatgcacttgtttggacacatttctgatcttatttgtaaaggctgcaaaaggagaggatgaaatgctgtaaaagtaggaaatgaagtggaagctggaagaaaatgtaattggtggtacagctatgggccagatggtggaggggagggtggggacccctgccggcaagcagagtgtcacagctggctttcctcacttgggaaaagggtactgccggtctagcagcctcctctgtactcagccaggacacccagcgcgtgggacctgtttgtgtctgttttgcttccttgggaacggcacagtcactcaccctgccatttgcggaaatgacctggtgcactttgactgttaagcaatgcgttattgctgtagtcaaggttagtgcaagcaaggaaacattcccagtaaggtatttgtttccattttctgtctgtgcttctgtcagaaacttgctaggactttagtggccaataaaaaagaaattcctaatttcaacc

SEQ ID NO: 39518 - DNA, 324 bp, Homo sapiens
tcggcacgcgtcgactttttttttcagaggtaacagagattttattttgaagaagtcagagtaactatgtggatggggctgactggtttctgtagggaagtaaactcatgaaaattattgcattgttaatctcaggggtgactcgataaatgtgtgtaaacttaatatggtgtagagagaagacatgagagcagccaagatattcagaactggaaactttcaaaaaccacttcccaaactcgatatcattttcaacataggaaaagttttatggttgacttcattatagcattccaaaaataggctgtgaattgccaaaacttg

SEQ ID NO: 39519 - DNA, 3615 bp, Homo sapiens
gggaaggcagaagcaatctctgccgagagagtcagccgagcggccgcgcggagaggaggggcgggcggtccccaggcgggcgggtgcagggcgcagggcgccgacctgctggagagggggcccgggcacgaggcggagtcccggcgcgcagccaggctggtggaggcccccggcaggctgcagattccctccggctccgggagccgcagcaggaccggccaggaggcgccatggaggggagccccatcccggtgctgacagtgcccaccgcgccctacgaggaccagcggcaggcggcggcgggggtctgcgggacccaccggctcttcgagggccagcgcaatacctgcccaactttatccagagcgtgctgtcgtccatcgacctgcgcgaacgtcagggctgcaccatggtggtgggcagcgacggcaggtactttagcaggacggccatcgagatcgtggtgcagatggccgcggccaacgggattggacgactgattattggacagaatggcatcttgtcgacacctgcggtctcctgcattatcaggaagatcaaggcagctggtggaatcattctaacagccagccactgccctggaggaccagggggagagtttggagtgaagtttaatgttgccaatggaggtcctgcacccgatgttgtctcagacaaaatctaccaaatcagcaaaacgattgaggaatatgctatatgtcctgatctccgaatcgacctatctcgactaggaagacaagaatttgacctagaaaacaaattcaaaccattcagagtggagatagtggacccagtggatatctatcttaacctccttcggaccatctttgactttcatgccatcaagggtttgctgactggacccagccaactgaagattcgcattgacgcaatgcacggagttatgggaccttatgtgagaaaagttctgtgtgatgagctgggggccccagccaattctgcaataaactgtgttcccctggaagactttggagggcagcaccctgacccaaacctgacatatgcaacgactcttctggaagcaatgaaaggaggagaatatggatttggagctgcatttgatgctgatggggaccgttatatgatcctaggccaaaatggcttctttgtgagcccttctgactccctggccatcattgctgccaacctctcttgcattccatatttccgtcagatgggggtccgcgggtttgggaggagtatgccaaccagcatggccctggacagagtggccaaatcaatgaaggtccctgtatatgagaccccagctggatggagattcttctcaaatctgatggactcaggacgttgcaatctgtgtggggaagagagctttggcactggctctgaccacctccgagagaaggatggcctgtgggctgtcttggtctggctctccattattgctgcccggaagcagagtgtggaggaaattgtccgagatcactgggccaaatttggccgccactactattgcaggtttgactatgaggggttggatcccaagacgacatattatatcatgagggacctggaggccctggtcacagacaaatccttcattggccagcagtttgctgtggggagccatgtctacagcgtggcgaagacggatagttttgaatacgtggaccctgtggatggcactgtgaccaagaaacagggcctaaggatcattttctcggatgcatcacggctcatcttccggctcagttcctccagtggtgtgcgggccaccctcagactgtacgcagagagctacgagagggatcccagcggccatgaccaggagccacaggcagtgctgagccctctcatagccatcgcactgaaaatatcccagattcatgagagaactggccggaggggacccactgtcatcacctgaatagaggaaagatcactcaccagggccaaagagagtgctcagcgggagatgcttcactgatgccttcttgctacctgtttgtgcctcttatgactttggaaaaacaaaagatattttgcttttgggggatagagggtgggtgggaaaagaaaaaaaatccatttggttttggttttgtcctattcctccaaatgcagcagggcctttagttgtctgttaaagctgcactataatttggtatctacattttatcacacaaaggaacctccccttttgacaacaactgggctaggcagctgttaatcacaacatttgtgcatcacttgtgccaagtgagaaaatgttctaaaatcacaagagagaacagtgccagaatgaaactgaccctaagtcccaggtgcccctgggcaggcagaaggagacactcccagcatggaggagggtttatcttttcatcctaggtcaggtctacaatgggggaaggttttattatagaactcccaacagcccacctcactcctgccacccacccgatggccctgcctcccccatcccatccccaacatccctgtaccaccttctctcacatcttctaaagctttgtacaaatcacaatggtgcacttccaacaaaatatatcaataggtgttttcctctcttattttgtaaatagtattattttagctattaagctggataccttctttcaaattcagccattcagttgtaaagttgggaagaagtttcttgacaagactctgcaattaaatgcttaaaatttggaggggatccttccttgattacatcaagtatgttggtacatgggtttatacaagttcctcttgagaaggcaaaaagaccaccatgtgtgagagctctttgacttggccaataggggcctatcttaatgcacttgtttggacacatttctgatcttatttgtaaaggctgcaaaaggagaggatgaaatgctgtaaaagtaggaaatgaagtggaagctggaagaaaatgtaattggtggtacagctatgggccagatggtggaggggagggtggggacccctgccggcaagcagagtgtcacagctggctttcctcacttgggaaaagggtactgccggtctagcagcctcctctgtactcagccaggacacccagcgcgtgggacctgtttgtgtctgttttgcttccttgggaacggcacagtcactcaccctgccatttgcggaaatgacctggtgcactttgactgttaagcaatgcgttattgctgtagtcaaggttagtgcaagcaaggaaacattcccagtaaggtatttgtttccattttctgtctgtgcttctgtcagaaacttgctaggactttagtggccaataaaaaagaaattcctaatttcaaccttatccaaggattgtgggtttttacttatttgtttgtctcaccagttgagaaactccagtactggtcacctatcctgataaatctgcctttcagaaaacctgcaagggctgtttttcactattatggcaagagacatgtattaaatggaacagaaaaggtaagttactcaaaactgcctttgggagtcagcagaaactgaaatggcatctagacctccactgtaactgtcttcatttcaaaataataggaaggtggctttgagctgagattctaaaacaaaacc

SEQ ID NO: 39520 - DNA, 3557 bp, Homo sapiens
gggaaggcagaagcaatctctgccgagagagtcagccgagcggccgcgcggagaggaggggcgggcggtccccaggcgggcgggtgcagggcgcagggcgccgacctgctggagagggggcccgggcacgaggcggagtcccggcgcgcagccaggctggtggaggcccccggcaggctgcagattccctccggctccgggagccgcagcaggaccggccaggaggcgccatggaggggagccccatcccggtgctgacagtgcccaccgcgccctacgaggaccagcggcaggcggcggcgggggtctgcgggacccaccggctcttcgagggccagcgcaatacctgcccaactttatccagagcgtgctgtcgtccatcgacctgcgcgaacgtcagggctgcaccatggtggtgggcagcgacggcaggtactttagcaggacggccatcgagatcgtggtgcagatggccgcggccaacgggattggacgactgattattggacagaatggcatcttgtcgacacctgcggtctcctgcattatcaggaagatcaaggcagctggtggaatcattctaacagccagccactgccctggaggaccagggggagagtttggagtgaagtttaatgttgccaatggaggtcctgcacccgatgttgtctcagacaaaatctaccaaatcagcaaaacgattgaggaatatgctatatgtcctgatctccgaatcgacctatctcgactaggaagacaagaatttgacctagaaaacaaattcaaaccattcagagtggagatagtggacccagtggatatctatcttaacctccttcggaccatctttgactttcatgccatcaagggtttgctgactggacccagccaactgaagattcgcattgacgcaatgcacggagttatgggaccttatgtgagaaaagttctgtgtgatgagctgggggccccagccaattctgcaataaactgtgttcccctggaagactttggagggcagcaccctgacccaaacctgacatatgcaacgactcttctggaagcaatgaaaggaggagaatatggatttggagctgcatttgatgctgatggggaccgttatatgatcctaggccaaaatggcttctttgtgagcccttctgactccctggccatcattgctgccaacctctcttgcattccatatttccgtcagatgggggtccgcgggtttgggaggagtatgccaaccagcatggccctggacagagtggccaaatcaatgaaggtccctgtatatgagaccccagctggatggagattcttctcaaatctgatggactcaggacgttgcaatctgtgtggggaagagagctttggcactggctctgaccacctccgagagaaggatggcctgtgggctgtcttggtctggctctccattattgctgcccggaagcagagtgtggaggaaattgtccgagatcactgggccaaatttggccgccactactattgcaggtttgactatgaggggttggatcccaagacgacatattatatcatgagggacctggaggccctggtcacagacaaatccttcattggccagcagtttgctgtggggagccatgtctacagcgtggcgaagacggatagttttgaatacgtggaccctgtggatggcactgtgaccaagaaacagggcctaaggatcattttctcggatgcatcacggctcatcttccggctcagttcctccagtggtgtgcgggccaccctcagactgtacgcagagagctacgagagggatcccagcggccatgaccaggagccacaggcagtgctgagccctctcatagccatcgcactgaaaatatcccagattcatgagagaactggccggaggggacccactgtcatcacctgaatagaggaaagatcactcaccagggccaaagagagtgctcagcgggagatgcttcactgatgccttcttgctacctgtttgtgcctcttatgactttggaaaaacaaaagatattttgcttttgggggatagagggtgggtgggaaaagaattgtctgttaaagctgcactataatttggtatctacattttatcacacaaaggaacctccccttttgacaacaactgggctaggcagctgttaatcacaacatttgtgcatcacttgtgccaagtgagaaaatgttctaaaatcacaagagagaacagtgccagaatgaaactgaccctaagtcccaggtgcccctgggcaggcagaaggagacactcccagcatggaggagggtttatcttttcatcctaggtcaggtctacaatgggggaaggttttattatagaactcccaacagcccacctcactcctgccacccacccgatggccctgcctcccccatcccatccccaacatccctgtaccaccttctctcacatcttctaaagctttgtacaaatcacaatggtgcacttccaacaaaatatatcaataggtgttttcctctcttattttgtaaatagtattattttagctattaagctggataccttctttcaaattcagccattcagttgtaaagttgggaagaagtttcttgacaagactctgcaattaaatgcttaaaatttggaggggatccttccttgattacatcaagtatgttggtacatgggtttatacaagttcctcttgagaaggcaaaaagaccaccatgtgtgagagctctttgacttggccaataggggcctatcttaatgcacttgtttggacacatttctgatcttatttgtaaaggctgcaaaaggagaggatgaaatgctgtaaaagtaggaaatgaagtggaagctggaagaaaatgtaattggtggtacagctatgggccagatggtggaggggagggtggggacccctgccggcaagcagagtgtcacagctggctttcctcacttgggaaaagggtactgccggtctagcagcctcctctgtactcagccaggacacccagcgcgtgggacctgtttgtgtctgttttgcttccttgggaacggcacagtcactcaccctgccatttgcggaaatgacctggtgcactttgactgttaagcaatgcgttattgctgtagtcaaggttagtgcaagcaaggaaacattcccagtaaggtatttgtttccattttctgtctgtgcttctgtcagaaacttgctaggactttagtggccaataaaaaagaaattcctaatttcaaccttatccaaggattgtgggtttttacttatttgtttgtctcaccagttgagaaactccagtactggtcacctatcctgataaatctgcctttcagaaaacctgcaagggctgtttttcactattatggcaagagacatgtattaaatggaacagaaaaggtaagttactcaaaactgcctttgggagtcagcagaaactgaaatggcatctagacctccactgtaactgtcttcatttcaaaataataggaaggtggctttgagctgagattctaaaacaaaacc

SEQ ID NO: 39521 - DNA, 2605 bp, Homo sapiens
gggaaggcagaagcaatctctgccgagagagtcagccgagcggccgcgcggagaggaggggcgggcggtccccaggcgggcgggtgcagggcgcagggcgccgacctgctggagagggggcccgggcacgaggcggagtcccggcgcgcagccaggctggtggaggcccccggcaggctgcagattccctccggctccgggagccgcagcaggaccggccaggaggcgccatggaggggagccccatcccggtgctgacagtgcccaccgcgccctacgaggaccagcggcaggcggcggcgggggtctgcgggacccaccggctcttcgagggccagcgcaatacctgcccaactttatccagagcgtgctgtcgtccatcgacctgcgcgaacgtcagggctgcaccatggtggtgggcagcgacggcaggtactttagcaggacggccatcgagatcgtggtgcagatggccgcggccaacgggattggacgactgattattggacagaatggcatcttgtcgacacctgcggtctcctgcattatcaggaagatcaaggcagctggtggaatcattctaacagccagccactgccctggaggaccagggggagagtttggagtgaagtttaatgttgccaatggaggtcctgcacccgatgttgtctcagacaaaatctaccaaatcagcaaaacgattgaggaatatgctatatgtcctgatctccgaatcgacctatctcgactaggaagacaagaatttgacctagaaaacaaattcaaaccattcagagtggagatagtggacccagtggatatctatcttaacctccttcggaccatctttgactttcatgccatcaagggtttgctgactggacccagccaactgaagattcgcattgacgcaatgcacggagttatgggaccttatgtgagaaaagttctgtgtgatgagctgggggccccagccaattctgcaataaactgtgttcccctggaagactttggagggcagcaccctgacccaaacctgacatatgcaacgactcttctggaagcaatgaaaggaggagaatatggatttggagctgcatttgatgctgatggggaccgttatatgatcctaggccaaaatggcttctttgtgagcccttctgactccctggccatcattgctgccaacctctcttgcattccatatttccgtcagatgggggtccgcgggtttgggaggagtatgccaaccagcatggccctggacagagtggccaaatcaatgaaggtccctgtatatgagaccccagctggatggagattcttctcaaatctgatggactcaggacgttgcaatctgtgtggggaagagagctttggcactggctctgaccacctccgagagaaggatggcctgtgggctgtcttggtctggctctccattattgctgcccggaagcagagtgtggaggaaattgtccgagatcactgggccaaatttggccgccactactattgcaggtttgactatgaggggttggatcccaagacgacatattatatcatgagggacctggaggccctggtcacagacaaatccttcattggccagcagtttgctgtggggagccatgtctacagcgtggcgaagacggatagttttgaatacgtggaccctgtggatggcactgtgaccaagaaacagggcctaaggatcattttctcggatgcatcacggctcatcttccggctcagttcctccagtggtgtgcgggccaccctcagactgtacgcagagagctacgagagggatcccagcggccatgaccaggagccacaggcagtgctgagccctctcatagccatcgcactgaaaatatcccagattcatgagagaactggccggaggggacccactgtcatcacctgaatagaggaaagatcactcaccagggccaaagagagtgctcagcgggagatgcttcactgatgccttcttgctacctgtttgtgcctcttatgactttggaaaaacaaaagatattttgcttttgggggatagagggtgggtgggaaaagaattgtctgttaaagctgcactataatttggtatctacattttatcacacaaaggaacctccccttttgacaacaactgggctaggcagctgttaatcacaacatttgtgcatcacttgtgccaagtgagaaaatgttctaaaatcacaagagagaacagtgccagaatgaaactgaccctaagtcccaggtgcccctgggcaggcagaaggagacactcccagcatggaggagggtttatcttttcatcctaggtcaggtctacaatgggggaaggttttattatagaactcccaacagcccacctcactcctgccacccacccgatggccctgcctcccccatcccatccccaacatccctgtaccaccttctctcacatcttctaaagctttgtacaaatcacaatggtgcacttccaacaaattttaataagggtttcctcctattttcaaaaatttttttacctttaactgaaccttttaaatccaccttcaatttaaattggattttggactttctgctt

SEQ ID NO: 39522 - DNA, 150 bp, Homo sapiens
aatggtgtttcctgtactattcagaacaaaatactctggggagaaggttctgcaaatatttaatattgctgtgtatctatttttagttatgggaccttatgtgagaaaagttctgtgtgatgagctgggggccccagccaattctgcaat

SEQ ID NO: 39523 - DNA, 114 bp, Homo sapiens
agggaggtggggggttatgtcaaccagactgccccctctcccagagctcagacccagggctctgagagtcctcaggtcttcgtgtctcaagaggaaaaaaggagttggggtggg

SEQ ID NO: 39524 - DNA, 1107 bp, Homo sapiens
taattatgcctttatggcagctaaattaagcattttcaacgtgttcaccattagtcaccttttgaacatactttgtcttcattcttaaatattatgtttcactctttactatagaatatgttgttaagattgttttgtctaaaatcaagtatcgacaagtttaaaaaaaagattgttttgtgtttggttttctgtatttccactatgctctatggaactatgggtttgtttttgttcaatttgtttggtatttattagacttcttgaatctgtggattagtgtctttcattaattctgtaaaattctcagccattttatatgcatatattgcttcttcccattgtttctctttttttttttatcgatttaactaaaccttttcactcttttctctatgtcttttactctgttctttcgtagtacattctggataatttattctcaagttatttccattgttattaaactcggcctctgaaatcttaaatcatatattgcaatttttagtttctgaagttctgtttggtttgtgacacttttacagttttttatttcttactattttgaggcttaattttatttctttaaacatggaaagtatagttgtttttataatctctatgtttaattccactgtctgaattccctttgggggagtctgtttctgttgtccattattcctgctgttttacttcccagttcacctttactttgaagctgtagttcttttgggcacaagattaagatggagagggaggtagttgtcagactccactccctggatgggctcctggcttgaacttgtttctgttatctcataaaggcactgaaactttagcttttaggtcagagaagtcctcaggatgaaatccattttgaatattgggcttaatttctggttttcaccttctagattgtgtccaaattctttactatcttgttagcttttctatttaagaattaatatttttggctgggcgtggtggcttacacttgtaatcccagcactttggtaggggctggtctcgaacttctgacctcaggtgatccacctgcctcagtctcccagagtgctagggttacaggcatgagccactgcgccaaaa

SEQ ID NO: 39525 - DNA, 1130 bp, Homo sapiens
taattatgcctttatggcagctaaattaagcattttcaacgtgttcaccattagtcaccttttgaacatactttgtcttcattcttaaatattatgtttcactctttactatagaatatgttgttaagattgttttgtctaaaatcaagtatcgacaagtttaaaaaaaagattgttttgtgtttggttttctgtatttccactatgctctatggaactatgggtttgtttttgttcaatttgtttggtatttattagacttcttgaatctgtggattagtgtctttcattaattctgtaaaattctcagccattttatatgcatatattgcttcttcccattgtttctctttttttttttatcgatttaactaaaccttttcactcttttctctatgtcttttactctgttctttcgtagtacattctggataatttattctcaagttatttccattgttattaaactcggcctctgaaatcttaaatcatatattgcaatttttagtttctgaagttctgtttggtttgtgacacttttacagttttttatttcttactattttgaggcttaattttatttctttaaacatggaaagtatagttgtttttataatctctatgtttaattccactgtctgaattccctttgggggagtctgtttctgttgtccattattcctgctgttttacttcccagttcacctttactttgaagctgtagttcttttgggcacaagattaagatggagagggaggtagttgtcagactccactccctggatgggctcctggcttgaacttgtttctgttatctcataaaggcactgaaactttagcttttaggtcagagaagtcctcaggatgaaatccattttgaatattgggcttaatttctggttttcaccttctagattgtgtccaaattctttactatcttgttagcttttctatttaagaattaatatttttggctgggcgtggtggcttacacttgtaatcccagcactttggtaggtcgaggtgggcagatcacttgagggctggtctcgaacttctgacctcaggtgatccacctgcctcagtctcccagagtgctagggttacaggcatgagccactgcgccaaaa

SEQ ID NO: 39526 - DNA, 1096 bp, Homo sapiens
taattatgcctttatggcagctaaattaagcattttcaacgtgttcaccattagtcaccttttgaacatactttgtcttcattcttaaatattatgtttcactctttactatagaatatgttgttaagattgttttgtctaaaatcaagtatcgacaagtttaaaaaaaagattgttttgtgtttggttttctgtatttccactatgctctatggaactatgggtttgtttttgttcaatttgtttggtatttattagacttcttgaatctgtggattagtgtctttcattaattctgtaaaattctcagccattttatatgcatatattgcttcttcccattgtttctctttttttttttatcgatttaactaaaccttttcactcttttctctatgtcttttactctgttctttcgtagtacattctggataatttattctcaagttatttccattgttattaaactcggcctctgaaatcttaaatcatatattgcaatttttagtttctgaagttctgtttggtttgtgacacttttacagttttttatttcttactattttgaggcttaattttatttctttaaacatggaaagtatagttgtttttataatctctatgtttaattccactgtctgaattccctttgggggagtctgtttctgttgtccattattcctgctgttttacttcccagttcacctttactttgaagctgtagttcttttgggcacaagattaagatggagagggaggtagttgtcagactccactccctggatgggctcctggcttgaacttgtttctgttatctcataaaggcactgaaactttagcttttaggtcagagaagtcctcaggatgaaatccattttgaatattgggcttaatttctggttttcaccttctagattgtgtccaaattctttactatcttgttagcttttctatttaagaattaatatttttggctgggcgtggtggcttacacttgtaatcccagcactttggtagggtgggcagattgtattgcttgagtccaggagtttgagaccagcctgggcaacatggtgaaaccctgtttcacgaaaaa

SEQ ID NO: 39527 - DNA, 400 bp, Homo sapiens
atttatttatgcaagagtcttgctctgttgcccatgctggagtgcaatggcacgatcttggctcactgcaacctttgcctaccgggttcaagcgattctcctgcctcagcctcctgagtagccggggttacaggctcacactaccacacccagctaatatttgtatttttagcagagaaggggttttatcatgttggccaggcttgtcttgaacccctgacctcatgtgatccacccactttggcctgccaaagtggtgggattacaggggtgagccaccaagccagccttaccacactatttaaaattacctccctctctcactgcccccctttcctgctttatttttctcagtagcatttatcaccatgtaataggctatctacttatttattgtctg

SEQ ID NO: 39528 - DNA, 189 bp, Homo sapiens
caggttgtctgggccaaggggatgcaattgtctcttctctgcacccccgtccagggcacccggcttctgcccgtgggttctgcctggtccctatgccacccacatctggggctgggcttcttccccgccacggtgggggtacgtactcacctgcattttctccagcatctcaaagaactccgacgactg

SEQ ID NO: 39529 - DNA, 832 bp, Homo sapiens
gatatttgtcctcatccttatgcttatctaatggcaattagatgtacttctttagagaagagcgtgatagaggagacagtcaacagtcactggcaaacctcaccttcaagcctaaaacagctcgaaggctgagggactggactgctggtcccagatgaaaccctcgaccctcagggagaactgcccgtttgcccaccctttcccaactgactctttctgaataatgcccacatgcacactgggggaacggggtggagccatgggaagttctcaccctgtgcagtggggaggagcctggtctcttcagccaatgtctgtggtggcctgctattcaatctgcgaggtgggtcggggggttccctctgttagcaggaccccctctcactttgctgagttttttttttttccttctcacccaataaattcagccctcctcacccttcaatgtgtctgtgtgcctaatttctcctggtcatgacacaagaacctggatttagctaactaaggagcaaaaattctgcatccgcaacacaggtttagggtcttctattttaaaggatcagggaagccctctaacaagatgacatttaggcagactggaatagaggaagccaaccatatagatatctgggaggagagagttctagcagagaacaggtagtacagactacaaggtgagactatacttggactttctctggataggaacaaaacagaaagagtacaagcaaatgtgggtgatgaatcataggcaacaaagagaccaaaggtgcagaaggccagatgacattgggtcttgtaggtcacagaaaataagtacttgggatttcat

SEQ ID NO: 39530 - DNA, 413 bp, Homo sapiens
ttcgcagaaattcagctttcttgtgtgttagattaggtcaaggcttttcaaatactccctcccataaagcattttcttcaaagaaagcctaacattaaagcagatcaaagtagaattgctctgcttgaagtggggaggggtattgccccctggctcccaccctttcctatccccaagaaacccctgaggcacttccacaaagtccccagggctagcgcagtttgacacgatcaggttcaccttgtaagggtttgatgtgaaccttctttgagttggcaccaagcaaaacagccaataaagagtcattgaaagtgattgcattaaaacatggtttctatgaggactaaaaagtaccttccaggtttcctagcaacagaaatcaaggtctgctggccacagcagaaaaaaaaaaa

SEQ ID NO: 39531 - DNA, 339 bp, Homo sapiens
aacaagggttgccttaaccaaagattgtctgaaaggcacacaggagcaaatgcagcaggaagaaactccccatttgtgaggcagcctgcggggttggggttaacgggcagcagcattatgtaagatgtgcccggatcccttaggcagagttaatgcttattaactagaaaagaaaacagcctttatcggctggcagataggatgttaattggcttccgtttactgagagattacaggatccatttcacggctgcttataataaactccatccacagagaaactgtccccacccccacccaacatttgtacaaacatttcctgagtcccaaggggtggag

SEQ ID NO: 39532 - DNA, 1830 bp, Homo sapiens
tagagacggggtttcaccatgttggccaggatggtctccatctcttggcctcatgatccgcccacctcggcctctcaaaagtgctgggattacaggtgtgacccaccgcgctcagcccacatgggctcttttatcacaatttgtgtgtgtgtgtgtgtgtgtgtgtatgtgcatattatgggtgtgtgtaggaaaaagaatgttagaaatgtaccaattttgaaggcgtagactatgaaattacaaatgcttcaaaattttcttcccaatacttacgtggcattttataaatttccaccaataaacgtgtattatttttattgaaaaagcatatttttaacatgcccttctagatgccctcctagccagactgaatcacctcccatttgattttttttaattttctacctttaggttccggctcattcattaacatcaatttccattcataagtcctcacaaacccacttttcctcttgcctgagtgcctcacataccctactgcctgagatggttccagaggcggtctcctctctcccttagaaacaccaggcacacacctgcccccagtctcgcctgcactctcctttcctcccgcagagaggcattcctttctcctcctctcatcctacacacactataagagacaactgaaatcttgcctcctccagccagcttcttaattcatttgttctcaaagccctggtttgagctcacacagcatctagagtgttttacaaaatataaaatattattatccctgccctgaattttttgttttggtatgtgtgttattttcccctccaataagattgtgccttggagagggctgagaacatagtatcatagataaatgaataaaataacataaaataaaataaaaatacatataccctttgaactaactattccacttctatgtaagcacaattatatgccagtaacactcattttaacgctactttagtggcaaaaaattgtaaacacctcagatgcctattaaaagaggaatggtttaaagatactattatagccacactatgaaatataatacagtagttaagaagaacgagcttgatttgtatgtactgacaagaagaatctataaggtatgtaaacagttgaaaaaaaagctacagagttttacatttgtcaagatctaacactaaacaaaattagaaacatgtgaaatccatatacacacgtagaaaaatacatataatgagccgtggatggaaactcgcaaatgtgatattaaagactagcactataagactgagtgagatttggagagtataggaaaggaggcttttagttaatatagagagatattcaaaaatttatgagtgtgatctcatgtattagttattcggttaaagaaacaaaattaaatgaaaaatacatttttaaaaaggttgcaattctgaattatgggagagaaataaaaattagcaaaacatatttgcaaagtggctcaggaggaaggagctgaaaccctaagaatgggtgagtttttttttttttcagagacaatacagaaaagaagaggcaaaggggccgagatgggatacagacctgtatcacacaggtgtgtgcacattctcatttagaactggaacaagggagtcagatttaaaattctggtgcagattccaaaggtgttctctgaggaaaagttcttttgtttggagatgccatgtgttacagcacagaaattgatcaacctggcttagagcgtcacattcttcctctgttggagcaagaggtacagaaggaattggaatttagtggaattgaagatctttttgaacagcatctgcagaatgtagt

SEQ ID NO: 39533 - DNA, 330 bp, Homo sapiens
ggcttttggatgggaggctaatgatatctcactgtggttttaatttgctctatcttgatgactaataaagttcagcacattttctcatgcttactgaccatttggatatcctcttttgtaaagtttctattcaaactttttgtatatattttttctatttaattacctatttggactgacttctaacattttttatatattttagataagagccctttttcagatagatatattgcaattatgttatctatgtggcttacctttttcctctcttaatggtatctattgaaaattgaactatattaataaaattcagtgtatcagatttta

SEQ ID NO: 39534 - DNA, 604 bp, Homo sapiens
agggcctactatatgagaggagaagtgctaggtgctgggacatacagtgaacaagatagaaatccatacacatataaaatgtaatttcccatgaatatgtgtcagatcacttctggaaaagaaagatacctttctattgttggagccatacacttcataccaactaatgttatcctagtatttatctatacagtatttagtagttttaagctaatttattttcaaatttgtgaatgccagcttatattattattgagattctcaagtgggaatgacgcatgtcctctaatcctgctagtgcactttggagttatgccagaaattttgatgtgattcttctgtccacctgctatctagccatctcccttcactccacacatttgtgtgcgtgtgtttgagatagggcctcactctgtcacctaggctggagtgcagtggcgtgatcacagctcactgcagcttcaacctcccaggctcaagctactcaggagactgaggcgggaagatggcctaaaccttggaggcagaggttgcagtgagctgagaatgtgccactgcactctagcttgggtgacagagcaggattctttctcaaaaaacaaaa

SEQ ID NO: 39535 - DNA, 463 bp, Homo sapiens
agggcctactatatgagaggagaagtgctaggtgctgggacatacagtgaacaagatagaaatccatacacatataaaatgtaatttcccatgaatatgtgtcagatcacttctggaaaagaaagatacctttctattgttggagccatacacttcataccaactaatgttatcctagtatttatctatacagtatttagtagttttaagctaatttattttcaaatttgtgaatgccagcttatattattattgagattctcaagtgggaatgacgcatgtcctctaatcctgctagtgcactttggagttatgccagaaattttgatgtgattcttctgtccacctgctatctagccatctcccttcactccacacatttgtgtgcgtgtgtttgagatagggcctcactcttgcactctagcttgggtgacagagcaggattctttctcaaaaaacaaaa

SEQ ID NO: 39536 - DNA, 216 bp, Homo sapiens
atcacctaacaacacatttatcagaatgtatccccatcattaagcaatgtatgactgtatataaaaaagagtatacatggaaaaatatattcctgttttttgttacaagagctcatatagtcgaactaagtgtgcaagtgatgttaactatcctatttcctcactacacaatcttaaatccttgtatccaacttttacccctcactgtacttaaaa

SEQ ID NO: 39537 - DNA, 373 bp, Homo sapiens
ggaaactgccagattgttttccaaagtgactatacttttttccttcttttaaaattgtataaaatatatgtaacataaaatttgccaccttggcccaggcgagtggcccacacctgtaatcccagcactttgggaggctgaggcaggcggatcaactgaggttgggagatcgagaccagcctggccaatgtggtgaaaccccatctctactaaaaatacaaaattagctgggtacggtggcatgcgcctgtaatcccagctacttgggaggctaaggcaggagaatcacttgaacccgagaggcagaggttgcagtgagcccagattgcaccattgcactccagcctgggcaaaaatagcaaaacccagtctc

SEQ ID NO: 39538 - DNA, 307 bp, Homo sapiens
caaaatgttatcctagtatattttatccaggaaaaaaaaatgtaaggtcataaatctgttcaatttagacaatagatatttttgcaagagtttcacggatatttaaaaaggtgtaggctagacttgtgtgaatgtaagagatttttatgatcataagagcaatgcatgtttactatagaaaatttggaaattgtgaagatgaaagctaaaatcaccagtaatctctacatttgtctcttttttcctgtgtgtgaaatggagaaagggatgtgtgagtgctgttcaatcttctgccgtaacaacttgg

SEQ ID NO: 39539 - DNA, 428 bp, Homo sapiens
tcctcccttgtcagtggaaacaaatagaatgaatagactgtgattcacatcgattttccttaaacaaatctcactaaaatctatgtgtagcctttcctaggaggacagatgtcaccttgcaacttgtagaaatatgtcgtgaaccggctgggcacagtggctcacacctgtaatcccaacactttgggaggccgaggcgggtggatcacgaggtcaggagatcgagaccatcctggctagcacggtgaagccccgtctttactaaaaatacaaaaaattagccgggcatggtggcgggcgcctataggtccagctacttgggaggctgaggcaggagaatggcgtgaactcaggaggcagagcttgcagtgagccaagattgcgccactgcactccagcctgggtgaaagagcaagactccgtctcaa

SEQ ID NO: 39540 - DNA, 380 bp, Homo sapiens
cgtgggggtcccaagtgggactggaaccaccgcgaaagaggcggggctgcgcggatcttccacaccagctcctcccttccgtcagggggtgctgcgcatgaacgttttcccatctctacctcttggttatccctcagcagagattcttcttttactctgtacagttttcagcatccctcaagctgatatttcaattaaacaaattttagaattctgagaaatggcgaaataatgtaaaagaaacaaatgatattggccctaaattatcctccagcccctgctgctcatcggacactttatgaggttacaaaggaccatggcgctgcgcatatgggggatccattttacccaccgtacttagatcaggctgtgacttccgc

SEQ ID NO: 39541 - DNA, 661 bp, Homo sapiens
taacctttacatagttcactatggcatgcatattcccattgcaatgatacatacccagatgaatattatttttttagagtgcctctctatttgatatttaggtcaactagtgttaattttctggtataacaggaaaactgttcttattcttaaaagatacatgctgaaaatattttgggataaagtgtcatgattgctgtaactttcaaaagggtcaacaacaacgaaacgatgatattggtaaagtattatatatagagaaaatattaacatttttaaaaatttaaatgaaagatgtacaggagtgtgctgtactggtcttccgtttctctgaatgtatgaaacatttccataatagaaagttgtggggagccaggcatgctggttcacacctgtaatcccggcactttgggaggccaaggcaagcggatcacctgaggtcaggagtttgagaccagcctgaccaacatagtgaaacccctgtctctactaaaaatacaaaaattagccgggcgtggtggcaggtacctgtactcccacctactcaggaggctgaggcaagagaattgcttgaacctgggaaatggaagttgcagtgagccgagattgtggcattgtactccagctctgtctccttttgagacagcaagactccgtctca

SEQ ID NO: 39542 - DNA, 342 bp, Homo sapiens
tggagatggggtttcaccatgttacccaggctgatctcaaaaccctgggctcaagagatggctgcctgcctcggcctcccaaagtactgggttacaggcacaacccactgtgcctggcctgatttgggactttttgagttgatatttggattagaattgggtcttagagttgatgctggaatgggttgacttttagggatgtcgggatggagtagatgtatgttgtacatgggatggacatgaatcttggggagccagaggggttgaattgtgttcccccaaagctcatgctgacccaaaacttcagagtgaaaccttatttggaaagagagtctctgtaga

SEQ ID NO: 39543 - DNA, 518 bp, Homo sapiens
ccctcacctcacggctccctcacttgtgaattaaagtcagacactgccgtaaggttcttctggttcctgctttgtggagaaagctttcagcagcaatatctgggatcactggtgtattaaatgtcaggcctcgcatcattattctgccctgagctgatggtaaaccgggcacccagccttttagctttcatccagcacgagggaacttgccttcagatgtgacacgtacaagtcaaaaaagctcagagtcagctccaacgtctattggatcccactctatcgcctttaaaaaggaaaagaaaatcgaattcacagaaccgaggctaaatacgaccgttaagaacggactgcattcaccatatttccatgagagtggcaaagagaacaaagataaatgccaggctacatcttggatcctttgccagcttgtggaagaacttagcagaaaaagatgtgaactctactgtttaggaataaaataacttttaaaaataaattattgaaaagtgaaaaaaaaa

SEQ ID NO: 39544 - DNA, 601 bp, Homo sapiens
agagtagatggacatgtatctgtttccaataccactgagtgaggaaaataagccacagtaccatgaaactgtagaacaccaaggacaaagagaagctgcaaaaactgaaaaatcaactcttcaatcagaaaattgaggcttcagggcaaaccattctcccaaaaactggagggaatggtgcatactgagaatcacagattacctccagaaacctcaccagattctcagggtaaagagaaaaatctcctcaagctttaggtagggagaaggggaaatcatcatcttgaaataagccgtagcactccttagcaatggtttgctctcaaagtaaactgtttaatcaagcctaattgacatgtgctttaccagagcctaacagacctggaggaagatgtgttagtccatcttgcattgctaaaaaagaatacctgagactggtaatttataaagaagaggggtttatttggctcacatttctgcagactgtacaagaagcatggcaccagcatctatctgcttagcttctggtgaggcctcaggaagctttcccttatggtggaacacaaaggggaacaggcacagcacatggagagagagagag

SEQ ID NO: 39545 - DNA, 647 bp, Homo sapiens
atattcttgaaaaggcttcgtaggtattgacttcacatacgaatttggaattattcctccttaatatggggtttaccatttgtaataaaagtgagtaatgcaaaatcagacacttattgaatctatgtaagtaatgaatgtttctgtgaataataaggagagtatgtaaaggtgtctgcattttcaggggtcaatgagaatcaaagttcctttaaaagttttcatttttgtttacaaaaaatctattttgggttagatatatcttaaagagaagaaatttttttctcatataacccataaaaataaaacattataaatattacccaaaatatttcaaatattacatttaaatttcctctctttaatgtattcatttctataaaattaatttttattccactgcatcttgagtcagtagattgcttcatgactggaaaagaattcttgtgactctcagtccactgttatctaaaagtagtctgagtaatgtcatcttctaagtctgatttcagaactttgtcctttgaagtaaaatattagaatgataagtaaaattatctattaagattttataaatcaagctgggctcagtggctcatgcctataatcccagtaaatcaggaggctgaggtgaaaggatcacttga

SEQ ID NO: 39546 - DNA, 434 bp, Homo sapiens
ctttctgccccaatacacttgtcactggaagaaatcacacagggggtagggataaagcatgaggtatcatgattccttcatgtaaaaattttgctcaaattaaaatgtgaacatagtataatatgtaaaaaaaactggacctccttaaatcctttataaagcaaggcaatgtgtaaacatatgaataaataccaaggttttattttaagtaatagctgtgaatgttaaaagtaatattattttccttagaatagtttaatcacatatcccttttaaattttttaagcctttaaacgtattattttcagtctgggcttgggggctcacacctgtaatcctagcagtttgggaggctgaggctaggggatcacttgagcccaggagtttgagaccagcctgggcaacataagaagacctcatttctgaaaaaaaaa

SEQ ID NO: 39547 - DNA, 550 bp, Homo sapiens
  misc_feature (59)..(59): n is a, c, g, or t
  misc_feature (87)..(87): n is a, c, g, or t
atcctctaaatgtctgtcaatgaaggaatagataaattgtaatatgttcatataaaatnctgcataaataagtgaaatttataaatntactaacgaatgaatcttgaaaacagagttgggagataaaagcaagctgttgaagaacatggtcagtatcctctcacttatgtaagttaaaaactccaaagaacattatctatattggtaatggcatagacatgtgtggtaaaatataaaaatattaactaaaagttctatacgcttcaggatattgttagtataataaggcaggaagtggatagcattggggtgagacagtggtttggtggttatgtttggttactttagttatgttagtaacattttttttttaaagaaggatctggaataattatggtaaaataatagtatttgctaagactagatgattggtgtactggatttcatccgctattttctaagtttgttatgaacgcttaaaatatatatgtatgtagtaaaattaatgtaaatttgtacaaataaaaataaatggcatgtgatatatggc

SEQ ID NO: 39548 - DNA, 770 bp, Homo sapiens
agttaacctggactataatacacatctctttttctttgttaagatattagtgaagcttttgattctacgtaatgttctcttgtacaggttaaaagtattttatttttagagattagtaacaaattggcttgaaggtagaatgcaaaagtcaacctaaaattattggaacagtatcttttaaagcttgataccaaagttcattctcattagtgtttgtattgactgacttcagtgatgattatactaaattagtgtaggtgctagacatctcatatttacaacctcatacacatttctgccatatcttgtttgatttgttataatgctacaatgtaactagaacatgtagtatttaatttttttttttcaatgaagattccaacttagatgcaaaagaggcatgagtagcccttgggcaaacaacataacaggattgatttaaaacccacataataatgagttctattaagcttatgatcctggccaggtgtggtggctcacgcctgtaatcccagcactttgggaggcggaggtgagtggattacctgaggtcaggagttcgaaaccagcctggccaacatggcaaaaccctgtctctattaaaaaagtacagaaaattagctgggtgtggtggtgcgcgcctgtaatcccactactctgtaggctgagacaggagaattgcttgcttgagccccagaggtggaggttgcagtgagccaagctcacgccattgcactccagcctgggcgacagagtgagactctgtctcc

SEQ ID NO: 39549 - DNA, 507 bp, Homo sapiens
gggattacaggtgcctgccaccatacccagctaattttttgtgtttttcgtagagatggggtttcaccacgttggccaggctggtcttgaattcatgaccttaggtgatccgcccgcctcggcctcccaaagtgctgggattacaggtgtgagccaccgcgcccggccaaggatctgggccatttaagtggagtcttgaaggatgagtaggtgttaggcacagacgcacagaggcaggcaaagccacaggctgttggtttaggcaaaaattgagactggctggataaagtggtcttgggggaccatcaccagagaggaggcgctggaggtctgcaaggccttgtcctgcccctccaggggtagaggttccaggaggggctgactttttctcctggaagcctcacagaactgcagaccccacggatggcttggtgttgccaacatgaggcttctaaggcttctgcggggagatgggttggtggggagaagctgggggtggcagtggac

SEQ ID NO: 39550 - DNA, 437 bp, Homo sapiens
gttctcatttacaaatgggagctaaattatgagaacacatgaacacatagagggaaacagcagacactggggcctctgggagggtggatggtgggaggaagcagaagatcaggaaaaacaattaatgggtactaggcttaatagctgggtggtgaaataatctgcacaacaaatccctgtgacactagtttacctacataacaaacctacgcatgtgccattgacctgaaaataaaagttaaaaagattattaaaaatgtgtcagtaaaagtctttaaccaacacaagatggttcatcccaagagtcatcttaatttaaaaatcttcacatcttaagaagctacatgggaggctgcggcaggagaatggcttgaacccagcaggcaggggttgcagtgaagcgagatggcaacattgtactccagcctgggcggcag

SEQ ID NO: 39551 - DNA, 289 bp, Homo sapiens
caaagagaattagtcagcaaccttgtgagcagtgcggtccctccgtaggtggggctgcctgtgctcctgaggccccccaccaactccccactcagtgttctttgctgcacgtgatgccctagtagagggtcgaaaccaggctgcatcccacaggtggagggcaaggtcactggcatcaggccaagggtgccatgcacatgtcactgtgggcctcagagtgtgcatcactcgatggttagaagctgcagctcaggagtcacattcacattcagctcccaccccgtcatgt

SEQ ID NO: 39552 - DNA, 607 bp, Homo sapiens
acctctgcagttgaagtgattctcatgcctcggcttcctgagtagctggaattatggcacgcaccgccacgcctggctaatttttgtattttcagtggagatggggtttcaccatgttggccaggctggtcttgaactcctgacctcaaatgatctgcctgtaatccaaagtgctgggattacaggtgtcagccaccgcacctgtcctgacacgtgcatttaaagcaagaaacacacacttccaggacatagggctctgtcagcaataactgtcatctttgtatttgcagagatgtaaatatataagaaaccggctgggcacggtggctcacactggtaatcttagcactgtggaagactgaggggggcagattgcttgagtcccagagtttgagaccagcctaggcaatggagcgaaaccctgtctctactaaaaatttaaaatattggccgggcatggtggtgcgcgcccatagtcccagctacttgggagtctgaggtgggagaaggtacccaagcctgggaagtcaaggctgtagtcagctgtgttcatgccattgagctccagcctgggcgacaggagtgagaccctgtctcaaaaaaaaaa

SEQ ID NO: 39553 - DNA, 474 bp, Homo sapiens
acaatataactcttattaacgttattattgtcccaaatgttatcccgcatgggagagagtcagttctttctgtgtctgttatgatagccactagccttatgtggatatttaaatttgaatttaaatggattaaaattaagtaaaatttaaaattcagtctctcatttgtactagccacatttcaagtgctcagtagccacagataactagtggatatcagattggaccactcaaaattataggacatcttcattattgcagaaagttccattgggcagtgctgatgtagaatatataaagaattctcccagctcaagaataagacaaccaaccagtggtgtgctggagctgtctcatactatcttgagagtccattgttaaatttgcagtaattttgcaaattggttaaatacagccatttagaaaattatatcaatttaggatgaaataaagtatattgaaaacaaaactcat

SEQ ID NO: 39554 - DNA, 173 bp, Homo sapiens
atgtgtgtgtgaggacagagagaaggggagcaaagcttcagggaggtcttgaggtggaaaaatttgtgacgcacacgatttggtgactgaagaagaattctttcttgagggttctataacacaatagttacggtcaccctatgtgcatttaaaaattcctagttggtctcaag

SEQ ID NO: 39555 - DNA, 520 bp, Homo sapiens
gcgcacaccaccatgcccggctaaattttattttttatcgagacggagactctaccagagagtccccccacatgttggccaggctggtctcgaattcctggcctcaagcgatcctccgcctcggcctcccaaagcactgggattacaggcatgagccaccgcgcctgatttcagagtttttgaagcagaaagggaaacgtttccatctagagggagggcggacagacaggacgcctgggattctgggggaatagggtctgggctctggattttttaggtcctggagagtgacactcaagaaccgaaggggacagggtgaaggactgaggcctgggttccgagtggggcggctaggaaaggaaaaggctaggtgctccctgacccaggtcttctctacccgttgctttccagccatgcctccgccgcagggtgacgtgaccgccttgttcctggggctccgggcttggggaagtccgcgctgatcgcagcgctgtgcgacaaggatgtggagacgctcgag

SEQ ID NO: 39556 - DNA, 515 bp, Homo sapiens
aggagcccaggtgaacatgtccttcatatcagctaatccaagcccagagaaggtgaaagagtctcagaatcccatagtgggtcagaaattaagcccaaacagggtggctcacggctgtagccctgcactttgggaggccaaggcaggaggagcacttgagcccaggagttcaagaccagcctgggcaacttagtaagacaccatctctacaaaaaaaattttttaaatagccaggagccaggtgcggtggctcatgcctataatcccagcacttcggaggctgaggcaggtggatcacttgaggtcaggagttcaagaccagcctggtcaaaatggtgaacccccgtctctaccaaacgtacaaaaactacccaggtgtggtggtgggcgcctgtaatcccagctactgaggcaggagaattgcttgaacccaggagtgagaagttgcagtgagccaaaattgcaccactacagtacaacgtgggtgacagagtgagactctgtctcaaaaaaaa

SEQ ID NO: 39557 - DNA, 5986 bp, Homo sapiens
ggtggcgggcgggggcctctggtagccctggggacgctgtatctgtgggctcttgaatcgcgtcacaaatcagcgaccgaactctggcggtggtggttaagacggcgaaggcggcagcggcggcgacagctctggggtttgcgtctcggggtgtgtcggccgccgctgctgcttgggcctggtatgtacagatggctggttaggattctcggcaccattttccgtttctgcgaccggtcggtgccccctgcccgggccctcctgaagaggcggcgctcagacagcactctgttttctacagtggacactgatgaaataccagccaaaagaccaagattagattgctttattcaccaagtgaaaaacagtctctacaatgctgccagcttatttggattcccattccagctgaccacaaagcccatggtaacttctgcttgtaatggaacacggaatgtggccccttcaggagaggtattttcgaactcttcatcttgtgaactgacaggttctggatcctggaacaacatgctgaaactgggtaataaatctcctaatggaataagtgactatccaaagatcagagtgacagttacccgagatcagccacgcagagtcctgccttcctttggttttactttgaactcagaaggctgtaatagaagaccaggtggccgtcgccatagcaaaggtaatccagagagttctttaatgtggaaacctcaggaacaggctgtaacagagatgatttctgaagagagtggcaagggtctgaggcgtccccattgtactgtggaggagggtgttcaaaaagaggaaagagagaagtaccgaaagttattggaacgacttaaagaaagtggtcatggaaactctgtctgtcctgtaacttcaaattatcacagttctcaaagaagtcagatggacacattaaagaccaaaggctggggggaagagcaaaatcacggagtcaaaacaactcagtttgttccaaaacaatatagacttgttgaaacaaggggacctctatgttcattgagaagtgaaaagaggtgttcaaaggggaaaattactgatacagagaagatggtcggaatcagatttgaaaatgaaagtaggaggggataccaactggagcctgacctatcagaagaagtgtcggcccgactccgcctgggcagtggaagcaatggcttactcaggaggaaagtgtcaataattgagacaaaggaaaagaattgctcaggcaaagagagggacagaagaacggacgatctccttgaacttacagaggacatggaaaaggaaatcagtaatgccctaggccatggcccacaggatgaaatcctaagtagtgctttcaaattgcgaattactcgaggagatattcagacattaaagaactatcactggctcaatgatgaagtcattaatttttacatgaatcttctggtggaaagaaataaaaagcaaggctatccagcacttcatgtattcagtactttcttctatcctaaattaaagtctgggggttaccaagcagtgaaacgatggaccaaaggggtaaatctctttgaacaagaaattattctggtgcctattcatcggaaggtacattggagcctggtggtgattgacctaagaaaaaagtgtcttaaatatctggattctatgggacaaaagggccacaggatctgtgagattctccttcagtatttacaggatgaaagtaagaccaaaagaaatagtgatctgaatcttttagagtggacccatcacagcatgaaaccacacgagattcctcaacagctgaatgggagtgattgtggaatgtttacttgtaaatatgcagattatatttctagggacaaacctatcacatttactcagcaccagatgcctctcttccggaagaagatggtgtgggaaatccttcatcagcagttgctgtgagaaaactttgcctggtccctctagctgctggtggttctttcacagacatttccatatacctcatgcattgtgggttaaaaagtccctgcatcacttctgttctcacaggtactgagctgtcaaaagtgcatgaaggcctctcactgtactctagtcctgacttggggtgcagagggctgcttgcaatcctgtttgtaaggctgtgcctgctcagagctttggactgttcaacccacacaagaacaaacgctaactaatattttttttaagagattcttttccctatgaatgtgggaaatgcaggatttattctgtgaattgtttgtttctgtgtgtttgttcagcgtattcattcactcactcgtttgcaaacataatgggcagtggtcatttactgctgctcttttacagttagctctaaattacttgtttgaactatttatttctgaaaggaatgttactcaagctgccactccctgctgaagagcaggagggaactctcactgggggcggaaggaagtggagctggagcagtaactgccaacatgaagctggagggtttgggattttttttgtttttgtttttttgaggctcaaaaaatgctgggagaaatgaaaatgctgtgggatagggctcctgttgcctttcagaggaagtctgacactacagcgttggcacagtgccgtgaacagtggaactgtgcccaagggactctgattatccaagcatcttccgaagagtgttgtggtcaccttaaagagacttccccttctggaaatgtggtgacttggcttagtcttcaaactggattcatggatttgaagtaactgtaaaccctaaatcttcattttcatcccagatctggttgagtataaacctcagaattgtaggggctggcctgagctgtttatttcaaaagatactattcaatttaaagctatttttcctcagagtttttgttttctatatattaagtctaaattaagttttctactcattaagactaacatctccccactccatccccactgaaatttgtggaagaaaatttagtacttggctctgaggttgccagttatacaataatctattttgcatatgaaagtttgtatttaacttttttgttcattaaaaaccttactgatatggttataacttcagacagtttagagttggtcagaacatattttgcaagatctagtgcctagtgttgcttttctgatgtaataaaaggtggtctggcagaacctaaaaaagtatatgctgaaatgatttctaaccctctccctacttaaacctcccagacttgttctggttcataaaagcaagaggtaaaactggaaaaattgtgcacgtgttacctatggtttgaattaaagtagtagcagttagaatagaaaaggattatcagaatatgagagatgttaatttagaattaataaggcttgatcctctattggatatagagaagagattgcagtggtatggcagaattgaagatgatgcctagatttgaaggggaaaatataaggaattcagttttgaatgttttgaatttaataggttttatggaacctccaagtaaaaatttctagaagtcagttgcatatgcatagctgcagctttaggagagagatatgaactggaattaagaaattttgagttattcagcagatacatatttaacatttcttatgtgccaagcatgtaccaggcaccaaggatactgtaaaacacatgaaacctgctttatgactaataaaggagacagaaatcaatcatgaagatacataattacaaactgagacaagtgtcataaggaaaaattagaggttgatgtgagaaaattttaacaggaggaccacatctcattgagactgggggatcagggaatgttatcattggagctaaaatttgaagaacaagtaggagtagggcaagtagaatatcttgggcagaaagaacgttagcattataccaataaaagtagtcagatattaacaaactaagttaaagaaaaataaagcaaaaggcagcagctaactgtattctgtgaagagacatgtttaaaacaaagataggagaaggttgaaaggaaaagctctatcatgcaaacacaaccaaaagagctggtacggctacaaaaattagacttttaagcaaaaaccatattattagagatagaggaaacttaataatggtaaatatacctaataacatagtcttgaaatatataaatcatatggagaatttaacaactgtatagtcttagtgggcagtcttaacatgtctctctgatagaccagtagacaaaactcagtaaagctatagaagatgtaggtacattagcagatgtaactaatggacatacgtagaccactgcaaccaccaataacaaaatgtatattctttttcagtatccctggaatgtttacaaaaattgactattttggacaataaagtgtaaatacattttaaaaggatgaagtgatacaaagtgctgggattacaggcgtgagccaccgcgcccagccccattttattttttactttaaatgcctgccaaggagcagcctcaagcccagagaagactgaggctacggggaacttcccttgctgcaggctgttgtaacactttaagggccccaggtctccactgccaagcaggacttggcacatgagcacccaccccacagcaccatcaggcagcacccatgggctccaccagcccagctctgtccctcccctaggtaaagatcacactgaagtcttcaagtccccagcaaccaagttgggggtggtttccttcctcttcaggcagccaggcccatggctggaaggccgggctggaggcccagggaatcggttactgatgtggccaccctattcccacatggggagcaccaggagccctggagccccttccacccaatcccatctcgcaggagagcagggtctgggctcctgcctcaccgctggttcagcagcaccctccccgccgggtcccaccttgccttttgaagaagagcccgcataatgagtggacggcagacagctatatttagtggtgcctcgacactcacgaaccgccagcgtggcgcctggatcttgcccagctgccagctccccccaccaggactgtggttcctcagtttctcctgccagccccggctcatctcagggcaaagctatagacatggtagatctcatcggggaggttctcctgcctctcctcggccaggaggctgaggcctgcactgcagatgatcctgcggaccacgtcaaggtcccggcacacgctgctgtccacgtcgtccagaatcacgccctcctgggccatgttgtctttgatgacgatgatgccgttggggcggaggctgcccttgcagcgccgcaggaactcggccaggtgctgatcggtgaggtggcctggggagggcagaggcaaggttaccagggcaccatgcaagcggatgtcggcactggatgggatgtacttctcagccccgctgagcccctcatttgtgcccagcattttgtgtgcacacatggcctcattggctctcagtcccgagagatttactaaaccccaattcatagaataggaaactgtggctcagaggtcatctacctaaagacacattaagccagaatttgacttgacgggatggcttacaagtcctgcctgatacctacacaccatgatgccccacccctgccaggcttggatcggaggagtgaacctgggccaagagtttggcattgcaggagctcccagagagactgccttccctacactagaagtccccacaaaggcttctgagaccacaaaatacaaggccagacctagagtgtccacagcaggcctgtgctgcccgcctcaggaggtggccgactgctgctagcggcctgccgccacgtcagcagcccagggcacagcgctcgaggtgtgctgttaggctaagagggtgcagggctagacacgaagcttaaactattcatcttattaaaaataaaacccttataaaactc

SEQ ID NO: 39558 - DNA, 1048 bp, Homo sapiens
  misc_feature (171)..(171): n is a, c, g, or t
  misc_feature (187)..(187): n is a, c, g, or t
  misc_feature (221)..(221): n is a, c, g, or t
  misc_feature (256)..(256): n is a, c, g, or t
  misc_feature (271)..(271): n is a, c, g, or t
cggcttcgggggaccgggctatccgaggccaaccgaggctccgctgctgcttgggcctggtatgtacagatggctggttaggattctcggcaccattttccgtttctgcgaccggtcggtgccccctgcccgggccctcctgaagaggcggcgctcagacagcactctgtnttctacagtggacacngatgaaataccagccaaaagaccaagattagatngctttattcaccaagtgaaaaacagtctctacaangctgccagcttattnggattcccattccagctgaccacaaagcccatggtaacttctgcttgtaatggaacacggaatgtggccccttcaggagaggtattttcgaactcttcatcttgtgaactgacaggttctggatcctggaacaacatgctgaaactgggtaataaatctcctaatggaataagtgactatccaaagatcagagtgacagttacccgagatcagccacgcagagtcctgccttcctttggttttactttgaactcagaaggctgtaatagaagaccaggtggccgtcgccatagcaaaggtaatccagagagttctttaatgtggaaacctcaggaacaggctgtaacagagatgatttctgaagagagtggcaagggtctgaggcgtccccattgtactgtggaggaggtaagccttttcagcttgatttctttaaaaaaaattttacagctcttcccaaggatgctgcctagagacactcagaatggttcaacgtttgacataccattgtaggttttcctacaatacagcctccaacaaaatgaggctgtcttaaacccagatgcaccaaaaatctgcatgcagcatgtgcccaggcagactttgaggggttcatgctatgagacctaaagttcttatgagattgtccagatcacattagcaaggcctatagcggccacgtgtgctcagtgagtctgtgacaggatcaagcatgttgcttatcgaggagcagaaaatcgttgtgaaagtattgaaggcacagacacagagtcagac

SEQ ID NO: 39559 - DNA, 991 bp, Homo sapiens
  misc_feature (114)..(114): n is a, c, g, or t
  misc_feature (130)..(130): n is a, c, g, or t
  misc_feature (164)..(164): n is a, c, g, or t
  misc_feature (199)..(199): n is a, c, g, or t
  misc_feature (214)..(214): n is a, c, g, or t
agcgtctctggcggtggtggttaagacggcgaaggcggcagcggcggcgacagctctggggtttgcgtctcggggtgtgtcggccgccgctgctgcttgggcctgcactctgtnttctacagtggacacngatgaaataccagccaaaagaccaagattagatngctttattcaccaagtgaaaaacagtctctacaangctgccagcttattnggattcccattccagctgaccacaaagcccatggtaacttctgcttgtaatggaacacggaatgtggccccttcaggagaggtattttcgaactcttcatcttgtgaactgacaggttctggatcctggaacaacatgctgaaactgggtaataaatctcctaatggaataagtgactatccaaagatcagagtgacagttacccgagatcagccacgcagagtcctgccttcctttggttttactttgaactcagaaggctgtaatagaagaccaggtggccgtcgccatagcaaaggtaatccagagagttctttaatgtggaaacctcaggaacaggctgtaacagagatgatttctgaagagagtggcaagggtctgaggcgtccccattgtactgtggaggaggtaagccttttcagcttgatttctttaaaaaaaattttacagctcttcccaaggatgctgcctagagacactcagaatggttcaacgtttgacataccattgtaggttttcctacaatacagcctccaacaaaatgaggctgtcttaaacccagatgcaccaaaaatctgcatgcagcatgtgcccaggcagactttgaggggttcatgctatgagacctaaagttcttatgagattgtccagatcacattagcaaggcctatagcggccacgtgtgctcagtgagtctgtgacaggatcaagcatgttgcttatcgaggagcagaaaatcgttgtgaaagtattgaaggcacagacacagagtcagac

SEQ ID NO: 39560 - DNA, 5931 bp, Homo sapiens
ggtggcgggcgggggcctctggtagccctggggacgctgtatctgtgggctcttgaatcgcgtcacaaatcagcgaccgaactctggcggtggtggttaagacggcgaaggcggcagcggcggcgacagctctggggtttgcgtctcggggtgtgtcggccgccgctgctgcttgggcctggtatgtacagatggctggttaggattctcggcaccattttccgtttctgcgaccggtcggtgccccctgcccgggccctcctgaagaggcggcgctcagacagcactctgttttctacagtggacactgatgaaataccagccaaaagaccaagattagattgctttattcaccaagtgaaaaacagtctctacaatgctgccagcttatttggattcccattccagctgaccacaaagcccatggtaacttctgcttgtaatggaacacggaatgtggccccttcaggagaggtattttcgaactcttcatcttgtgaactgacaggttctggatcctggaacaacatgctgaaactgggtaataaatctcctaatggaataagtgactatccaaagatcagagtgacagttacccgagatcagccacgcagagtcctgccttcctttggttttactttgaactcagaaggctgtaatagaagaccaggtggccgtcgccatagcaaaggtaatccagagagttctttaatgtggaaacctcaggaacaggctgtaacagagatgatttctgaagagagtggcaagggtctgaggcgtccccattgtactgtggaggagggtgttcaaaaagaggaaagagagaagtaccgaaagttattggaacgacttaaagaaagtggtcatggaaactctgtctgtcctgtaacttcaaattatcacagttctcaaagaagtcagatggacacattaaagaccaaaggctggggggaagagcaaaatcacggagtcaaaacaactcagtttgttccaaaacaatatagacttgttgaaacaaggggacctctatgttcattgagaagtgaaaagaggtgttcaaaggggaaaattactgatacagagaagatggtcggaatcagatttgaaaatgaaagtaggaggggataccaactggagcctgacctatcagaagaagtgtcggcccgactccgcctgggcagtggaagcaatggcttactcaggaggaaagtgtcaataattgagacaaaggaaaagaattgctcaggcaaagagagggacagaagaacggacgatctccttgaacttacagaggacatggaaaaggaaatcagtaatgccctaggccatggcccacaggatgaaatcctaagtagtgctttcaaattgcgaattactcgaggagatattcagacattaaagaactatcactggctcaatgatgaagtcattaatttttacatgaatcttctggtggaaagaaataaaaagcaaggctatccagcacttcatgtattcagtactttcttctatcctaaattaaagtctgggggttaccaagcagtgaaacgatggaccaaaggggtaaatctctttgaacaagaaattattctggtgcctattcatcggaaggtacattggagcctggtggtgattgacctaagaaaaaagtgtcttaaatatctggattctatgggacaaaagggccacaggatctgtgagattctccttcagtatttacaggatgaaagtaagaccaaaagaaatagtgatctgaatcttttagagtggacccatcacagcatgaaaccacacgagattcctcaacagctgaatgggagtgattgtggaatgtttacttgtaaatatgcagattatatttctagggacaaacctatcacatttactcagcaccagatgcctctcttccggaagaagatggtgtgggaaatccttcatcagcagttgctgtgagaaaactttgcctggtccctctagctgctggtggttctttcacagacatttccatatacctcatgcattgtgggttaaaaagtccctgcatcacttctgttctcacaggtactgagctgtcaaaagtgcatgaaggcctctcactgtactctagtcctgacttggggtgcagagggctgcttgcaatcctgtttgtaaggctgtgcctgctcagagctttggactgttcaacccacacaagaacaaacgctaactaatattttttttaagagattcttttccctatgaatgtgggaaatgcaggatttattctgtgaattgtttgtttctgtgtgtttgttcagcgtattcattcactcactcgtttgcaaacataatgggcagtggtcatttactgctgctcttttacagttagctctaaattacttgtttgaactatttatttctgaaaggaatgttactcaagctgccactccctgctgaagagcaggagggaactctcactgggggcggaaggaagtggagctggagcagtaactgccaacatgaagctggagggtttgggattttttttgtttttgtttttttgaggctcaaaaaatgctgggagaaatgaaaatgctgtgggatagggctcctgttgcctttcagaggaagtctgacactacagcgttggcacagtgccgtgaacagtggaactgtgcccaagggactctgattatccaagcatcttccgaagagtgttgtggtcaccttaaagagacttccccttctggaaatgtggtgacttggcttagtcttcaaactggattcatggatttgaagtaactgtaaaccctaaatcttcattttcatcccagatctggttgagtataaacctcagaattgtaggggctggcctgagctgtttatttcaaaagatactattcaatttaaagctatttttcctcagagtttttgttttctatatattaagtctatttgtggaagaaaatttagtacttggctctgaggttgccagttatacaataatctattttgcatatgaaagtttgtatttaacttttttgttcattaaaaaccttactgatatggttataacttcagacagtttagagttggtcagaacatattttgcaagatctagtgcctagtgttgcttttctgatgtaataaaaggtggtctggcagaacctaaaaaagtatatgctgaaatgatttctaaccctctccctacttaaacctcccagacttgttctggttcataaaagcaagaggtaaaactggaaaaattgtgcacgtgttacctatggtttgaattaaagtagtagcagttagaatagaaaaggattatcagaatatgagagatgttaatttagaattaataaggcttgatcctctattggatatagagaagagattgcagtggtatggcagaattgaagatgatgcctagatttgaaggggaaaatataaggaattcagttttgaatgttttgaatttaataggttttatggaacctccaagtaaaaatttctagaagtcagttgcatatgcatagctgcagctttaggagagagatatgaactggaattaagaaattttgagttattcagcagatacatatttaacatttcttatgtgccaagcatgtaccaggcaccaaggatactgtaaaacacatgaaacctgctttatgactaataaaggagacagaaatcaatcatgaagatacataattacaaactgagacaagtgtcataaggaaaaattagaggttgatgtgagaaaattttaacaggaggaccacatctcattgagactgggggatcagggaatgttatcattggagctaaaatttgaagaacaagtaggagtagggcaagtagaatatcttgggcagaaagaacgttagcattataccaataaaagtagtcagatattaacaaactaagttaaagaaaaataaagcaaaaggcagcagctaactgtattctgtgaagagacatgtttaaaacaaagataggagaaggttgaaaggaaaagctctatcatgcaaacacaaccaaaagagctggtacggctacaaaaattagacttttaagcaaaaaccatattattagagatagaggaaacttaataatggtaaatatacctaataacatagtcttgaaatatataaatcatatggagaatttaacaactgtatagtcttagtgggcagtcttaacatgtctctctgatagaccagtagacaaaactcagtaaagctatagaagatgtaggtacattagcagatgtaactaatggacatacgtagaccactgcaaccaccaataacaaaatgtatattctttttcagtatccctggaatgtttacaaaaattgactattttggacaataaagtgtaaatacattttaaaaggatgaagtgatacaaagtgctgggattacaggcgtgagccaccgcgcccagccccattttattttttactttaaatgcctgccaaggagcagcctcaagcccagagaagactgaggctacggggaacttcccttgctgcaggctgttgtaacactttaagggccccaggtctccactgccaagcaggacttggcacatgagcacccaccccacagcaccatcaggcagcacccatgggctccaccagcccagctctgtccctcccctaggtaaagatcacactgaagtcttcaagtccccagcaaccaagttgggggtggtttccttcctcttcaggcagccaggcccatggctggaaggccgggctggaggcccagggaatcggttactgatgtggccaccctattcccacatggggagcaccaggagccctggagccccttccacccaatcccatctcgcaggagagcagggtctgggctcctgcctcaccgctggttcagcagcaccctccccgccgggtcccaccttgccttttgaagaagagcccgcataatgagtggacggcagacagctatatttagtggtgcctcgacactcacgaaccgccagcgtggcgcctggatcttgcccagctgccagctccccccaccaggactgtggttcctcagtttctcctgccagccccggctcatctcagggcaaagctatagacatggtagatctcatcggggaggttctcctgcctctcctcggccaggaggctgaggcctgcactgcagatgatcctgcggaccacgtcaaggtcccggcacacgctgctgtccacgtcgtccagaatcacgccctcctgggccatgttgtctttgatgacgatgatgccgttggggcggaggctgcccttgcagcgccgcaggaactcggccaggtgctgatcggtgaggtggcctggggagggcagaggcaaggttaccagggcaccatgcaagcggatgtcggcactggatgggatgtacttctcagccccgctgagcccctcatttgtgcccagcattttgtgtgcacacatggcctcattggctctcagtcccgagagatttactaaaccccaattcatagaataggaaactgtggctcagaggtcatctacctaaagacacattaagccagaatttgacttgacgggatggcttacaagtcctgcctgatacctacacaccatgatgccccacccctgccaggcttggatcggaggagtgaacctgggccaagagtttggcattgcaggagctcccagagagactgccttccctacactagaagtccccacaaaggcttctgagaccacaaaatacaaggccagacctagagtgtccacagcaggcctgtgctgcccgcctcaggaggtggccgactgctgctagcggcctgccgccacgtcagcagcccagggcacagcgctcgaggtgtgctgttaggctaagagggtgcagggctagacacgaagcttaaactattcatcttattaaaaataaaacccttataaaactc

SEQ ID NO: 39561 - DNA, 5922 bp, Homo sapiens
ggtggcgggcgggggcctctggtagccctggggacgctgtatctgtgggctcttgaatcgcgtcacaaatcagcgaccgaactctggcggtggtggttaagacggcgaaggcggcagcggcggcgacagctctggggtttgcgtctcggggtgtgtcggccgccgctgctgcttgggcctggtatgtacagatggctggttaggattctcggcaccattttccgtttctgcgaccggtcggtgccccctgcccgggccctcctgaagaggcggcgctcagacagcactctgttttctacagtggacactgatgaaataccagccaaaagaccaagattagattgctttattcaccaagtgaaaaacagtctctacaatgctgccagcttatttggattcccattccagctgaccacaaagcccatggtaacttctgcttgtaatggaacacggaatgtggccccttcaggagaggtattttcgaactcttcatcttgtgaactgacaggttctggatcctggaacaacatgctgaaactgggtaataaatctcctaatggaataagtgactatccaaagatcagagtgacagttacccgagatcagccacgcagagtcctgccttcctttggttttactttgaactcagaaggctgtaatagaagaccaggtggccgtcgccatagcaaaggtaatccagagagttctttaatgtggaaacctcaggaacaggctgtaacagagatgatttctgaagagagtggcaagggtctgaggcgtccccattgtactgtggaggagggtgttcaaaaagaggaaagagagaagtaccgaaagttattggaacgacttaaagaaagtggtcatggaaactctgtctgtcctgtaacttcaaattatcacagttctcaaagaagtcagatggacacattaaagaccaaaggctggggggaagagcaaaatcacggagtcaaaacaactcagtttgttccaaaacaatatagacttgttgaaacaaggggacctctatgttcattgagaagtgaaaagaggtgttcaaaggggaaaattactgatacagagaagatggtcggaatcagatttgaaaatgaaagtaggaggggataccaactggagcctgacctatcagaagaagtgtcggcccgactccgcctgggcagtggaagcaatggcttactcaggaggaaagtgtcaataattgagacaaaggaaaagaattgctcaggcaaagagagggacagaagaacggacgatctccttgaacttacagaggacatggaaaaggaaatcagtaatgccctaggccatggcccacaggatgaaatcctaagtagtgctttcaaattgcgaattactcgaggagatattcagacattaaagaactatcactggctcaatgatgaagtcattaatttttacatgaatcttctggtggaaagaaataaaaagcaaggctatccagcacttcatgtattcagtactttcttctatcctaaattaaagtctgggggttaccaagcagtgaaacgatggaccaaaggggtaaatctctttgaacaagaaattattctggtgcctattcatcggaaggtacattggagcctggtggtgattgacctaagaaaaaagtgtcttaaatatctggattctatgggacaaaagggccacaggatctgtgagattctccttcagtatttacaggatgaaagtaagaccaaaagaaatagtgatctgaatcttttagagtggacccatcacagcatgaaaccacacgagattcctcaacagctgaatgggagtgattgtggaatgtttacttgtaaatatgcagattatatttctagggacaaacctatcacatttactcagcaccagatgcctctcttccggaagaagatggtgtgggaaatccttcatcagcagttgctgtgagaaaactttgcctggtccctctagctgctggtggttctttcacagacatttccatatacctcatgcattgtgggttaaaaagtccctgcatcacttctgttctcacaggtactgagctgtcaaaagtgcatgaaggcctctcactgtactctagtcctgacttggggtgcagagggctgcttgcaatcctgtttgtaaggctgtgcctgctcagagctttggactgttcaacccacacaagaacaaacgctaactaatattttttttaagagattcttttccctatgaatgtgggaaatgcaggatttattctgtgaattgtttgtttctgtgtgtttgttcagcgtattcattcactcactcgtttgcaaacataatgggcagtggtcatttactgctgctcttttacagttagctctaaattacttgtttgaactatttatttctgaaaggaatgttactcaagctgccactccctgctgaagagcaggagggaactctcactgggggcggaaggaagtggagctggagcagtaactgccaacatgaagctggagggtttgggattttttttgtttttgtttttttgaggctcaaaaaatgctgggagaaatgaaaatgctgtgggatagggctcctgttgcctttcagaggaagtctgacactacagcgttggcacagtgccgtgaacagtggaactgtgcccaagggactctgattatccaagcatcttccgaagagtgttgtggtcaccttaaagagacttccccttctggaaatgtggtgacttggcttagtcttcaaactggattcatggatttgaagtaactgtaaaccctaaatcttcattttcatcccagatctggttgagtataaacctcagaattgtaggggctggcctgagctgtttatttcaaattaagttttctactcattaagactaacatctccccactccatccccactgaaatttgtggaagaaaatttagtacttggctctgaggttgccagttatacaataatctattttgcatatgaaagtttgtatttaacttttttgttcattaaaaaccttactgatatggttataacttcagacagtttagagttggtcagaacatattttgcaagatctagtgcctagtgttgcttttctgatgtaataaaaggtggtctggcagaacctaaaaaagtatatgctgaaatgatttctaaccctctccctacttaaacctcccagacttgttctggttcataaaagcaagaggtaaaactggaaaaattgtgcacgtgttacctatggtttgaattaaagtagtagcagttagaatagaaaaggattatcagaatatgagagatgttaatttagaattaataaggcttgatcctctattggatatagagaagagattgcagtggtatggcagaattgaagatgatgcctagatttgaaggggaaaatataaggaattcagttttgaatgttttgaatttaataggttttatggaacctccaagtaaaaatttctagaagtcagttgcatatgcatagctgcagctttaggagagagatatgaactggaattaagaaattttgagttattcagcagatacatatttaacatttcttatgtgccaagcatgtaccaggcaccaaggatactgtaaaacacatgaaacctgctttatgactaataaaggagacagaaatcaatcatgaagatacataattacaaactgagacaagtgtcataaggaaaaattagaggttgatgtgagaaaattttaacaggaggaccacatctcattgagactgggggatcagggaatgttatcattggagctaaaatttgaagaacaagtaggagtagggcaagtagaatatcttgggcagaaagaacgttagcattataccaataaaagtagtcagatattaacaaactaagttaaagaaaaataaagcaaaaggcagcagctaactgtattctgtgaagagacatgtttaaaacaaagataggagaaggttgaaaggaaaagctctatcatgcaaacacaaccaaaagagctggtacggctacaaaaattagacttttaagcaaaaaccatattattagagatagaggaaacttaataatggtaaatatacctaataacatagtcttgaaatatataaatcatatggagaatttaacaactgtatagtcttagtgggcagtcttaacatgtctctctgatagaccagtagacaaaactcagtaaagctatagaagatgtaggtacattagcagatgtaactaatggacatacgtagaccactgcaaccaccaataacaaaatgtatattctttttcagtatccctggaatgtttacaaaaattgactattttggacaataaagtgtaaatacattttaaaaggatgaagtgatacaaagtgctgggattacaggcgtgagccaccgcgcccagccccattttattttttactttaaatgcctgccaaggagcagcctcaagcccagagaagactgaggctacggggaacttcccttgctgcaggctgttgtaacactttaagggccccaggtctccactgccaagcaggacttggcacatgagcacccaccccacagcaccatcaggcagcacccatgggctccaccagcccagctctgtccctcccctaggtaaagatcacactgaagtcttcaagtccccagcaaccaagttgggggtggtttccttcctcttcaggcagccaggcccatggctggaaggccgggctggaggcccagggaatcggttactgatgtggccaccctattcccacatggggagcaccaggagccctggagccccttccacccaatcccatctcgcaggagagcagggtctgggctcctgcctcaccgctggttcagcagcaccctccccgccgggtcccaccttgccttttgaagaagagcccgcataatgagtggacggcagacagctatatttagtggtgcctcgacactcacgaaccgccagcgtggcgcctggatcttgcccagctgccagctccccccaccaggactgtggttcctcagtttctcctgccagccccggctcatctcagggcaaagctatagacatggtagatctcatcggggaggttctcctgcctctcctcggccaggaggctgaggcctgcactgcagatgatcctgcggaccacgtcaaggtcccggcacacgctgctgtccacgtcgtccagaatcacgccctcctgggccatgttgtctttgatgacgatgatgccgttggggcggaggctgcccttgcagcgccgcaggaactcggccaggtgctgatcggtgaggtggcctggggagggcagaggcaaggttaccagggcaccatgcaagcggatgtcggcactggatgggatgtacttctcagccccgctgagcccctcatttgtgcccagcattttgtgtgcacacatggcctcattggctctcagtcccgagagatttactaaaccccaattcatagaataggaaactgtggctcagaggtcatctacctaaagacacattaagccagaatttgacttgacgggatggcttacaagtcctgcctgatacctacacaccatgatgccccacccctgccaggcttggatcggaggagtgaacctgggccaagagtttggcattgcaggagctcccagagagactgccttccctacactagaagtccccacaaaggcttctgagaccacaaaatacaaggccagacctagagtgtccacagcaggcctgtgctgcccgcctcaggaggtggccgactgctgctagcggcctgccgccacgtcagcagcccagggcacagcgctcgaggtgtgctgttaggctaagagggtgcagggctagacacgaagcttaaactattcatcttattaaaaataaaacccttataaaactc

SEQ ID NO: 39562 - DNA, 5932 bp, Homo sapiens
ggtggcgggcgggggcctctggtagccctggggacgctgtatctgtgggctcttgaatcgcgtcacaaatcagcgaccgaactctggcggtggtggttaagacggcgaaggcggcagcggcggcgacagctctggggtttgcgtctcggggtgtgtcggccgccgctgctgcttgggcctggtatgtacagatggctggttaggattctcggcaccattttccgtttctgcgaccggtcggtgccccctgcccgggccctcctgaagaggcggcgctcagacagcactctgttttctacagtggacactgatgaaataccagccaaaagaccaagattagattgctttattcaccaagtgaaaaacagtctctacaatgctgccagcttatttggattcccattccagctgaccacaaagcccatggtaacttctgcttgtaatggaacacggaatgtggccccttcaggagaggtattttcgaactcttcatcttgtgaactgacaggttctggatcctggaacaacatgctgaaactgggtaataaatctcctaatggaataagtgactatccaaagatcagagtgacagttacccgagatcagccacgcagagtcctgccttcctttggttttactttgaactcagaaggctgtaatagaagaccaggtggccgtcgccatagcaaaggtaatccagagagttctttaatgtggaaacctcaggaacaggctgtaacagagatgatttctgaagagagtggcaagggtctgaggcgtccccattgtactgtggaggagggtgttcaaaaagaggaaagagagaagtaccgaaagttattggaacgacttaaagaaagtggtcatggaaactctgtctgtcctgtaacttcaaattatcacagttctcaaagaagtcagatggacacattaaagaccaaaggctggggggaagagcaaaatcacggagtcaaaacaactcagtttgttccaaaacaatatagacttgttgaaacaaggggacctctatgttcattgagaagtgaaaagaggtgttcaaaggggaaaattactgatacagagaagatggtcggaatcagatttgaaaatgaaagtaggaggggataccaactggagcctgacctatcagaagaagtgtcggcccgactccgcctgggcagtggaagcaatggcttactcaggaggaaagtgtcaataattgagacaaaggaaaagaattgctcaggcaaagagagggacagaagaacggacgatctccttgaacttacagaggacatggaaaaggaaatcagtaatgccctaggccatggcccacaggatgaaatcctaagtagtgctttcaaattgcgaattactcgaggagatattcagacattaaagaactatcactggctcaatgatgaagtcattaatttttacatgaatcttctggtggaaagaaataaaaagcaaggctatccagcacttcatgtattcagtactttcttctatcctaaattaaagtctgggggttaccaagcagtgaaacgatggaccaaaggggtaaatctctttgaacaagaaattattctggtgcctattcatcggaaggtacattggagcctggtggtgattgacctaagaaaaaagtgtcttaaatatctggattctatgggacaaaagggccacaggatctgtgagattctccttcagtatttacaggatgaaagtaagaccaaaagaaatagtgatctgaatcttttagagtggacccatcacagcatgaaaccacacgagattcctcaacagctgaatgggagtgattgtggaatgtttacttgtaaatatgcagattatatttctagggacaaacctatcacatttactcagcaccagatgcctctcttccggaagaagatggtgtgggaaatccttcatcagcagttgctgtgagaaaactttgcctggtccctctagctgctggtggttctttcacagacatttccatatacctcatgcattgtgggttaaaaagtccctgcatcacttctgttctcacaggtactgagctgtcaaaagtgcatgaaggcctctcactgtactctagtcctgacttggggtgcagagggctgcttgcaatcctgtttgtaaggctgtgcctgctcagagctttggactgttcaacccacacaagaacaaacgctaactaatattttttttaagagattcttttccctatgaatgtgggaaatgcaggatttattctgtgaattgtttgtttctgtgtgtttgttcagcgtattcattcactcactcgtttgcaaacataatgggcagtggtcatttactgctgctcttttacagttagctctaaattacttgtttgaactatttatttctgaaaggaatgttactcaagctgccactccctgctgaagagcaggagggaactctcactgggggcggaaggaagtggagctggagcagtaactgccaacatgaagctggagggtttgggattttttttgtttttgtttttttgaggctcaaaaaatgctgggagatacagcgttggcacagtgccgtgaacagtggaactgtgcccaagggactctgattatccaagcatcttccgaagagtgttgtggtcaccttaaagagacttccccttctggaaatgtggtgacttggcttagtcttcaaactggattcatggatttgaagtaactgtaaaccctaaatcttcattttcatcccagatctggttgagtataaacctcagaattgtaggggctggcctgagctgtttatttcaaaagatactattcaatttaaagctatttttcctcagagtttttgttttctatatattaagtctaaattaagttttctactcattaagactaacatctccccactccatccccactgaaatttgtggaagaaaatttagtacttggctctgaggttgccagttatacaataatctattttgcatatgaaagtttgtatttaacttttttgttcattaaaaaccttactgatatggttataacttcagacagtttagagttggtcagaacatattttgcaagatctagtgcctagtgttgcttttctgatgtaataaaaggtggtctggcagaacctaaaaaagtatatgctgaaatgatttctaaccctctccctacttaaacctcccagacttgttctggttcataaaagcaagaggtaaaactggaaaaattgtgcacgtgttacctatggtttgaattaaagtagtagcagttagaatagaaaaggattatcagaatatgagagatgttaatttagaattaataaggcttgatcctctattggatatagagaagagattgcagtggtatggcagaattgaagatgatgcctagatttgaaggggaaaatataaggaattcagttttgaatgttttgaatttaataggttttatggaacctccaagtaaaaatttctagaagtcagttgcatatgcatagctgcagctttaggagagagatatgaactggaattaagaaattttgagttattcagcagatacatatttaacatttcttatgtgccaagcatgtaccaggcaccaaggatactgtaaaacacatgaaacctgctttatgactaataaaggagacagaaatcaatcatgaagatacataattacaaactgagacaagtgtcataaggaaaaattagaggttgatgtgagaaaattttaacaggaggaccacatctcattgagactgggggatcagggaatgttatcattggagctaaaatttgaagaacaagtaggagtagggcaagtagaatatcttgggcagaaagaacgttagcattataccaataaaagtagtcagatattaacaaactaagttaaagaaaaataaagcaaaaggcagcagctaactgtattctgtgaagagacatgtttaaaacaaagataggagaaggttgaaaggaaaagctctatcatgcaaacacaaccaaaagagctggtacggctacaaaaattagacttttaagcaaaaaccatattattagagatagaggaaacttaataatggtaaatatacctaataacatagtcttgaaatatataaatcatatggagaatttaacaactgtatagtcttagtgggcagtcttaacatgtctctctgatagaccagtagacaaaactcagtaaagctatagaagatgtaggtacattagcagatgtaactaatggacatacgtagaccactgcaaccaccaataacaaaatgtatattctttttcagtatccctggaatgtttacaaaaattgactattttggacaataaagtgtaaatacattttaaaaggatgaagtgatacaaagtgctgggattacaggcgtgagccaccgcgcccagccccattttattttttactttaaatgcctgccaaggagcagcctcaagcccagagaagactgaggctacggggaacttcccttgctgcaggctgttgtaacactttaagggccccaggtctccactgccaagcaggacttggcacatgagcacccaccccacagcaccatcaggcagcacccatgggctccaccagcccagctctgtccctcccctaggtaaagatcacactgaagtcttcaagtccccagcaaccaagttgggggtggtttccttcctcttcaggcagccaggcccatggctggaaggccgggctggaggcccagggaatcggttactgatgtggccaccctattcccacatggggagcaccaggagccctggagccccttccacccaatcccatctcgcaggagagcagggtctgggctcctgcctcaccgctggttcagcagcaccctccccgccgggtcccaccttgccttttgaagaagagcccgcataatgagtggacggcagacagctatatttagtggtgcctcgacactcacgaaccgccagcgtggcgcctggatcttgcccagctgccagctccccccaccaggactgtggttcctcagtttctcctgccagccccggctcatctcagggcaaagctatagacatggtagatctcatcggggaggttctcctgcctctcctcggccaggaggctgaggcctgcactgcagatgatcctgcggaccacgtcaaggtcccggcacacgctgctgtccacgtcgtccagaatcacgccctcctgggccatgttgtctttgatgacgatgatgccgttggggcggaggctgcccttgcagcgccgcaggaactcggccaggtgctgatcggtgaggtggcctggggagggcagaggcaaggttaccagggcaccatgcaagcggatgtcggcactggatgggatgtacttctcagccccgctgagcccctcatttgtgcccagcattttgtgtgcacacatggcctcattggctctcagtcccgagagatttactaaaccccaattcatagaataggaaactgtggctcagaggtcatctacctaaagacacattaagccagaatttgacttgacgggatggcttacaagtcctgcctgatacctacacaccatgatgccccacccctgccaggcttggatcggaggagtgaacctgggccaagagtttggcattgcaggagctcccagagagactgccttccctacactagaagtccccacaaaggcttctgagaccacaaaatacaaggccagacctagagtgtccacagcaggcctgtgctgcccgcctcaggaggtggccgactgctgctagcggcctgccgccacgtcagcagcccagggcacagcgctcgaggtgtgctgttaggctaagagggtgcagggctagacacgaagcttaaactattcatcttattaaaaataaaacccttataaaactc

SEQ ID NO: 39563 - DNA, 2565 bp, Homo sapiens
ggtggcgggcgggggcctctggtagccctggggacgctgtatctgtgggctcttgaatcgcgtcacaaatcagcgaccgaactctggcggtggtggttaagacggcgaaggcggcagcggcggcgacagctctggggtttgcgtctcggggtgtgtcggccgccgctgctgcttgggcctggtatgtacagatggctggttaggattctcggcaccattttccgtttctgcgaccggtcggtgccccctgcccgggccctcctgaagaggcggcgctcagacagcactctgttttctacagtggacactgatgaaataccagccaaaagaccaagattagattgctttattcaccaagtgaaaaacagtctctacaatgctgccagcttatttggattcccattccagctgaccacaaagcccatggtaacttctgcttgtaatggaacacggaatgtggccccttcaggagaggtattttcgaactcttcatcttgtgaactgacaggttctggatcctggaacaacatgctgaaactgggtaataaatctcctaatggaataagtgactatccaaagatcagagtgacagttacccgagatcagccacgcagagtcctgccttcctttggttttactttgaactcagaaggctgtaatagaagaccaggtggccgtcgccatagcaaaggtaatccagagagttctttaatgtggaaacctcaggaacaggctgtaacagagatgatttctgaagagagtggcaagggtctgaggcgtccccattgtactgtggaggagggtgttcaaaaagaggaaagagagaagtaccgaaagttattggaacgacttaaagaaagtggtcatggaaactctgtctgtcctgtaacttcaaattatcacagttctcaaagaagtcagatggacacattaaagaccaaaggctggggggaagagcaaaatcacggagtcaaaacaactcagtttgttccaaaacaatatagacttgttgaaacaaggggacctctatgttcattgagaagtgaaaagaggtgttcaaaggggaaaattactgatacagagaagatggtcggaatcagatttgaaaatgaaagtaggaggggataccaactggagcctgacctatcagaagaagtgtcggcccgactccgcctgggcagtggaagcaatggcttactcaggaggaaagtgtcaataattgagacaaaggaaaagaattgctcaggcaaagagagggacagaagaacggacgatctccttgaacttacagaggacatggaaaaggaaatcagtaatgccctaggccatggcccacaggatgaaatcctaagtagtgctttcaaattgcgaattactcgaggagatattcagacattaaagaactatcactggctcaatgatgaagtcattaatttttacatgaatcttctggtggaaagaaataaaaagcaaggctatccagcacttcatgtattcagtactttcttctatcctaaattaaagtctgggggttaccaagcagtgaaacgatggaccaaaggggtaaatctctttgaacaagaaattattctggtgcctattcatcggaaggtacattggagcctggtggtgattgacctaagaaaaaagtgtcttaaatatctggattctatgggacaaaagggccacaggatctgtgagattctccttcagtatttacaggatgaaagtaagaccaaaagaaatagtgatctgaatcttttagagtggacccatcacagcatgaaaccacacgagattcctcaacagctgaatgggagtgattgtggaatgtttacttgtaaatatgcagattatatttctagggacaaacctatcacatttactcagcaccagatgcctctcttccggaagaagatggtgtgggaaatccttcatcagcagttgctgtgagaaaactttgcctggtccctctagctgctggtggttctttcacagacatttccatatacctcatgcattgtgggttaaaaagtccctgcatcacttctgttctcacaggtactgagctgtcaaaagtgcatgaaggcctctcactgtactctagtcctgacttggggtgcagagggctgcttgcaatcctgtttgtaaggctgtgcctgctcagagctttggactgttcaacccacacaagaacaaacgctaactaatattttttttaagagattcttttccctatgaatgtgggaaatgcaggatttattctgtgaattgtttgtttctgtgtgtttgttcagcgtattcattcactcactcgtttgcaaacataatgggcagtggtcatttactgctgctcttttacagttagctctaaattacttgtttgaactatttatttctgaaaggaatgttactcaagctgccactccctgctgaagagcaggagggaactctcactgggggcggaaggaagtggagctggagcagtaactgccaacatgaagctggagggtttgggatttccgtgggtttgaggtcaaaaaatgtgggagaatgaaatgtgtg

SEQ ID NO: 39564 - DNA, 4797 bp, Homo sapiens
gggaaaattactgatacagagacgatggtcggaatcagatttgaaaatgaaagtaggaggggataccaactggagcctgacctatcagaagaagtgtcggcccgactccgcctgggcagtggaagcaatggcttactcaggaggaaagtgtcaataattgagacaaaggaaaagaattgctcaggcaaagagagggacagaagaacggacgatctccttgaacttacagaggtgattgcattaatttttacatgaatcttctggtggaaagaaataaaaagcaaggctatccagcacttcatgtattcagtactttcttctatcctaaattaaagtctgggggttaccaagcagtgaaacgatggaccaaaggggtaaatctctttgaacaagaaattattctggtgcctattcatcggaaggtacattggagcctggtggtgattgacctaagaaaaaagtgtcttaaatatctggattctatgggacaaaagggccacaggatctgtgagattctccttcagtatttacaggatgaaagtaagaccaaaagaaatagtgatctgaatcttttagagtggacccatcacagcatgaaaccacacgagattcctcaacagctgaatgggagtgattgtggaatgtttacttgtaaatatgcagattatatttctagggacaaacctatcacatttactcagcaccagatgcctctcttccggaagaagatggtgtgggaaatccttcatcagcagttgctgtgagaaaactttgcctggtccctctagctgctggtggttctttcacagacatttccatatacctcatgcattgtgggttaaaaagtccctgcatcacttctgttctcacaggtactgagctgtcaaaagtgcatgaaggcctctcactgtactctagtcctgacttggggtgcagagggctgcttgcaatcctgtttgtaaggctgtgcctgctcagagctttggactgttcaacccacacaagaacaaacgctaactaatattttttttaagagattcttttccctatgaatgtgggaaatgcaggatttattctgtgaattgtttgtttctgtgtgtttgttcagcgtattcattcactcactcgtttgcaaacataatgggcagtggtcatttactgctgctcttttacagttagctctaaattacttgtttgaactatttatttctgaaaggaatgttactcaagctgccactccctgctgaagagcaggagggaactctcactgggggcggaaggaagtggagctggagcagtaactgccaacatgaagctggagggtttgggattttttttgtttttgtttttttgaggctcaaaaaatgctgggagaaatgaaaatgctgtgggatagggctcctgttgcctttcagaggaagtctgacactacagcgttggcacagtgccgtgaacagtggaactgtgcccaagggactctgattatccaagcatcttccgaagagtgttgtggtcaccttaaagagacttccccttctggaaatgtggtgacttggcttagtcttcaaactggattcatggatttgaagtaactgtaaaccctaaatcttcattttcatcccagatctggttgagtataaacctcagaattgtaggggctggcctgagctgtttatttcaaaagatactattcaatttaaagctatttttcctcagagtttttgttttctatatattaagtctaaattaagttttctactcattaagactaacatctccccactccatccccactgaaatttgtggaagaaaatttagtacttggctctgaggttgccagttatacaataatctattttgcatatgaaagtttgtatttaacttttttgttcattaaaaaccttactgatatggttataacttcagacagtttagagttggtcagaacatattttgcaagatctagtgcctagtgttgcttttctgatgtaataaaaggtggtctggcagaacctaaaaaagtatatgctgaaatgatttctaaccctctccctacttaaacctcccagacttgttctggttcataaaagcaagaggtaaaactggaaaaattgtgcacgtgttacctatggtttgaattaaagtagtagcagttagaatagaaaaggattatcagaatatgagagatgttaatttagaattaataaggcttgatcctctattggatatagagaagagattgcagtggtatggcagaattgaagatgatgcctagatttgaaggggaaaatataaggaattcagttttgaatgttttgaatttaataggttttatggaacctccaagtaaaaatttctagaagtcagttgcatatgcatagctgcagctttaggagagagatatgaactggaattaagaaattttgagttattcagcagatacatatttaacatttcttatgtgccaagcatgtaccaggcaccaaggatactgtaaaacacatgaaacctgctttatgactaataaaggagacagaaatcaatcatgaagatacataattacaaactgagacaagtgtcataaggaaaaattagaggttgatgtgagaaaattttaacaggaggaccacatctcattgagactgggggatcagggaatgttatcattggagctaaaatttgaagaacaagtaggagtagggcaagtagaatatcttgggcagaaagaacgttagcattataccaataaaagtagtcagatattaacaaactaagttaaagaaaaataaagcaaaaggcagcagctaactgtattctgtgaagagacatgtttaaaacaaagataggagaaggttgaaaggaaaagctctatcatgcaaacacaaccaaaagagctggtacggctacaaaaattagacttttaagcaaaaaccatattattagagatagaggaaacttaataatggtaaatatacctaataacatagtcttgaaatatataaatcatatggagaatttaacaactgtatagtcttagtgggcagtcttaacatgtctctctgatagaccagtagacaaaactcagtaaagctatagaagatgtaggtacattagcagatgtaactaatggacatacgtagaccactgcaaccaccaataacaaaatgtatattctttttcagtatccctggaatgtttacaaaaattgactattttggacaataaagtgtaaatacattttaaaaggatgaagtgatacaaagtgctgggattacaggcgtgagccaccgcgcccagccccattttattttttactttaaatgcctgccaaggagcagcctcaagcccagagaagactgaggctacggggaacttcccttgctgcaggctgttgtaacactttaagggccccaggtctccactgccaagcaggacttggcacatgagcacccaccccacagcaccatcaggcagcacccatgggctccaccagcccagctctgtccctcccctaggtaaagatcacactgaagtcttcaagtccccagcaaccaagttgggggtggtttccttcctcttcaggcagccaggcccatggctggaaggccgggctggaggcccagggaatcggttactgatgtggccaccctattcccacatggggagcaccaggagccctggagccccttccacccaatcccatctcgcaggagagcagggtctgggctcctgcctcaccgctggttcagcagcaccctccccgccgggtcccaccttgccttttgaagaagagcccgcataatgagtggacggcagacagctatatttagtggtgcctcgacactcacgaaccgccagcgtggcgcctggatcttgcccagctgccagctccccccaccaggactgtggttcctcagtttctcctgccagccccggctcatctcagggcaaagctatagacatggtagatctcatcggggaggttctcctgcctctcctcggccaggaggctgaggcctgcactgcagatgatcctgcggaccacgtcaaggtcccggcacacgctgctgtccacgtcgtccagaatcacgccctcctgggccatgttgtctttgatgacgatgatgccgttggggcggaggctgcccttgcagcgccgcaggaactcggccaggtgctgatcggtgaggtggcctggggagggcagaggcaaggttaccagggcaccatgcaagcggatgtcggcactggatgggatgtacttctcagccccgctgagcccctcatttgtgcccagcattttgtgtgcacacatggcctcattggctctcagtcccgagagatttactaaaccccaattcatagaataggaaactgtggctcagaggtcatctacctaaagacacattaagccagaatttgacttgacgggatggcttacaagtcctgcctgatacctacacaccatgatgccccacccctgccaggcttggatcggaggagtgaacctgggccaagagtttggcattgcaggagctcccagagagactgccttccctacactagaagtccccacaaaggcttctgagaccacaaaatacaaggccagacctagagtgtccacagcaggcctgtgctgcccgcctcaggaggtggccgactgctgctagcggcctgccgccacgtcagcagcccagggcacagcgctcgaggtgtgctgttaggctaagagggtgcagggctagacacgaagcttaaactattcatcttattaaaaataaaacccttataaaactc

SEQ ID NO: 39565 - DNA, 4588 bp, Homo sapiens
gggaaaattactgatacagagacgatggtcggaatcagatttgaaaatgaaagtaggaggggataccaactggagcctgacctatcagaagaagtgtcggcccgactccgcctgggcagtggaagcaatggcttactcaggaggaaagtgtcaataattgagacaaaggaaaagaattgctcaggcaaagagagggacagaagaacggacgatctccttgaacttacagaggtgattgacctaagaaaaaagtgtcttaaatatctggattctatgggacaaaagggccacaggatctgtgagattctccttcagtatttacaggatgaaagtaagaccaaaagaaatagtgatctgaatcttttagagtggacccatcacagcatgaaaccacacgagattcctcaacagctgaatgggagtgattgtggaatgtttacttgtaaatatgcagattatatttctagggacaaacctatcacatttactcagcaccagatgcctctcttccggaagaagatggtgtgggaaatccttcatcagcagttgctgtgagaaaactttgcctggtccctctagctgctggtggttctttcacagacatttccatatacctcatgcattgtgggttaaaaagtccctgcatcacttctgttctcacaggtactgagctgtcaaaagtgcatgaaggcctctcactgtactctagtcctgacttggggtgcagagggctgcttgcaatcctgtttgtaaggctgtgcctgctcagagctttggactgttcaacccacacaagaacaaacgctaactaatattttttttaagagattcttttccctatgaatgtgggaaatgcaggatttattctgtgaattgtttgtttctgtgtgtttgttcagcgtattcattcactcactcgtttgcaaacataatgggcagtggtcatttactgctgctcttttacagttagctctaaattacttgtttgaactatttatttctgaaaggaatgttactcaagctgccactccctgctgaagagcaggagggaactctcactgggggcggaaggaagtggagctggagcagtaactgccaacatgaagctggagggtttgggattttttttgtttttgtttttttgaggctcaaaaaatgctgggagaaatgaaaatgctgtgggatagggctcctgttgcctttcagaggaagtctgacactacagcgttggcacagtgccgtgaacagtggaactgtgcccaagggactctgattatccaagcatcttccgaagagtgttgtggtcaccttaaagagacttccccttctggaaatgtggtgacttggcttagtcttcaaactggattcatggatttgaagtaactgtaaaccctaaatcttcattttcatcccagatctggttgagtataaacctcagaattgtaggggctggcctgagctgtttatttcaaaagatactattcaatttaaagctatttttcctcagagtttttgttttctatatattaagtctaaattaagttttctactcattaagactaacatctccccactccatccccactgaaatttgtggaagaaaatttagtacttggctctgaggttgccagttatacaataatctattttgcatatgaaagtttgtatttaacttttttgttcattaaaaaccttactgatatggttataacttcagacagtttagagttggtcagaacatattttgcaagatctagtgcctagtgttgcttttctgatgtaataaaaggtggtctggcagaacctaaaaaagtatatgctgaaatgatttctaaccctctccctacttaaacctcccagacttgttctggttcataaaagcaagaggtaaaactggaaaaattgtgcacgtgttacctatggtttgaattaaagtagtagcagttagaatagaaaaggattatcagaatatgagagatgttaatttagaattaataaggcttgatcctctattggatatagagaagagattgcagtggtatggcagaattgaagatgatgcctagatttgaaggggaaaatataaggaattcagttttgaatgttttgaatttaataggttttatggaacctccaagtaaaaatttctagaagtcagttgcatatgcatagctgcagctttaggagagagatatgaactggaattaagaaattttgagttattcagcagatacatatttaacatttcttatgtgccaagcatgtaccaggcaccaaggatactgtaaaacacatgaaacctgctttatgactaataaaggagacagaaatcaatcatgaagatacataattacaaactgagacaagtgtcataaggaaaaattagaggttgatgtgagaaaattttaacaggaggaccacatctcattgagactgggggatcagggaatgttatcattggagctaaaatttgaagaacaagtaggagtagggcaagtagaatatcttgggcagaaagaacgttagcattataccaataaaagtagtcagatattaacaaactaagttaaagaaaaataaagcaaaaggcagcagctaactgtattctgtgaagagacatgtttaaaacaaagataggagaaggttgaaaggaaaagctctatcatgcaaacacaaccaaaagagctggtacggctacaaaaattagacttttaagcaaaaaccatattattagagatagaggaaacttaataatggtaaatatacctaataacatagtcttgaaatatataaatcatatggagaatttaacaactgtatagtcttagtgggcagtcttaacatgtctctctgatagaccagtagacaaaactcagtaaagctatagaagatgtaggtacattagcagatgtaactaatggacatacgtagaccactgcaaccaccaataacaaaatgtatattctttttcagtatccctggaatgtttacaaaaattgactattttggacaataaagtgtaaatacattttaaaaggatgaagtgatacaaagtgctgggattacaggcgtgagccaccgcgcccagccccattttattttttactttaaatgcctgccaaggagcagcctcaagcccagagaagactgaggctacggggaacttcccttgctgcaggctgttgtaacactttaagggccccaggtctccactgccaagcaggacttggcacatgagcacccaccccacagcaccatcaggcagcacccatgggctccaccagcccagctctgtccctcccctaggtaaagatcacactgaagtcttcaagtccccagcaaccaagttgggggtggtttccttcctcttcaggcagccaggcccatggctggaaggccgggctggaggcccagggaatcggttactgatgtggccaccctattcccacatggggagcaccaggagccctggagccccttccacccaatcccatctcgcaggagagcagggtctgggctcctgcctcaccgctggttcagcagcaccctccccgccgggtcccaccttgccttttgaagaagagcccgcataatgagtggacggcagacagctatatttagtggtgcctcgacactcacgaaccgccagcgtggcgcctggatcttgcccagctgccagctccccccaccaggactgtggttcctcagtttctcctgccagccccggctcatctcagggcaaagctatagacatggtagatctcatcggggaggttctcctgcctctcctcggccaggaggctgaggcctgcactgcagatgatcctgcggaccacgtcaaggtcccggcacacgctgctgtccacgtcgtccagaatcacgccctcctgggccatgttgtctttgatgacgatgatgccgttggggcggaggctgcccttgcagcgccgcaggaactcggccaggtgctgatcggtgaggtggcctggggagggcagaggcaaggttaccagggcaccatgcaagcggatgtcggcactggatgggatgtacttctcagccccgctgagcccctcatttgtgcccagcattttgtgtgcacacatggcctcattggctctcagtcccgagagatttactaaaccccaattcatagaataggaaactgtggctcagaggtcatctacctaaagacacattaagccagaatttgacttgacgggatggcttacaagtcctgcctgatacctacacaccatgatgccccacccctgccaggcttggatcggaggagtgaacctgggccaagagtttggcattgcaggagctcccagagagactgccttccctacactagaagtccccacaaaggcttctgagaccacaaaatacaaggccagacctagagtgtccacagcaggcctgtgctgcccgcctcaggaggtggccgactgctgctagcggcctgccgccacgtcagcagcccagggcacagcgctcgaggtgtgctgttaggctaagagggtgcagggctagacacgaagcttaaactattcatcttattaaaaataaaacccttataaaactc

SEQ ID NO: 39566 - DNA, 4247 bp, Homo sapiens
atggttttataagtatgttccatgatgtaaaaatgtcaacacttagaaaaagcacatggacatcctgctttattacatgattacacctgaaggttgtgctgccatgcacattaatatgtaatgcgggcgttgtttatggggttctttgcagcaccagatgcctctcttccggaagaagatggtgtgggaaatccttcatcagcagttgctgtgagaaaactttgcctggtccctctagctgctggtggttctttcacagacatttccatatacctcatgcattgtgggttaaaaagtccctgcatcacttctgttctcacaggtactgagctgtcaaaagtgcatgaaggcctctcactgtactctagtcctgacttggggtgcagagggctgcttgcaatcctgtttgtaaggctgtgcctgctcagagctttggactgttcaacccacacaagaacaaacgctaactaatattttttttaagagattcttttccctatgaatgtgggaaatgcaggatttattctgtgaattgtttgtttctgtgtgtttgttcagcgtattcattcactcactcgtttgcaaacataatgggcagtggtcatttactgctgctcttttacagttagctctaaattacttgtttgaactatttatttctgaaaggaatgttactcaagctgccactccctgctgaagagcaggagggaactctcactgggggcggaaggaagtggagctggagcagtaactgccaacatgaagctggagggtttgggattttttttgtttttgtttttttgaggctcaaaaaatgctgggagaaatgaaaatgctgtgggatagggctcctgttgcctttcagaggaagtctgacactacagcgttggcacagtgccgtgaacagtggaactgtgcccaagggactctgattatccaagcatcttccgaagagtgttgtggtcaccttaaagagacttccccttctggaaatgtggtgacttggcttagtcttcaaactggattcatggatttgaagtaactgtaaaccctaaatcttcattttcatcccagatctggttgagtataaacctcagaattgtaggggctggcctgagctgtttatttcaaaagatactattcaatttaaagctatttttcctcagagtttttgttttctatatattaagtctaaattaagttttctactcattaagactaacatctccccactccatccccactgaaatttgtggaagaaaatttagtacttggctctgaggttgccagttatacaataatctattttgcatatgaaagtttgtatttaacttttttgttcattaaaaaccttactgatatggttataacttcagacagtttagagttggtcagaacatattttgcaagatctagtgcctagtgttgcttttctgatgtaataaaaggtggtctggcagaacctaaaaaagtatatgctgaaatgatttctaaccctctccctacttaaacctcccagacttgttctggttcataaaagcaagaggtaaaactggaaaaattgtgcacgtgttacctatggtttgaattaaagtagtagcagttagaatagaaaaggattatcagaatatgagagatgttaatttagaattaataaggcttgatcctctattggatatagagaagagattgcagtggtatggcagaattgaagatgatgcctagatttgaaggggaaaatataaggaattcagttttgaatgttttgaatttaataggttttatggaacctccaagtaaaaatttctagaagtcagttgcatatgcatagctgcagctttaggagagagatatgaactggaattaagaaattttgagttattcagcagatacatatttaacatttcttatgtgccaagcatgtaccaggcaccaaggatactgtaaaacacatgaaacctgctttatgactaataaaggagacagaaatcaatcatgaagatacataattacaaactgagacaagtgtcataaggaaaaattagaggttgatgtgagaaaattttaacaggaggaccacatctcattgagactgggggatcagggaatgttatcattggagctaaaatttgaagaacaagtaggagtagggcaagtagaatatcttgggcagaaagaacgttagcattataccaataaaagtagtcagatattaacaaactaagttaaagaaaaataaagcaaaaggcagcagctaactgtattctgtgaagagacatgtttaaaacaaagataggagaaggttgaaaggaaaagctctatcatgcaaacacaaccaaaagagctggtacggctacaaaaattagacttttaagcaaaaaccatattattagagatagaggaaacttaataatggtaaatatacctaataacatagtcttgaaatatataaatcatatggagaatttaacaactgtatagtcttagtgggcagtcttaacatgtctctctgatagaccagtagacaaaactcagtaaagctatagaagatgtaggtacattagcagatgtaactaatggacatacgtagaccactgcaaccaccaataacaaaatgtatattctttttcagtatccctggaatgtttacaaaaattgactattttggacaataaagtgtaaatacattttaaaaggatgaagtgatacaaagtgctgggattacaggcgtgagccaccgcgcccagccccattttattttttactttaaatgcctgccaaggagcagcctcaagcccagagaagactgaggctacggggaacttcccttgctgcaggctgttgtaacactttaagggccccaggtctccactgccaagcaggacttggcacatgagcacccaccccacagcaccatcaggcagcacccatgggctccaccagcccagctctgtccctcccctaggtaaagatcacactgaagtcttcaagtccccagcaaccaagttgggggtggtttccttcctcttcaggcagccaggcccatggctggaaggccgggctggaggcccagggaatcggttactgatgtggccaccctattcccacatggggagcaccaggagccctggagccccttccacccaatcccatctcgcaggagagcagggtctgggctcctgcctcaccgctggttcagcagcaccctccccgccgggtcccaccttgccttttgaagaagagcccgcataatgagtggacggcagacagctatatttagtggtgcctcgacactcacgaaccgccagcgtggcgcctggatcttgcccagctgccagctccccccaccaggactgtggttcctcagtttctcctgccagccccggctcatctcagggcaaagctatagacatggtagatctcatcggggaggttctcctgcctctcctcggccaggaggctgaggcctgcactgcagatgatcctgcggaccacgtcaaggtcccggcacacgctgctgtccacgtcgtccagaatcacgccctcctgggccatgttgtctttgatgacgatgatgccgttggggcggaggctgcccttgcagcgccgcaggaactcggccaggtgctgatcggtgaggtggcctggggagggcagaggcaaggttaccagggcaccatgcaagcggatgtcggcactggatgggatgtacttctcagccccgctgagcccctcatttgtgcccagcattttgtgtgcacacatggcctcattggctctcagtcccgagagatttactaaaccccaattcatagaataggaaactgtggctcagaggtcatctacctaaagacacattaagccagaatttgacttgacgggatggcttacaagtcctgcctgatacctacacaccatgatgccccacccctgccaggcttggatcggaggagtgaacctgggccaagagtttggcattgcaggagctcccagagagactgccttccctacactagaagtccccacaaaggcttctgagaccacaaaatacaaggccagacctagagtgtccacagcaggcctgtgctgcccgcctcaggaggtggccgactgctgctagcggcctgccgccacgtcagcagcccagggcacagcgctcgaggtgtgctgttaggctaagagggtgcagggctagacacgaagcttaaactattcatcttattaaaaataaaacccttataaaactc

SEQ ID NO: 39567 - DNA, 1958 bp, Homo sapiens
ggtggcgggcgggggcctctggtagccctggggacgctgtatctgtgggctcttgaatcgcgtcacaaatcagcgaccgaactctggcggtggtggttaagacggcgaaggcggcagcggcggcgacagctctggggtttgcgtctcggggtgtgtcggccgccgctgctgcttgggcctggtatgtacagatggctggttaggattctcggcaccattttccgtttctgcgaccggtcggtgccccctgcccgggccctcctgaagaggcggcgctcagacagcactctgttttctacagtggacactgatgaaataccagccaaaagaccaagattagattgctttattcaccaagtgaaaaacagtctctacaatgctgccagcttatttggattcccattccagctgaccacaaagcccatggtaacttctgcttgtaatggaacacggaatgtggccccttcaggagaggtattttcgaactcttcatcttgtgaactgacaggttctggatcctggaacaacatgctgaaactgggtaataaatctcctaatggaataagtgactatccaaagatcagagtgacagttacccgagatcagccacgcagagtcctgccttcctttggttttactttgaactcagaaggctgtaatagaagaccaggtggccgtcgccatagcaaaggtaatccagagagttctttaatgtggaaacctcaggaacaggctgtaacagagatgatttctgaagagagtggcaagggtctgaggcgtccccattgtactgtggaggagggtgttcaaaaagaggaaagagagaagtaccgaaagttattggaacgacttaaagaaagtggtcatggaaactctgtctgtcctgtaacttcaaattatcacagttctcaaagaagtcagatggacacattaaagaccaaaggctggggggaagagcaaaatcacggagtcaaaacaactcagtttgttccaaaacaatatagacttgttgaaacaaggggacctctatgttcattgagaagtgaaaagaggtgttcaaaggggaaaattactgatacagagaagatggtcggaatcagatttgaaaatgaaagtaggaggggataccaactggagcctgacctatcagaagaagtgtcggcccgactccgcctgggcagtggaagcaatggcttactcaggaggaaagtgtcaataattgagacaaaggaaaagaattgctcaggcaaagagagggacagaagaacggacgatctccttgaacttacagaggacatggaaaaggaaatcagtaatgccctaggccatggcccacaggatgaaatcctaagtagtgctttcaaattgcgaattactcgaggagatattcagacattaaagaactatcactggctcaatgatgaagtcattaatttttacatgaatcttctggtggaaagaaataaaaagcaaggctatccagcacttcatgtattcagtactttcttctatcctaaattaaagtctgggggttaccaagcagtgaaacgatggaccaaaggggtaaatctctttgaacaagaaattattctggtgcctattcatcggaaggtacattggagcctggtggtgattgacctaagaaaaaagtgtcttaaatatctggattctatgggacaaaagggccacaggatctgtgagattctccttcagtatttacaggatgaaagtaagaccaaaagaaatagtgatctgaatcttttagagtggacccatcacagcatgaaaccacacgagattcctcaacagctgaatgggagtgattgtggaatgtttacttgtaaatatgcagattatatttctagggacaaacctatcacatttactcagcaccagatgcctcttttccggaagaagatcgccagggttattccctctaatcacgaccgtccatgggt

SEQ ID NO: 39568 - DNA, 2104 bp, Homo sapiens
ggtggcgggcgggggcctctggtagccctggggacgctgtatctgtgggctcttgaatcgcgtcacaaatcagcgaccgaactctggcggtggtggttaagacggcgaaggcggcagcggcggcgacagctctggggtttgcgtctcggggtgtgtcggccgccgctgctgcttgggcctggtatgtacagatggctggttaggattctcggcaccattttccgtttctgcgaccggtcggtgccccctgcccgggccctcctgaagaggcggcgctcagacagcactctgttttctacagtggacactgatgaaataccagccaaaagaccaagattagattgctttattcaccaagtgaaaaacagtctctacaatgctgccagcttatttggattcccattccagctgaccacaaagcccatggtaacttctgcttgtaatggaacacggaatgtggccccttcaggagaggtattttcgaactcttcatcttgtgaactgacaggttctggatcctggaacaacatgctgaaactgggtaataaatctcctaatggaataagtgactatccaaagatcagagtgacagttacccgagatcagccacgcagagtcctgccttcctttggttttactttgaactcagaaggctgtaatagaagaccaggtggccgtcgccatagcaaaggtaatccagagagttctttaatgtggaaacctcaggaacaggctgtaacagagatgatttctgaagagagtggcaagggtctgaggcgtccccattgtactgtggaggagggtgttcaaaaagaggaaagagagaagtaccgaaagttattggaacgacttaaagaaagtggtcatggaaactctgtctgtcctgtaacttcaaattatcacagttctcaaagaagtcagatggacacattaaagaccaaaggctggggggaagagcaaaatcacggagtcaaaacaactcagtttgttccaaaacaatatagacttgttgaaacaaggggacctctatgttcattgagaagtgaaaagaggtgttcaaaggggaaaattactgatacagagaagatggtcggaatcagatttgaaaatgaaagtaggaggggataccaactggagcctgacctatcagaagaagtgtcggcccgactccgcctgggcagtggaagcaatggcttactcaggaggaaagtgtcaataattgagacaaaggaaaagaattgctcaggcaaagagagggacagaagaacggacgatctccttgaacttacagaggacatggaaaaggaaatcagtaatgccctaggccatggcccacaggatgaaatcctaagtagtgctttcaaattgcgaattactcgaggagatattcagacattaaagaactatcactggctcaatgatgaagtcattaatttttacatgaatcttctggtggaaagaaataaaaagcaaggctatccagcacttcatgtattcagtactttcttctatcctaaattaaagtctgggggttaccaagcagtgaaacgatggaccaaaggggtaaatctctttgaacaagaaattattctggtgcctattcatcggaaggtacattggagcctggtggtgattgacctaagaaaaaagtgtcttaaatatctggattctatgggacaaaagggccacaggatctgtgagattctccttcagtatttacaggatgaaagtaagaccaaaagaaatagtgatctgaatcttttagagtggacccatcacagcatgaaaccacacgagattcctcaacagctgaatgggagtgattgtggaatgtttacttgtaaatatgcagattatatttctagggacaaacctatcacatttactcaggtgagtgaagaccctcttcatccatttacttgttactaagcaagataaggcacttggccagtgcctggcacacattcagctctcaatagtagtagctggccaggcgtggtggctcacacctgtaatcccagcactttgggaggccgaggcgggtggaccacctgaggtcaggagttcaagaccagcctggccaacatggtgaaaccccatctct

SEQ ID NO: 39569 - DNA, 3820 bp, Homo sapiens
cggtggctggtacggccggacggtacgggataaacgctaactaatattttttttaagagattcttttccctatgaatgtgggaaatgcaggatttattctgtgaattgtttgtttctgtgtgtttgttcagcgtattcattcactcactcgtttgcaaacataatgggcagtggtcatttactgctgctcttttacagttagctctaaattacttgtttgaactatttatttctgaaaggaatgttactcaagctgccactccctgctgaagagcaggagggaactctcactgggggcggaaggaagtggagctggagcagtaactgccaacatgaagctggagggtttgggattttttttgtttttgtttttttgaggctcaaaaaatgctgggagaaatgaaaatgctgtgggatagggctcctgttgcctttcagaggaagtctgacactacagcgttggcacagtgccgtgaacagtggaactgtgcccaagggactctgattatccaagcatcttccgaagagtgttgtggtcaccttaaagagacttccccttctggaaatgtggtgacttggcttagtcttcaaactggattcatggatttgaagtaactgtaaaccctaaatcttcattttcatcccagatctggttgagtataaacctcagaattgtaggggctggcctgagctgtttatttcaaaagatactattcaatttaaagctatttttcctcagagtttttgttttctatatattaagtctaaattaagttttctactcattaagactaacatctccccactccatccccactgaaatttgtggaagaaaatttagtacttggctctgaggttgccagttatacaataatctattttgcatatgaaagtttgtatttaacttttttgttcattaaaaaccttactgatatggttataacttcagacagtttagagttggtcagaacatattttgcaagatctagtgcctagtgttgcttttctgatgtaataaaaggtggtctggcagaacctaaaaaagtatatgctgaaatgatttctaaccctctccctacttaaacctcccagacttgttctggttcataaaagcaagaggtaaaactggaaaaattgtgcacgtgttacctatggtttgaattaaagtagtagcagttagaatagaaaaggattatcagaatatgagagatgttaatttagaattaataaggcttgatcctctattggatatagagaagagattgcagtggtatggcagaattgaagatgatgcctagatttgaaggggaaaatataaggaattcagttttgaatgttttgaatttaataggttttatggaacctccaagtaaaaatttctagaagtcagttgcatatgcatagctgcagctttaggagagagatatgaactggaattaagaaattttgagttattcagcagatacatatttaacatttcttatgtgccaagcatgtaccaggcaccaaggatactgtaaaacacatgaaacctgctttatgactaataaaggagacagaaatcaatcatgaagatacataattacaaactgagacaagtgtcataaggaaaaattagaggttgatgtgagaaaattttaacaggaggaccacatctcattgagactgggggatcagggaatgttatcattggagctaaaatttgaagaacaagtaggagtagggcaagtagaatatcttgggcagaaagaacgttagcattataccaataaaagtagtcagatattaacaaactaagttaaagaaaaataaagcaaaaggcagcagctaactgtattctgtgaagagacatgtttaaaacaaagataggagaaggttgaaaggaaaagctctatcatgcaaacacaaccaaaagagctggtacggctacaaaaattagacttttaagcaaaaaccatattattagagatagaggaaacttaataatggtaaatatacctaataacatagtcttgaaatatataaatcatatggagaatttaacaactgtatagtcttagtgggcagtcttaacatgtctctctgatagaccagtagacaaaactcagtaaagctatagaagatgtaggtacattagcagatgtaactaatggacatacgtagaccactgcaaccaccaataacaaaatgtatattctttttcagtatccctggaatgtttacaaaaattgactattttggacaataaagtgtaaatacattttaaaaggatgaagtgatacaaagtgctgggattacaggcgtgagccaccgcgcccagccccattttattttttactttaaatgcctgccaaggagcagcctcaagcccagagaagactgaggctacggggaacttcccttgctgcaggctgttgtaacactttaagggccccaggtctccactgccaagcaggacttggcacatgagcacccaccccacagcaccatcaggcagcacccatgggctccaccagcccagctctgtccctcccctaggtaaagatcacactgaagtcttcaagtccccagcaaccaagttgggggtggtttccttcctcttcaggcagccaggcccatggctggaaggccgggctggaggcccagggaatcggttactgatgtggccaccctattcccacatggggagcaccaggagccctggagccccttccacccaatcccatctcgcaggagagcagggtctgggctcctgcctcaccgctggttcagcagcaccctccccgccgggtcccaccttgccttttgaagaagagcccgcataatgagtggacggcagacagctatatttagtggtgcctcgacactcacgaaccgccagcgtggcgcctggatcttgcccagctgccagctccccccaccaggactgtggttcctcagtttctcctgccagccccggctcatctcagggcaaagctatagacatggtagatctcatcggggaggttctcctgcctctcctcggccaggaggctgaggcctgcactgcagatgatcctgcggaccacgtcaaggtcccggcacacgctgctgtccacgtcgtccagaatcacgccctcctgggccatgttgtctttgatgacgatgatgccgttggggcggaggctgcccttgcagcgccgcaggaactcggccaggtgctgatcggtgaggtggcctggggagggcagaggcaaggttaccagggcaccatgcaagcggatgtcggcactggatgggatgtacttctcagccccgctgagcccctcatttgtgcccagcattttgtgtgcacacatggcctcattggctctcagtcccgagagatttactaaaccccaattcatagaataggaaactgtggctcagaggtcatctacctaaagacacattaagccagaatttgacttgacgggatggcttacaagtcctgcctgatacctacacaccatgatgccccacccctgccaggcttggatcggaggagtgaacctgggccaagagtttggcattgcaggagctcccagagagactgccttccctacactagaagtccccacaaaggcttctgagaccacaaaatacaaggccagacctagagtgtccacagcaggcctgtgctgcccgcctcaggaggtggccgactgctgctagcggcctgccgccacgtcagcagcccagggcacagcgctcgaggtgtgctgttaggctaagagggtgcagggctagacacgaagcttaaactattcatcttattaaaaataaaacccttataaaactc

SEQ ID NO: 39570 - DNA, 1713 bp, Homo sapiens
ggtggcgggcgggggcctctggtagccctggggacgctgtatctgtgggctcttgaatcgcgtcacaaatcagcgaccgaactctggcggtggtggttaagacggcgaaggcggcagcggcggcgacagctctggggtttgcgtctcggggtgtgtcggccgccgctgctgcttgggcctggtatgtacagatggctggttaggattctcggcaccattttccgtttctgcgaccggtcggtgccccctgcccgggccctcctgaagaggcggcgctcagacagcactctgttttctacagtggacactgatgaaataccagccaaaagaccaagattagattgctttattcaccaagtgaaaaacagtctctacaatgctgccagcttatttggattcccattccagctgaccacaaagcccatggtaacttctgcttgtaatggaacacggaatgtggccccttcaggagaggtattttcgaactcttcatcttgtgaactgacaggttctggatcctggaacaacatgctgaaactgggtaataaatctcctaatggaataagtgactatccaaagatcagagtgacagttacccgagatcagccacgcagagtcctgccttcctttggttttactttgaactcagaaggctgtaatagaagaccaggtggccgtcgccatagcaaaggtaatccagagagttctttaatgtggaaacctcaggaacaggctgtaacagagatgatttctgaagagagtggcaagggtctgaggcgtccccattgtactgtggaggagggtgttcaaaaagaggaaagagagaagtaccgaaagttattggaacgacttaaagaaagtggtcatggaaactctgtctgtcctgtaacttcaaattatcacagttctcaaagaagtcagatggacacattaaagaccaaaggctggggggaagagcaaaatcacggagtcaaaacaactcagtttgttccaaaacaatatagacttgttgaaacaaggggacctctatgttcattgagaagtgaaaagaggtgttcaaaggggaaaattactgatacagagaagatggtcggaatcagatttgaaaatgaaagtaggaggggataccaactggagcctgacctatcagaagaagtgtcggcccgactccgcctgggcagtggaagcaatggcttactcaggaggaaagtgtcaataattgagacaaaggaaaagaattgctcaggcaaagagagggacagaagaacggacgatctccttgaacttacagaggacatggaaaaggaaatcagtaatgccctaggccatggcccacaggatgaaatcctaagtagtgctttcaaattgcgaattactcgaggagatattcagacattaaagaactatcactggctcaatgatgaagtcattaatttttacatgaatcttctggtggaaagaaataaaaagcaaggctatccagcacttcatgtattcagtactttcttctatcctaaattaaagtctgggggttaccaagcagtgaaacgatggaccaaaggggtaaatctctttgaacaagaaattattctggtgcctattcatcggaaggtacattggagcctggtggtgattgagagggttaatggttaattgttggacttggataaaggccattttttaaaaataatgctgcctttttctgccctgtgt

SEQ ID NO: 39571 - DNA, 820 bp, Homo sapiens
tctcattagacatcagagaatccataccggacagaaatcttacaaatgtcataagtgtggcaaggtcttcagttagaggtcactccttgcaaaacatcagaaaattcattcctgagataattgttccaaatgcaatgagtatagcaaaccatcaagcattaattgacattagagtcaattcagcattgacttgagtttcagttgacttgacattgagttcaagcattaattgacattaaagtgtttacgttaagaggattgggctgggcagggtggcttatacctgtaatcccagcactgtgggaggtcaagacggatagatcacttgaggtcaggagtttgagaccagcctggccaaaagacgtgagccacttttcctagcctgttttttgtttctgatagggatttttatgggtattgtgttgaatctaaatcacattgggttatataatcatttaacaatattaatctttccaatccatcaatatgggtcatatctctatttatataagtttttaatcattttgatcaatgtttgtagatttcaaggtacaaacttctcacctttttacgtttattcctaaatatttcttactgtaagttctctagcaaatggaagtgttttcttaattttcttttaacattgtttattgttaatgtatggaaatttaactaatttttggtactgatattgtattctgcaaatacactgtgtttattagcttcagtagtattttagttgactctgtgattttctacacagcagatcatgtcatctacaaacaaatacaattttacttctttctttctgaaaaaaaaa

SEQ ID NO: 39572 - DNA, 264 bp, Homo sapiens
gtcgcacgtcagcaaggctgcagccttggattctgatgtcttgagaagagcgattcacctgtgaattctcacagccctggcctcagaaagacggcccgggaccaggcccgatggcacccctcttcccagctctcagccagggcggaaggcacaagtgatggccctggcctccgcagtcacactcctcctgaaagctgactggctgaacctcacctcttggctagcttgccacccagctcttgagaacatgtttgtccaaggcct

SEQ ID NO: 39573 - DNA, 783 bp, Homo sapiens
ctaagcctcccaaagtgctgggattacaggcttgagccaatgtgccccagccaatgatgaattccagccgtcccattttaaagatgagggagactaaggctaggagaagggaatgacggcctcagggccacaaagcttgggagtgcagagcccgagttcatctcaggcaaattcagaacaaactttctgagagaaacagtggggaaaacagtgggagtttagggaagatgggccatattgtcattggaatatccaattgtctgctatctgccaaaaaacaaacaaacaaacaaaaacccaaaactagaagagtataaaatccagtagaggaatcatgatttaaaactagggctctggtttaaagccataaaacctcagttcacactagcttaatgaaaagggaaagtcaagggggttcattagctcatgcatttattagctcatacccatgggatctcccaggcatgactgatccaggcctgggaccaggtaccatcaccagatctccacttctgcctcttggctctgccatgttagcttgattctccaatggagtggcaagaagagccaccaataccttcatacttacattctagcatgtagcaaagccagcagaatctcccgatggttccagctctcaagtacccagcattgggtgctatgtgcattcctaaccctgccatggtagccaaaagactcgaatgtattcattggccaggcctcattcacccacccagcctcggagtagggtcagttctgcacaaatcacacgcccgaacacaa

SEQ ID NO: 39574 - DNA, 202 bp, Homo sapiens
agataagaatcacacaaaggagcttttaaaagaatgttacctgggtcccatctccagagattatgtttcaatggatgtggtatgggacccagcattgttattttatttttaagagttccccagatgaggccaggcgcggtggctcacacctgtaatcccagcactttgggaggccaaggcaggtggatcacaaggtcgggag

SEQ ID NO: 39575 - DNA, 1009 bp, Homo sapiens
tgttctggtccctaacaatgctctactgtgttttccttgaatcttcatacagattctacctaagagtatctgctttatatttggagaaattgaatgtctaaaaggattaagcagaaccaaaattcagatccaggtttccatgccttgaatgtattgctttttctgttaacatggtattccccaaatagtactgaattctagaatcagctttaccagagtagtctggaggaaatttgcgaatagctctcttaaatatgcacggttctatgctcagaggagctcttctcagtattaatcagcaatccagtcatttttttcccctcatacttgtcattgtaagcacatttttctcaagctttactcagaagatcatccagagatattaactgttaacatgtgctgcaagttgaaagtgtttagagagaatatttgagtgcagtgtgacaaggataatcaagttgtttagggccagttggcgagaagactttggaaagcattgagaaaggaatgatgaatgtatgtgttcttttgtatctaaatccttcttcccttgtgtatgttcttcacagccttttctccctgaataaggatcactttgactttgtatgctaagtgtgccttcttaatggttcttttcctgttatctgaatcctgaagtatatttaaatgagaatttgatgcagttagttaattggaatataaaagactggttaacaaaagtcttcttaataatgaagcacaccagaaatggaagctgctggaaccagccatgtggacaaatgaaaaaatgccttttgtctacagattgcagcgatcctacataaatatatggaggtctctgtctggcttaggacagctggctaagtctgatcgttcccctccgtacagcctttaaaactgccactctaaatacttggtttccttgccattttattcagtatctgctggttatgagtactgtattattttttaaatgggcaaccaagtaaagttacctctgtatccgtct

SEQ ID NO: 39576 - DNA, 757 bp, Homo sapiens
cccctacatgaacaaacagatgcagaataattcccccccatcagtgcctagatacctccacacatccatacactgtgatgagacctagaatcatctagaacacctgcgggatgaagtgcagtggtgattaagagctagagggttgatatgtagtcttgccaaggcaaaaaacttctggtgcctcagtttccccatttataaaatggggtgatagtattgggttctcaaaacgttatcacagggataaaatgagctgaagtacctagagtgagcacaatgtcttgcacacaatgtctaggtgtttaatacgtgtaaaatgcatatccttatctctcgtcctccacgtcgtggtgggagagaagtggggagcgtgagtgttggggaggcgaagccctcgaggactcccgtgagctctcaaagaaagtgctcaaatggctactttctagtcgccaggtaggtacaggctagggaggggaggcgccggtggccgccctgaggtgacaataaaacatttatgctcaaggggaaaacacagcctgctgatatggcgtggagaccctaatagtgggaggaatgcaagggttcccggtgctagagagagaagggagaaagctttcagctgtgcatagggaactgaccagaagggggtgctgctgtctcccatcaagcatcccaaacaactccactgcttaagacctctctggcctacacatgaggtccctctctcctcattcaaattaattgtcttggcagccag

SEQ ID NO: 39577 - DNA, 527 bp, Homo sapiens
cccctacatgaacaaacagatgcagaataattcccccccatcagtgcctagatacctccacacatccatacactgtgatgagacctagaatcatctagaacacctgcgggatgaagtgcagtggtgattaagagctagagggttgatatgtagtcttgccaaggcaaaaaacttctggtgcctcagtttccccatttataaaatggggtgatagtattgggttctcaaaacgttatcacagggataaaatgagctgaagtacctagagtgagcacaatgtcttgcacacaatgtctaggtgtttaatacgtgtaaaatgcatatccttatctctcgtcctccacgtcgtggtgggagagaagtggggagcgtgagtgttggggaggcgaagccctcgaggactcccgtgagctctcaaagaaagtgctcaaatggctactttctagtcgccaggtaggtacaggctagggaggggaggcgccggtggccgccctgaggtgacaataaaacatttatgctcaagggga

SEQ ID NO: 39578 - DNA, 2174 bp, Homo sapiens
cccctacatgaacaaacagatgcagaataattcccccccatcagtgcctagatacctccacacatccatacactgtgatgagacctagaatcatctagaacacctgcgggatgaagtgcagtggtgattaagagctagagggttgatatgtagtcttgccaaggcaaaaaacttctggtgcctcagtttccccatttataaaatggggtgatagtattgggttctcaaaacgttatcacagggataaaatgagctgaagtacctagagtgagcacaatgtcttgcacacaatgtctaggtgtttaatacgtgtaaaatgcatatccttatctctcgtcctccacgtcgtggtgggagagaagtggggagcgtgagtgttggggaggcgaagccctcgaggactcccgtgagctctcaaagaaagtgctcaaatggctactttctagtcgccaggtaggtacaggctagggaggggaggcgccggtggccgcctagtggtggcctcagtggctctctctcccccgccccttctcctctgcccccttcacccgcgtccccccgtcctgtcccgcagaggccctgctggcacggccggaggtgcagggtgtgaagctgctgttcctagtgggcggcttcgccgagtcagcggtgctgcagcacgcggtgcaggcggcgctgggcgcccgcggtctgcgtgtcgtggtcccgcacgacgtgggcctcaccatcctcaaaggcgcggtgctgttcggccaggcgccgggcgtggtgcgggtccgccgctcgccgctcacctatggcgtgggcgtgctcaaccgctttgtgcctgggcgccacccgcccgaaaagctgctggttcgcgacggccgccgctggtgcaccgacgtcttcgagcgcttcgtggccgccgagcagtcggtggccctgggcgaggaggtgcggcgcagctactgcccggcgcgtcccggccagcggcgcgtactcatcaacctgtactgctgcgcggcagaggatgcgcgcttcatcaccgaccccggcgtgcgcaaatgcggcgcgctcagcctcgagcttgagcccgccgactgcggccaggacaccgccggcgcgcctcccggccgccgcgagatccgcgccgccatgcagtttggcgacaccgaaattaaggtcaccgccgtcgacgtcagcaccaatcgctccgtgcgcgcgtccatcgactttctttccaactgagggcgcgccggcgcggtgccagcgccgtctgcccggccccgccctctttcggttcaggggcctgcggagcgggttggggcgggggaaacgatagttctgcagtctgcgcctttccacgccctccagccccgggggagataaggtcatgggagagtgggtggggacacacccagagactggctttgggattgggcactggtccgctgactgccaggctgaagggacccgccaaggactgaacgggtaagagaagaggtttgcaagacagagcgcgcagcccggcaaggggcatgtgaccccgaaggaagaacgcaacagaagagtcctggtctgaacttggccgagtaggggtgggggtgggatggcaggaggagccgcaggaggaaggaggttgtgcagggtctggacctgcagggctgaagttcactcatcgaccgactcagccccaaccgggagccaggcagaaaaaccctgtgccgtaggaaagtgactggaagtggactccagagggacaggtgtggtggcacagtcctggtgtggtgctgaccacccaaatatgactgtgaattgtggaaagggcagtagatctctaatgtggaggtgggaacattattgtggtggaggcaattatgagggtagcatttctttcgagacaaaacacccgtctgggaaggccccaaggtcagcttatgaaggaccccacttgcaccccaccccagccatggaagagcagctggagggtggatggggaggccagagggagcaatgaggggtggtcccagctctgctattgactcggtatgcctttaggacattctcttaccgctcatgggcctcagtttcctaaagtgtgaaatgtcaggcacttccctctaactggcatgcaacagccccacctgcctgagagccctgaggtgacaataaaacatttatgctcaagggga

SEQ ID NO: 39579 - DNA, 2034 bp, Homo sapiens
cccctacatgaacaaacagatgcagaataattcccccccatcagtgcctagatacctccacacatccatacactgtgatgagacctagaatcatctagaacacctgcgggatgaagtgcagtggtgattaagagctagagggttgatatgtagtcttgccaaggcaaaaaacttctggtgcctcagtttccccatttataaaatggggtgatagtattgggttctcaaaacgttatcacagggataaaatgagctgaagtacctagagtgagcacaatgtcttgcacacaatgtctaggtgtttaatacgtgtaaaatgcatatccttatctctcgtcctccacgtcgtggtgggagagaagtggggagcgtgagtgttggggaggcgaagccctcgaggactcccgtgagctctcaaagaaagtgctcaaatggctactttctagtcgccaggtaggtacaggctagggaggggaggcgccggtggccgcctagtggtggcctcagtggctctctctcccccgccccttctcctctgcccccttcacccgcgtccccccgtcctgtcccgcagaggccctgctggcacggccggaggtgcagggtgtgaagctgctgttcctagtgggcggcttcgccgagtcagcggtgctgcagcacgcggtgcaggcggcgctgggcgcccgcggtctgcgtgtcgtggtcccgcacgacgtgggcctcaccatcctcaaaggcgcggtgctgttcggccaggcgccgggcgtggtgcgggtccgccgctcgccgctcacctatggcgtgggcgtgctcaaccgctttgtgcctgggcgccacccgcccgaaaagctgctggttcgcgacggccgccgctggtgcaccgacgtcttcgagcgcttcgtggccgccgagcagtcggtggccctgggcgaggaggtgcggcgcagctactgcccggcgcgtcccggccagcggcgcgtactcatcaacctgtactgctgcgcggcagaggatgcgcgcttcatcaccgaccccggcgtgcgcaaatgcggcgcgctcagcctcgagcttgagcccgccgactgcggccaggacaccgccggcgcgcctcccggccgccgcgagatccgcgccgccatgcagtttggcgacaccgaaattaaggtcaccgccgtcgacgtcagcaccaatcgctccgtgcgcgcgtccatcgactttctttccaactgagggcgcgccggcgcggtgccagcgccgtctgcccggccccgccctctttcggttcaggggcctgcggagcgggttggggcgggggaaacgatagttctgcagtctgcgcctttccacgccctccagccccgggggagataaggtcatgggagagtgggtggggacacacccagagactggctttgggattgggcactggtccgctgactgccaggctgaagggacccgccaaggactgaacgggtaagagaagaggtttgcaagacagagcgcgcagcccggcaaggggcatgtgaccccgaaggaagaacgcaacagaagagtcctggtctgaacttggccgagtaggggtgggggtgggatggcaggaggagccgcaggaggaaggaggttgtgcagggtctggacctgcagggctgaagttcactcatcgaccgactcagccccaaccgggagccaggcagaaaaaccctgtgccgtaggaaagtgactggaagtggactccagagggacaggtgtggtggcacagtcctggtgtggtgctgaccacccaaatatgactgtgaattgtggaaagggcagtagatctctaatgtggaggtgggaacattattgtggtggagcaatgaggggtggtcccagctctgctattgactcggtatgcctttaggacattctcttaccgctcatgggcctcagtttcctaaagtgtgaaatgtcaggcacttccctctaactggcatgcaacagccccacctgcctgagagccctgaggtgacaataaaacatttatgctcaagggga

SEQ ID NO: 39580 - DNA, 1964 bp, Homo sapiens
gggggcccttatggcgcggtgggcgtggacctggccttcgagcagctgctgtgccgcatcttcggcgaggacttcatcgccaccttcaaaaggcaacggccggcagcctgggtagatctgaccatcgccttcgaggctcgcaagcgcactgctggcccacaccgtgcaggggcgctcaacatctcgctgcccttctccttcattgacttctaccgcaagcagcggggccacaacgtggagaccgctctgcgcaggagcagcgtgaacttcgtgaagtggtcctcacaggggatgctccgaatgtcttgtgaagccatgaacgagctctttcagcccaccgtcagcgggatcatccagcacatagaggccctgctggcacggccggaggtgcagggtgtgaagctgctgttcctagtgggcggcttcgccgagtcagcggtgctgcagcacgcggtgcaggcggcgctgggcgcccgcggtctgcgtgtcgtggtcccgcacgacgtgggcctcaccatcctcaaaggcgcggtgctgttcggccaggcgccgggcgtggtgcgggtccgccgctcgccgctcacctatggcgtgggcgtgctcaaccgctttgtgcctgggcgccacccgcccgaaaagctgctggttcgcgacggccgccgctggtgcaccgacgtcttcgagcgcttcgtggccgccgagcagtcggtggccctgggcgaggaggtgcggcgcagctactgcccggcgcgtcccggccagcggcgcgtactcatcaacctgtactgctgcgcggcagaggatgcgcgcttcatcaccgaccccggcgtgcgcaaatgcggcgcgctcagcctcgagcttgagcccgccgactgcggccaggacaccgccggcgcgcctcccggccgccgcgagatccgcgccgccatgcagtttggcgacaccgaaattaaggtcaccgccgtcgacgtcagcaccaatcgctccgtgcgcgcgtccatcgactttctttccaactgagggcgcgccggcgcggtgccagcgccgtctgcccggccccgccctctttcggttcaggggcctgcggagcgggttggggcgggggaaacgatagttctgcagtctgcgcctttccacgccctccagccccgggggagataaggtcatgggagagtgggtggggacacacccagagactggctttgggattgggcactggtccgctgactgccaggctgaagggacccgccaaggactgaacgggtaagagaagaggtttgcaagacagagcgcgcagcccggcaaggggcatgtgaccccgaaggaagaacgcaacagaagagtcctggtctgaacttggccgagtaggggtgggggtgggatggcaggaggagccgcaggaggaaggaggttgtgcagggtctggacctgcagggctgaagttcactcatcgaccgactcagccccaaccgggagccaggcagaaaaaccctgtgccgtaggaaagtgactggaagtggactccagagggacaggtgtggtggcacagtcctggtgtggtgctgaccacccaaatatgactgtgaattgtggaaagggcagtagatctctaatgtggaggtgggaacattattgtggtggaggcaattatgagggtagcatttctttcgagacaaaacacccgtctgggaaggccccaaggtcagcttatgaaggaccccacttgcaccccaccccagccatggaagagcagctggagggtggatggggaggccagagggagcaatgaggggtggtcccagctctgctattgactcggtatgcctttaggacattctcttaccgctcatgggcctcagtttcctaaagtgtgaaatgtcaggcacttccctctaactggcatgcaacagccccacctgcctgagagccctgaggtgacaataaaacatttatgctcaagggga

SEQ ID NO: 39581 - DNA, 2404 bp, Homo sapiens
cccctacatgaacaaacagatgcagaataattcccccccatcagtgcctagatacctccacacatccatacactgtgatgagacctagaatcatctagaacacctgcgggatgaagtgcagtggtgattaagagctagagggttgatatgtagtcttgccaaggcaaaaaacttctggtgcctcagtttccccatttataaaatggggtgatagtattgggttctcaaaacgttatcacagggataaaatgagctgaagtacctagagtgagcacaatgtcttgcacacaatgtctaggtgtttaatacgtgtaaaatgcatatccttatctctcgtcctccacgtcgtggtgggagagaagtggggagcgtgagtgttggggaggcgaagccctcgaggactcccgtgagctctcaaagaaagtgctcaaatggctactttctagtcgccaggtaggtacaggctagggaggggaggcgccggtggccgcctagtggtggcctcagtggctctctctcccccgccccttctcctctgcccccttcacccgcgtccccccgtcctgtcccgcagaggccctgctggcacggccggaggtgcagggtgtgaagctgctgttcctagtgggcggcttcgccgagtcagcggtgctgcagcacgcggtgcaggcggcgctgggcgcccgcggtctgcgtgtcgtggtcccgcacgacgtgggcctcaccatcctcaaaggcgcggtgctgttcggccaggcgccgggcgtggtgcgggtccgccgctcgccgctcacctatggcgtgggcgtgctcaaccgctttgtgcctgggcgccacccgcccgaaaagctgctggttcgcgacggccgccgctggtgcaccgacgtcttcgagcgcttcgtggccgccgagcagtcggtggccctgggcgaggaggtgcggcgcagctactgcccggcgcgtcccggccagcggcgcgtactcatcaacctgtactgctgcgcggcagaggatgcgcgcttcatcaccgaccccggcgtgcgcaaatgcggcgcgctcagcctcgagcttgagcccgccgactgcggccaggacaccgccggcgcgcctcccggccgccgcgagatccgcgccgccatgcagtttggcgacaccgaaattaaggtcaccgccgtcgacgtcagcaccaatcgctccgtgcgcgcgtccatcgactttctttccaactgagggcgcgccggcgcggtgccagcgccgtctgcccggccccgccctctttcggttcaggggcctgcggagcgggttggggcgggggaaacgatagttctgcagtctgcgcctttccacgccctccagccccgggggagataaggtcatgggagagtgggtggggacacacccagagactggctttgggattgggcactggtccgctgactgccaggctgaagggacccgccaaggactgaacgggtaagagaagaggtttgcaagacagagcgcgcagcccggcaaggggcatgtgaccccgaaggaagaacgcaacagaagagtcctggtctgaacttggccgagtaggggtgggggtgggatggcaggaggagccgcaggaggaaggaggttgtgcagggtctggacctgcagggctgaagttcactcatcgaccgactcagccccaaccgggagccaggcagaaaaaccctgtgccgtaggaaagtgactggaagtggactccagagggacaggtgtggtggcacagtcctggtgtggtgctgaccacccaaatatgactgtgaattgtggaaagggcagtagatctctaatgtggaggtgggaacattattgtggtggaggcaattatgagggtagcatttctttcgagacaaaacacccgtctgggaaggccccaaggtcagcttatgaaggaccccacttgcaccccaccccagccatggaagagcagctggagggtggatggggaggccagagggagcaatgaggggtggtcccagctctgctattgactcggtatgcctttaggacattctcttaccgctcatgggcctcagtttcctaaagtgtgaaatgtcaggcacttccctctaactggcatgcaacagccccacctgcctgagagccctgaggtgacaataaaacatttatgctcaaggggaaaacacagcctgctgatatggcgtggagaccctaatagtgggaggaatgcaagggttcccggtgctagagagagaagggagaaagctttcagctgtgcatagggaactgaccagaagggggtgctgctgtctcccatcaagcatcccaaacaactccactgcttaagacctctctggcctacacatgaggtccctctctcctcattcaaattaattgtcttggcagccag

SEQ ID NO: 39582 - DNA, 341 bp, Homo sapiens
gctaatttttgtatttttagtagagacaggttttcaccatgttagccaggatggtctcgatcttttgacctcatgatccgcccgcctcggcctcccaaagtgctgggattacaggcgtgagccaccgcgcccagccatgacctaagttttttatggtagtgatagtctgtgttgaaactcttagcatttccttagaactatttttattccaaggagaataaaatcttaatatataaaatgaaaatgacatttgggttctgtgaagtgtaaaacggacctcaaatcaacaaggggtcagataggagcaaaatcgaaaccatgtcaattgcatcctccatatc

SEQ ID NO: 39583 - DNA, 427 bp, Homo sapiens
aagaggtgtacagttctagaacattctgcaaccagacttcaggcaccaggaggcctccgtaggcagggttcctcgggcttctcagctggcttccttggagaaatttcatatgctgattcctttcaattatctgtcaattttcaaaatgcaaatagaaacatgcagtcatcactttggtactcaccagctgatttcttccaagcacccagaccataagtgaatgcagttcaatatgttctcttcctttttttaagtgggagttaatattactgagcagattttggttagcttccaggaacccagtgtgtggagaggcagaattttattttagaagcacaagttggtttgaaaaatgtgaacttaccccaactctttctttgtttcatctttcttactagacatgttttattttcctaaagaaaacata

SEQ ID NO: 39584 - DNA, 399 bp, Homo sapiens
gccattgcacctagccagcttttataggtatataaaaagcacttgctttcttttactcctagccaaaaaaataagatgcaagattaaaataagactcttttctattgacctagtagtattattgacactacataagaaagtataaaattaagctgaacaaccagggtgattcataactctaatacattgaaaatataaattaatccttacctattatatatttctgatcaaccttatcacttaaagcaagttttatgttttcaagtcttttcaaatgtacagtcaaaaacagctgacaggttttatacagaaaagtaacataaactactatttaacactggaaacttaaattatagttacatatatctacaaatactgcaaacatataaacagtttatg

SEQ ID NO: 39585 - DNA, 2255 bp, Homo sapiens
  misc_feature (319)..(319): n is a, c, g, or t
  misc_feature (372)..(372): n is a, c, g, or t
cattcttatttctttttttcttgaatttagaatattttctatttatatttaatagatccaaattaagtatgttgctattgtacccgtgaacccttaaaactgggataagccttgatgtgggtgtctgggaactctttaaacatgtattggcagtgtgcaccttttttttccttttgagtggatttgaaattgttcatttataaatccctttcaagcctccctggctgagatcgacacatgagaagttatttccaaggggtgtttggaaatggcagactctgcgcacaccatgcggcctctccctcaccccaccgcctcncacctcggcctgcctgtgttcccttctcttttgtcttgacttcctgagctgcngactcctggcatctttgactcccttttcttcgctccccagggcaacctggtatcctggagggcttcttgcctacccagaaagtatacccttggtaaaccagtggtgactgcccgagcatccatttgtgcaggaagcctcctgcctttcggtgcccgagaacctcttcagaagtctctcctttgagcatggaatatttatttgtgtggccatgcatatttgggtgccttcttaatctgtagaatggggctagccctgccagcctcacgggccatgcactagcatggtgtcatgtgaggtgttaataagtgttccaagggtaaaatgggttgctctgtcaagtaagttggcaagaacaccgtagcatactaaaggttctgtgatgcccctcagtaaaaacacttaactcaagtttcctgagcatgcttggcctaggaacacttctctttgtagaacacttgtgacaccttgaggtcttcagggacacactccagtgttattacagaccttgcatgatgtcatgtgagtcctggggtttggtgtcatcgagaagatgggctcccctgctttagacctctgtgtggacttactatgttcttaaatcacacctctttaacccaattccttctccctaacccagcagcctctcaaagttgctggcaaaatacagaaaacctaagtaaaggaggtgatggccacatctgccacacatctctgtgtactgctttcatttctttttgcttttctcttgctgttggtcgtgggcttggtttgacatgatcttattctgcctgagcttatgtcttccgtgttcccaggagtgtgtatttggcatagaatacgtacatgtggccccgcttttgtgcttatcttgccattttcccccttccattttgtaaaatgagaagatgttgagttctggggttgacatcagttgattaaaataaagaccttgccccaaacctcttttgcacatactatggtgtggattttactttaaaaaaaaaatggttgatttcttaacttgctattccttctgagcatggtagggtttggcttctgtttcatggcaggaagggctaaggcggctccactgaagttcccgctgcagtccacctggaggcccagaccctgctggggttcacgctaagcactttgagggtggtaaacagccattgtcttggacttccgtcctaaccctctcttctccttgtcccccttcttcccttccctttctcctgcaaggttccgccacacttcaccactggcagcagttggcccaacctcaccttgggggcatcctggacccccggcccggtgtggtcaccaagggcttccggacgctggatgttgacctggacgaagtgtactgccttaacgactttgaagaagatgacacaggtgaccacatttctctcccacgcctagctacctccactccagttcagcacccagagacctcaggtgagaggtcccaagcacgtgtgactgtctcaggcagcagaagttacccgagccggcctcaggcttccccagaggagatgcaggagccgccagcggccacggaggaggaggaggaggaggaggaggaggaggaggggtctggtgagggcaccacgataagtcctgtaaacttggcacctttcccggaggcagagttttgggccattctcacctctgttccaggcaccatccgtagtggttctctgtctgtagcttccgctcgtctgtgtgggtgatgattaaagcattctcattgcacagttctgtttttaaatacagagtctgatgcctcctatttgtaacaatgggtgtagctcccctgcccatcttggaggtgcatggcccaccagggatctttaaagtgggagcaggaaaggctgct

SEQ ID NO: 39586 - DNA, 411 bp, Homo sapiens
tctaacatctatcaaaaggtaatggaacacatttttaatttggaaatagacacacggtcttttatttaccgtttttgttgaaatttaactgacataattgtatttatcatttactaatatttactttgtaaatggcttaaagatttccatgttgttgctgtaatcataaaatccagaaaggtcatattagcaaatttttcattcattagtctttaagtgtgtcagttggtactgactgcagactgacttatgaataccaattaccattatttctatttattcatgttaaagtatttacttgtaataatattttgtgtgctacatcattgagtaaatatttcacattaagataaatgctgtaacattagtatgccactaaatttgctatactctttaacctaataaagaaca

SEQ ID NO: 39587 - DNA, 520 bp, Homo sapiens
agagttaattaggtaaaagcacatcttttccctccctgggactttagaacttaaatgaggaaatttagtataaatgctcataagacaaatacactatagttttcataggtggtcaggaatttttggtaagttggggttgtatcttctgtttttaatttatgactgattttgtgcgtttagctgtgttgcccactgtgcctgagtcaccagaagaggaagtgaaggctagccaactttcagttcagcagaacaaattgtctgtccagtccaatccttcccctcagctgcggagcgttatgaaagtagaaagttccgaaaatgttcctagccccacgcatccaccagttgtaattaatgctgcagatgatgatgaagatgatgatgatcagttttctgaggaaggtgatgaaaccaaaacacctaccctgcaaccaactcctgaagttcacaatggattacgagtgacttctgtccagaaacctgcagtcaatatgaagaaagatgaatgtttgaattttag

SEQ ID NO: 39588 - DNA, 528 bp, Homo sapiens
actttcttaaagtatttaaataataaattaaaagcattatctctaaataattgaagataaatatgtattgcattttattacaaatcaaaggtataaaaatgtggataataagtataactttttgcacaatgcaaaatttaaatatttagctgagtaagttggaagaggaaggtgggaggaaagttatgttagtacacagatttatctcttaacagatgagagttaaagacaaattgataaatcaaataaatgagctttacatatatttaacaataaaaatacatcttttaaaataacataatcttaaattgaatgaagaagcagaaggagggaaaattaaaaatgctaatttttatttttgctttaaaaaagatgtaataggtgctgtaaaagcagtataggattctgatacacaaagttatggttacagaggtaaataggtaataacacttaaaactgctatagaacaaaaatgtgatgtggttgtaagtaaatgctttacttcatctaatcttcatttttaaaaga

SEQ ID NO: 39589 - DNA, 676 bp, Homo sapiens
  misc_feature (48)..(48): n is a, c, g, or t
  misc_feature (97)..(97): n is a, c, g, or t
  misc_feature (99)..(99): n is a, c, g, or t
tttcttcacttatatagcagatatagactgtcatacatgtataggacnaggctcattaagcttctcagatgtatcagatagaagattacctaagatntnagtcatttacagatatgacaatgctcagagaactatcttgtcctgtctctactcaggccccctttctactattaactacagataaaagtgctaaattactgaattcaattaataactactccatactcacttcatcttacttgaagagtcacacacttctttataaagaattccctgagactgggtaatttataaacaaaagaggttcaactgactcacagttctgcatgggtggggaggcctcaggaaacttacaatcatggcagaaggcaaatgggaagcaaggcacatcttacacggtggcagaagaagggggtggggaaaatggccaaacacttttaaagcatcagatattatgagaactcactcactatcacaaggacagcctggggaaaactgtccccattatccaatcacctcccaccaggtccctccctttacatgtggggattacaattcaagatgagatgcgggtgggtacacagagccaagccatattacttagattttcagttacgcaaaacggatgttcatagttgtatgtgcctaaatatagctttagagattcaataaaatt

SEQ ID NO: 39590 - DNA, 926 bp, Homo sapiens
tggaaactcttcatatcaactagttaaataaattcaggcaccttcacacaaggtaatactaggcatattaaaaaaagaacatggtaaagcaaatctgtacctaaagtagatctgtgtattagtctgtttttgcaatgctgataaagacatacccaagactgggtaatttagaaaggaaagaggtttcattgacttacagttccacgtggctgcagaggcctcacaatcatggcagaaggcaaggaggagcaaagtcacctcttacatggatggtgacagtcaaaagaggagagattatggcagggaaactcccctttttaaaaccatcaaatctcatgagacgtattcactatcatgagaacagcatgagaaagacctgtccccatgattcaatcacctcccaccaggtccctcctacaacatgtgggaattcaagatgagatttgggtggggacacagccaacccgtatcaatctgtatgtctgatatggaaagcattccaagatacaaagtttagtgtttgtttaaataatgacacaagaacactctttaccatgattccattttttaaaatttatctgtggtcttcaaggcaagatgaatacaggataggaagggagatgaagaaagagacttattgttcatgttaaaaagtcggcttgagtccaggcatagtggtttacgcctgtaatcccagcattttgggaggcagaggcaggagcatcgcttgagttcaggagttccagaacagcctgggtaacgtggtaaaaccccatctctacaaaaaatttaaaaattagctgggtgtggtggtgcataactgtagtcccagttactcaggaagctgaggtgggaggatcaattgagcctgggaggtggccaaggctacagtgagccataattgtgccactgcactctagcctggg

SEQ ID NO: 39591 - DNA, 431 bp, Homo sapiens
aaaaaatcatccacacacagatttgcctataatcttatggacttcacagacatcctcaagcgcatggacaaaaaccccaagattcaagaaaagccgtccacatggtcggcagctcaagaaagcctgccagttgtccaagcaatgcttagttacagttcccatgctgggagctgctctctagagaaatgttatttgcagatgtgcacctcgtgcgtctgtgtgtgttgttctgcctgtgtccaaaatacatgctttttctagatgggagcctttcccccacaaagcagaaatgtgttctgtcatgggatttgatgatcatcaaattactttccctcaagaattggctttcttggcgattagttaattcagttttcaaaacttttagataagggcttaatcaacgtaaaactgctttggggcagttgcattgt

SEQ ID NO: 39592 - DNA, 587 bp, Homo sapiens
tcccttctcccgccaggcatgggctgcaacgagtgtacgcacccctcctgccagcactcgctgagcatgctgggcatcggccagtgcgtggaatgtgagagcggggtgctggtgctggaccccacctcgggccccaagtggaaggtggcctgcaacaagtgcaacgtggtagcgcactgcttcgagaacgcccaccgcgtgcgggtgtccgccgacacctgcagtgtctgtgaggccgccttgcttgatgtggacttcaacaaggccaagtccccactcccgggcgatgatgagcagcacatgggctgcgtcttttgtgaccccgtcttccaggagctggtggagctgaagcatgcggcctcctgccaccccatgcaccgcggtggaccagggagaaggcagggtcgagggcggggccgggccaggaggccccctgggaagcccaaccccagacggcccaaggacaagatgtcagccctggccgcctactttgtatgatgaccctgtcctccctcacccaggctgcagtgccatgcagacacctcatggcacttcaaactattaaaatgcattttatcttatccaga

SEQ ID NO: 39593 - DNA, 522 bp, Homo sapiens
cattgaacagatcatctaggtagaaagctaacaaataatcatcaaatttaatctgtaccacagaacaaatagacttaacagacatttacacaacatttcatccaaaagctgtggagtacacattcttctcctcatcacacagaacattctccaggctagaccatatgttaagacacaaaacaagtttcaacaaattttgaaaaatcaacattatatcaagtatattctagacaaaaatagaatagaactagaaatgaatactaggaagaactttggaaactatacagataacatggaaattaaacaacatgcttctgaacaaccattgagtcaatgaaaaaactcagaagaaaataacaaatgttcttgaaataaatgcaaatggaaacacaacataccaaagcctatggaatacaacaaagacagtgctaagagagaattttacagcaataaatgcctactgcaagaacatagtaagattataaacaagctactatgcacctcaaggaacaaaaaaaaaaa

SEQ ID NO: 39594 - DNA, 343 bp, Homo sapiens
aaaattccatattccagtatctgattaaaaactatcaataatttattgcctaatataatttgaagcttaggcataagttaaaaaactctcctgtcaaattccaaaatatcttcatttgggcttgtcacaagtcttaatttccctgggaatcaaattacaaataaataaaaagggaaggaaaatacctcactctcacttttcagttcattagatattaaaataagagtgattcttctaaccaacaccaaacaactaaatgatacatacagcaacttctaagcagctgctttttcttcacctcatcatcttaaaatcaggttggttttctaacttctttccccat

SEQ ID NO: 39595 - DNA, 376 bp, Homo sapiens
ggccagcaggaggcctccaagcattgaaactgccccacccacccaagggcttaatttagacccctcgacaggttgactctgccagcatgatctgacccatttcatttcctacatgtagcaagtaagaaaaagaaatggaaatattcccttctgcagactggtgtgaaatctctagctagacttttctaactgtaaaaacagtcagtgggcctagaaatgataatacatgcaaggttttggaaaaaccaagccgagagtccatacactcagatccttggacctcagcatctgtccggccgcccctccactcctaaaagcctgaccacccccaccagcccctgtcacagctgccccaacagctcagccacccaccttc

SEQ ID NO: 39596 - DNA, 538 bp, Homo sapiens
ggccgggccggataattgcctataaacacactctgttatcttggcttcctagtgacttccatacgactctactcacagagtatttttcttgctgctcatcttactattttcatggataaattggagctatcagtttctctatagttctaactcttgacctttttcttactggttcagatggctagcaagctcttaaatcatagttttaaaattattcatttccacccatcccagaaagttctgtttgtcatctctttcctattaaaaaaaaaaatcttcagtttagacaccctcaggatttagtatttttttcttttgaatattcttattctacttagtatgtatagcagcacgctagattattagacatggtctagcagtctttatggtttgggaatacctcaggatatttccaattgtctcaaaaggtatccctacaatttcaaatttacgataacaaatgactaaaaattcacatttttttaaaaagagccattcccaacaaaatgaaattccataaaaactttaggagaaagaa

SEQ ID NO: 39597 - DNA, 441 bp, Homo sapiens
ccttttataatttaaatgccttttcattcattttacattgtactctccagtgtttgaaacctctctgtgtcattattttcctttttctctttttctgaaaacaccataatagcttttttgaagtttaggatgagtttcttttaataatcttttagcagggtgcagtggttcacacctgtaatcccagcactttgggaggttgaggtgggtggattgcttgagcctaggagttcgagggcagcctgggcaacatggtgaaaccccatctctaacagaaaatacaaaaattagccaggtttagtggcatgagcctgttgtcccagctactcagaaggcagaggtgggaggattacctgagcctagggaggtggaggctacagagttcagatggtgccactgcacgtcagcctgggtgacagagtgagaccctgtcaaaaaaaa

SEQ ID NO: 39598 - DNA, 2311 bp, Homo sapiens
cacaaggctacaggtgtctttatttccactgcacgctggtgctgggagcgcctgccttctcttgccttgaaagcctcctctttggacctagccaccgctgccctcacggtaatgttggactcggtgacacacagcaccttcctgcctaatgcatccttctgcgatcccctgatgtcgtggactgatctgttcagcaatgaagagtactaccctgcctttgagcatcagacagcctgtgactcatactggacatcagtccaccctgaatactggactaagcgccatgtgtgggagtggctccagttctgctgcgaccagtacaagttggacaccaattgcatctccttctgcaacttcaacatcagtggcctgcagctgtgcagcatgacacaggaggagttcgtcgaggcagctggcctctgcggcgagtacctgtacttcatcctccagaacatccgcacacaaggttactccttttttaatgacgctgaagaaagcaaggccaccatcaaagactatgctgattccaactgcttgaaaacaagtggcatcaaaagtcaagactgtcacagtcatagtagaacaagcctccaaagttctcatctatgggaatttgtacgagacctgcttctatctcctgaagaaaactgtggcattctggaatgggaagatagggaacaaggaatttttcgggtggttaaatcggaagccctggcaaagatgtggggacaaaggaagaaaaatgacagaatgacatatgaaaagttgagcagagccctgagatactactataaaacaggaattttggagcgggttgaccgaaggttagtgtacaaatttggaaaaaatgcacacgggtggcaggaagacaagctatgatctgctccaggcatcaagctcattttatggatttctgtcttttaaaacaatcagattgcaatagacattcgaaaggcttcattttcttctctttttttttaacctgcaaacatgctgataaaatttctccacatctcagcttacatttggattcagagttgttgtctacggagggtgagagcagaaactcttaagaaatcctttcttctccctaaggggatgaggggatgatcttttgtggtgtcttgatcaaactttattttcctagagttgtggaatgacaacagcccatgccattgatgctgatcagagaaaaactattcaattctgccattagagacacatccaatgctcccatcccaaaggttcaaaagttttcaaataactgtggcagctcaccaaaggtgggggaaagcatgattagtttgcaggttatggtaggagagggtgagatataagacatacatactttagattttaaattattaaagtcaaaaatccatagaaaagtatccctttttttttttttgagacgggttctcactatgttgcccagggctggtcttgaactcctatgctcaagtgatcctcccacctcggcctcccaaagtactgtgattacaagcgtgagccacggcacctgggcagaaaagtatcttaattaatgaaagagctaagccatcaagctgggacttaattggatttaacataggttcacagaaagtttcctaaccagagcatctttttgaccactcagcaaaacttccacagacatccttctggacttaaacacttaacattaaccacattattaattgttgctgagtttattcccccttctaactgatggctggcatctgatatgcagagttagtcaacagacactggcatcaattacaaaatcactgctgtttctgtgattcaagctgtcaacacaataaaatcgaaattcattgattccatctctggtccagatgttaaacgtttataaaaccggaaatgtcctaacaactctgtaatggcaaattaaattgtgtgtcttttttgttttgtctttctacctgatgtgtattcaagcgctataacacgtatttccttgacaaaaatagtgacagtgaattcacactaataaatgttcataggttaaagtctgcactgacattttctcatcaatcactggtatgtaagttatcagtgactgacagctaggtggactgcccctaggacttctgtttcaccagagcaggaatcaagtggtgaggcactgaatcgctgtacaggctgaagacctccttattagagttgaacttcaaagtaacttgttttaaaaaatgtgaattactgtaaaataatctattttggattcatgtgttttccaggtggatatagtttgtaaacaatgtgaataaagtatttaacatgttaaaaagtc

SEQ ID NO: 39599 - DNA, 2460 bp, Homo sapiens
ggctgagtggtttgctccttcccctctctctgggaggctgagcaggggtgccgggttgctcaggccatgggagccacacctgttattgctgcctctgatttgtgtgacactgagaagcccacaggcctgtccctccaactcggtggaccctctctgtgtgcatttggtgtgtgagccagctctgagaagggttcagaagccactggaggcatctggggacctcagcttccatgccatctctgcctcactcccacagggtaatgttggactcggtgacacacagcaccttcctgcctaatgcatccttctgcgatcccctgatgtcgtggactgatctgttcagcaatgaagagtactaccctgcctttgagcatcagacagcctgtgactcatactggacatcagtccaccctgaatactggactaagcgccatgtgtgggagtggctccagttctgctgcgaccagtacaagttggacaccaattgcatctccttctgcaacttcaacatcagtggcctgcagctgtgcagcatgacacaggaggagttcgtcgaggcagctggcctctgcggcgagtacctgtacttcatcctccagaacatccgcacacaaggttactccttttttaatgacgctgaagaaagcaaggccaccatcaaagactatgctgattccaactgcttgaaaacaagtggcatcaaaagtcaagactgtcacagtcatagtagaacaagcctccaaagttctcatctatgggaatttgtacgagacctgcttctatctcctgaagaaaactgtggcattctggaatgggaagatagggaacaaggaatttttcgggtggttaaatcggaagccctggcaaagatgtggggacaaaggaagaaaaatgacagaatgacatatgaaaagttgagcagagccctgagatactactataaaacaggaattttggagcgggttgaccgaaggttagtgtacaaatttggaaaaaatgcacacgggtggcaggaagacaagctatgatctgctccaggcatcaagctcattttatggatttctgtcttttaaaacaatcagattgcaatagacattcgaaaggcttcattttcttctctttttttttaacctgcaaacatgctgataaaatttctccacatctcagcttacatttggattcagagttgttgtctacggagggtgagagcagaaactcttaagaaatcctttcttctccctaaggggatgaggggatgatcttttgtggtgtcttgatcaaactttattttcctagagttgtggaatgacaacagcccatgccattgatgctgatcagagaaaaactattcaattctgccattagagacacatccaatgctcccatcccaaaggttcaaaagttttcaaataactgtggcagctcaccaaaggtgggggaaagcatgattagtttgcaggttatggtaggagagggtgagatataagacatacatactttagattttaaattattaaagtcaaaaatccatagaaaagtatccctttttttttttttgagacgggttctcactatgttgcccagggctggtcttgaactcctatgctcaagtgatcctcccacctcggcctcccaaagtactgtgattacaagcgtgagccacggcacctgggcagaaaagtatcttaattaatgaaagagctaagccatcaagctgggacttaattggatttaacataggttcacagaaagtttcctaaccagagcatctttttgaccactcagcaaaacttccacagacatccttctggacttaaacacttaacattaaccacattattaattgttgctgagtttattcccccttctaactgatggctggcatctgatatgcagagttagtcaacagacactggcatcaattacaaaatcactgctgtttctgtgattcaagctgtcaacacaataaaatcgaaattcattgattccatctctggtccagatgttaaacgtttataaaaccggaaatgtcctaacaactctgtaatggcaaattaaattgtgtgtcttttttgttttgtctttctacctgatgtgtattcaagcgctataacacgtatttccttgacaaaaatagtgacagtgaattcacactaataaatgttcataggttaaagtctgcactgacattttctcatcaatcactggtatgtaagttatcagtgactgacagctaggtggactgcccctaggacttctgtttcaccagagcaggaatcaagtggtgaggcactgaatcgctgtacaggctgaagacctccttattagagttgaacttcaaagtaacttgttttaaaaaatgtgaattactgtaaaataatctattttggattcatgtgttttccaggtggatatagtttgtaaacaatgtgaataaagtatttaacatgttaaaaagtc

SEQ ID NO: 39600 - DNA, 478 bp, Homo sapiens
ctgctgttgtttatttctctaaaaaatcacattagaaatgagcctccaaggagcttgacttgaacctggaactttctaaaatgcagagtatctatgcatctctatctacatgcatgcctcccttccccccacacacatgcacacacacgaacacacgtgcacatgcacacacacgtgtgcacacataacccttctggacttagcagcacacggaccagctggatgcttgtggggcctgagggtggacagctcctccacgccatcagggctgctgtctgagacctgcccccaagagcctctggccaggacgcagccttcccccacacatcacaggcacagggaggcatttggagcgcccgaggatagggctgtgtgacatccctggcaagggccaggcagcgggaatccagccgccaaactcgagggcctcatggaatgctaatggctacggacagcactgccacaggcttgagtgaca

SEQ ID NO: 39601 - DNA, 387 bp, Homo sapiens
tactactaaattcgcggccgcgtcgactcccttccccccacacacatgcacacacacgaacacacgtgcacatgcacacacacgtgtgcacacataacccttctggacttagcagcacacggaccagctggatgcttgtggggcctgagggtggacagctcctccacgccatcagggctgctgtctgagacctgcccccaagagcctctggccaggacgcagccttcccccacacatcacaggcacagggaggcatttggagcgcccgaggatagggctgtgtgacatccctggcaagggccaggcagcgggaatccagccgccaaactcgagggcctcatggaatgctaatggctacggacagcactgccacaggcttgagtgaca

SEQ ID NO: 39602 - DNA, 552 bp, Homo sapiens
aattacggaacaggcaataaataggcaatggccctgggacttcctgctcaccgtacctgtaccaacagcctgactgggccaggctttccactggtgcagttctcatacctgtcactgccaagaatggctctttttgaagtgaggctgctgagtctgggagcatcaagagtgggagggaaagcatgggcttgctatagccatgtttcagagcaaagagcacagactggggtttggggcactgattagtctgtcagtgtttattgtggttttgccaattacttttccccttgggctttagcgtcccctatttatctgatggaagagtgggatgaaatcagagttgttacctgatattcaacacatgaattctatttaatttggccagcacagtcactgtccttctcactctcactctctcaaataggattggctgtcaacatttaaatatcaagatttcggagcggggcgcgatggctcacgcctgtgatcccagcactttggcaggccgaggtgggcagatcacgaggtcaggagatcgaaacacagtgaaac

SEQ ID NO: 39603 - DNA, 496 bp, Homo sapiens
cagctacagggagggccattaagatggcacagtcatggagtaaacatatcccccttgccaggccacctaagcacagttcctctgtcgtctggggaccacgtggttattcagctggagtgggtttcgacattaataactggacattttttggctggtgttaatccatctaagccagttcctgtgagccctgtggccactaagtaaataccctttttcccaaagcgcttcactgtggcccgatgggtctgagtgtgtagtgtgcacaggtggagacgatggaaaccacaggggctctgtagtctgcagcattcttgtcttcaaagactttcagaccagtgaaaaggtaaagcaggtcagataagaccaaagaaggttcttgcagaagggtcctggttcttggacaattctgagaagtcagtttccctccctcatttcacctcctcatacatccagagatacagttaggcagatacagggattttctggggaatatttt

SEQ ID NO: 39604 - DNA, 460 bp, Homo sapiens
cccagggttaggggaataagtgcctcctttgctttggaagaagcgacccttttatttagtattaattcgagttatcagtcctggacccactgctcacaacgcccaaatgctgactgggaaaggtagtgggtaagaaccccaaggggcaggcgggagagtaacacagagtccaggtctgggtccttgggctgcttgcctcgctcttccgaaaagttgtgcctgggacagagacagggcggaatcctcgcgaccagccccggggatcgctggccaccacaaatgagatgaccgacatagggggccctccctcccagaggtgctaggtggggaaaagccaaactgttaaaaggcgagaacctcctttcctggggccaacgcgatccccactcatgctgcgttttctggcggcgccagccgaacccagtgactgtgaaacccaagttgggggacccggaaggcg

SEQ ID NO: 39605 - DNA, 6788 bp, Homo sapiens
  misc_feature (140)..(140): n is a, c, g, or t
ctagatataatgggaggtgctttatagaaagtgcagcatatcctttgtctgattccaaacaaatgtagaagtctacgctagctagtagtaatggcagctgggaggtgcaggttctctccacccaggctcattttccacgntttgggtcatgggggacagctggtcctggactgtggcactaagaaagcatgactcctgccccgtcttcccttgaggggcagaacagggcagagtctgcacctgtgcccgtgcccagcatcacgcccaccccgctgcctttgcaggcacatggtgcttctgaaggagcagtacgggcagcaggtggtcgtgaaccttctgggaagcagaggcggagaggaggtgctcaacagagccttcaagaagctgctctgggcttcttgccacgcgggcgacacgcctatgatcaattttgacttccatcagtttgccaaaggtgggaagctagagaaattggagaccctcttgaggccacagttaaagctgcactgggaagacttcgatgtgttcacaaagggggagaacgtcagtccacggtgaggctcgctgcgcactgtgccgcgtcttctgctggggggaagcgtcagtccacgttttcagaaaggcactttgcggatgaactgtcttgactgcctggaccgaaccaacactgtgcagagcttcatcgcgctcgaggtcctgcatctgcagctcaagaccctggggctgagttcaaaacccatcgttgaccgctttgtggagtccttcaaagccatgtggtctctgaatggccacagcctgagcaaggtgttcacaggcagcagagccctggaagggaaggccaaggtggggaagctgaaggatggagcccggtccatgtctcgaaccatccagtccaacttcttcgacggggtgaagcaggaggccatcaagctgctgctggttggggacgtctacggcgaggaggtggcagacaaagggggcatgctgctggacagcacggcgctcctggtgactcccaggatcctgaaagctatgactgagcgtcagtccgaattcacaaatttcaagcggatccggattgctatggggacctggaacgtgaacggaggaaagcagttccggagcaacgtgctcaggacggcggagctgacagactggctgctcgactcgccccagctctcgggagctaccgactcccaggatgacagcagcccagctgacatatttgctgtggggtttgaagagatggtggaattgagcgcagggaatattgtcaatgccagtactaccaacaagaagatgtggggtgaacagcttcagaaagccatctcacgctctcatagatacattctgttgacttcggcacagctggtgggcgtctgtctttatatctttgtacgtccataccatgtcccgttcatcagggacgtagccatcgacacagtgaagacgggcatggggggcaaggcggggaacaagggcgccgtcggcatccgcttccagttccacagcaccagcttctgcttcatatgtagtcacctgacggccgggcagtcccaggtgaaggagcggaatgaagactacaaggagatcacccagaaactctgcttcccaatggggagaaatgttttttctcatgattatgtattttggtgtggcgatttcaactaccgcattgatcttacttatgaagaagtcttctattttgttaaacgccaagactggaagaaacttctggaatttgatcaactacagctacagaaatcaagtggaaaaatttttaaggactttcacgaaggagccattaactttggacccacctacaagtatgacgttggctcagccgcctacgatacaagcgacaaatgccgcacccccgcctggacagacagggtgctgtggtggaggaagaaacatccctttgataaaacagctggagaactcaaccttctagacagtgatctagatgttgacaccaaagtcagacacacctggtctcctggtgccctgcagtattatggtcgtgcggagctacaagcgtctgatcacagacctgtgctggcgatcgtggaggtggaagttcaggaagtcgatgtgggtgctcgggagagggttttccaggaagtgtcctccttccagggccccctggatgccactgttgtagtaaaccttcaatcaccgaccttagaagagaaaaacgagtttccagaggacctgcgtactgagctcatgcagaccttggggagttatgggacaattgttcttgtcaggatcaaccaagggcagatgctggtaacttttgcagacagtcactcggctctcagtgtcctggacgtggacggtatgaaggtgaaaggcagagcagtgaagattagaccgaagaccaaggactggctgaaaggtttgcgagaggagatcattcggaaacgagacagcatggcccccgtgtctcccactgccaactcctgtttgctggaggaaaactttgacttcacaagtttggactatgagtcagaaggggatattcttgaagacgatgaagactacttggtggatgaattcaatcagcctggggtctcggacagtgaactcgggggagacgacctctctgatgtccccggccccacagcactggctcctcccagcaagtcacctgctctcaccaaaaagaagcagcatccaacgtacaaagatgacgcggacctggtggagctcaagcgggagctggaagccgtcggggagttccgccaccgttctccgagcaggtctctgtcggtccccaaccggcctcggccacctcaacccccgcagagacccccccctccaaccggtttaatggtgaaaaagtcggcttcagatgcgtccatctcctccggcacccatggacagtattcaattttgcagacggcaagacttctaccaggagcacctcagcaacctcccaaggctcggactggaataagtaaaccttataatgtcaagcagatcaaaaccaccaatgcccaggaggcagaagcagcaatccggtgtctcctggaagccagaggaggtgcctccgaagaagccctaagtgccgtggccccaagggaccttgaagcatcctctgaaccagagcccacaccgggggcagccaaaccagagaccccacaggcgcccccactccttccccgtcggcccccacccagagttcctgccatcaagaagccaaccttgagaaggacaggaaagcccctgtcaccggaagaacagtttgagcaacagactgtccattttacaatcgggcccccggagacaagcgttgaggcccctcctgtcgtgacagcccctcgagtccctcctgttcccaaaccaagaacatttcagcctgggaaagctgcagagaggccaagccacaggaagccagcatcagacgaagcccctcctggggcaggagcctctgtgccaccacctctggaggcgccgcctcttgtgcccaaggtacccccgaggaggaagaagtcagcccccgcagccttccacctgcaggtcctgcagagcaacagccagcttctccagggcctcacttacaatagcagtgacagcccctctgggcacccacctgccgcgggcaccgtcttcccacaaggggactttctcagcacttcatctgctacaagccccgacagcgatggcaccaaagcgatgaagccagaggcagccccacttcttggtgattatcaggaccccttctggaaccttcttcaccaccctaaactgttgaataacacttggctttctaagagctcagaccctttggactcaggaaccaggagccccaaaagagatcccatagacccagtgtcagctggcgcttcagctgccaaggcagagctgccaccagatcatgaacacaaaaccttaggtcactgggtgacaatcagtgaccaagaaaagaggacagcactgcaggtgtttgacccactggcaaaaacatgactgagcagctttgaaggctgcagtcctatagaatgcataccttcctccctctagacatccctccaccagaagagacatctatttaaaggcacactggccaaaacgtttgtgcatctgtcactctcgtgtagtttacaaaaatcgtgtctcttattcagtaagatggttactcagccaccaaaatatatttcactcaaggcttgtacatctgaagtttgctcttcaaggaatgggaaccttcctgttaaattcggtgtatggattttaagaaaggaatctagccaatgaggtccaagaagttctcacccattgaatttttaaatggctgttcagttcatgttgtacgtgatggagatttgtcttttgttttatttgcattttacagatttggtataacattttggggagccacctgaaggttgatgtataaagtaaggattagagaaagaggtcgttgtgaccattagtagctgtcctggcccacttaaacaaggttacaaaaaatcagagtcggaagcagccaaataggtcaacctaatgactagactgtacattcccatgagccttcatgtttaagtgtgtacatgtgcgttaaccttgatgatgcgtgaatcccgagggagccggtggcatacaccgttagcttaaccttagcttaaactagctgaaggctcctgtgccatgtcttagacattgcatgccctatcaattactataatcctgagccatggtgtgctactgaaaccaatttttatccaccatctagtccttattaaatgaaacctcacggatcctttgttccgcttatattccatgcataccacataaaagcacacagtgcgaaaactcttgctgatacgcgatattgattctcattgttagaatatggagagtgtttcagcctcgtctgtccggctggagcttcgggatggaaagtgctatgtgtccctgcatataagaatcaccaggccagtgtttctgggtttgcttgtctatatgtttgtctatattttttgcctatacatttttcccacgtttccaacagcacttctcacctattcaataactgaaaaagacattaccatagtgctttacatttttaaagtaatgttacaaggtctggaatccatttggagcagataccgtgttttcgctatttaataagaagttcagtagtgaaatcttactgtaccgcctgttgtatctgggagcctcgtacagaggctcgcacagcagtgatcaagtgtcatcccttacgtgactgggggatgtctgtcctaaaagctgactgctaggatagtaaggatcatcttgcctgggctatgccactgtcttgttaccaattagacatctggaatttcataattagttttcattgtcactgtcaagatatattgcagattacttaaatatggccatcaaaacaaaagttacaacacgtatctcttttcatctgaaaactaatacctggaaaaggataaaaaaaaaaagggaatccgtgacccacagagctagacagataagatgcatagttgaccagtcataaaaggcggtgtttaggtgatcaggatgccgttggtggcatttacgtgctttatatgatttttacctccgtaacaaacacaagaaataaacagaatggtccttaacagagtttgggggagagagcaagatgggttccttggagaagctgatttgccaagatgcacatcgctattaacagccagagtcataaatgaaatgaaattgaagaattcattcaaatgctcttttccctataacctcttttctcaccaaaaaggagataaatttgaaaacagataaatgtaacaaccagtcaaagaagcaggggaaaagtaagctcctccaaagttgcttgcagtgctggaaatagatctcatttttaggttttctcttcgttccagataccaaataaatgggacagagaataaaatttttgttaaaatatgtgctcatctcctaagtagctcttcagagtctgaccgtaagtaaaaacacacagaattgtgttgactgggggaggtgaatcacaaaaaagttacgaggagtttaagagttaaatattatttgatcgtggctgtcaaatttagtgaacaacatagattggatttggagttggtagtaggtatggttctcataccagaattctcttaaaaaaaaaaaaaaggacaattggaattgccttatttatttttaaaatcaatgcttactagttggtaggattcccaggtcagcagcagggttgattaaataatcttgacaatgagcagctgccatcttgggggatttcattctgtggttttttaaatgtttcgtctttgatgctaccatccagggcttcttattgtgaccttgtagcctattttgttcctgctgttctctaacatggtgcagttcacgcagactggtttaggtacttcacaactcaccattgtctctctgaccccaagcctagtcccttttacatcaccatcttctcagacttcttgcctattcttaaaatatgttttggttaatgattgaattaggacatcagcttaagcaattcctgtaacggtttaacgttgttgaagttcaaggcacataataaaattctccctgatgtgtgtgtaagtataaacaaagtaatgtatcaaagcgttcactttataatgaagtcatttcattgggaaggaaagctgcaaagattattgggggactagtgattaataaaatcctgtaatatttttgaagtgaaaatttgtactgaaattgtacatgatacctattaaatgtttttgtctttttttaaa

SEQ ID NO: 39606 - DNA, 656 bp, Homo sapiens
  misc_feature (3)..(3): n is a, c, g, or t
  misc_feature (6)..(6): n is a, c, g, or t
ggncgngcggggagctgtcgcgggcagcgcgccctcgggaggacgtggccccggcccccgcccgcagtgggcccgaccctcatggccctgagcaaagggctgcggctgctggggcgcctgggggccgagggggactgtagcgtgctgctggaggcgcgcggccgcgacgactgcctgctgttcgaggccggcacggtggccacgctggctccagaagaaaaggaagtcattaaaggacagtatggcaagctcacggacgcgtacggctgcctgggggagctgaggctgaaatctggtggcacgtctctgagcttcctggtgttggtgacaggctgcacatctgtgggcagaattccagatgctgaaatctacaaaatcactgccactgacttttaccctcttcaggaagaggccaaggaggaggaacgcctcatagctttgaagaaaatcctcagctcgggggtgttctatttctcatggccaaacgatgggtctcgctttgacctgactgtccgcacgcagaagcagggggatgacagctctgaatgggggaactccttcttctgaggcagccacaggttttcatctggccttggtgctttggattccccagaagtgaattcctgatttctgccggaagaaggggaccctcccca

SEQ ID NO: 39607 - DNA, 598 bp, Homo sapiens
ttcacgcctttattgtagaaatgccataagggaagccccgtggtgaccgtggttttaagccttttgtcgtcttcgtaaggagcataccctggtttatctctagaggctcatgaaccatctgtctctgccaggcagcctcatctgtctttttggaggatgcctgagctttggaactgcaaagaaatgcgcctttttatgcctcctgacagtgactcccaggatcctgaaagctatgactgagcgtcagtccgaattcacaaatttcaagcggatccggattgctatggggacctggaacgtgaacggaggaaagcagttccggagcaacgtgctcaggacggcggagctgacagactggctgctcgactcgccccagctctcgggagctaccgactcccagggtgagggcagtgactttgggggagacaaaatccaattgcacctaacctgacatgtcacgcttgaccctttagtggccatcgtcttgtggaatttcatctttggtgtcttccctcctcacaatgtctaaatagcaccatggcctgactctcaagaatgctgcctcgcaagtaactgacctttttcctttcccagatgt

SEQ ID NO: 39608 - DNA, 591 bp, Homo sapiens
acccccctcacggcctgcggtctgggctctcggcaggtggggaagctgaaggatggagcccggtccatgtctcgaaccatccagtccaacttcttcgacggggtgaagcaggaggccatcaagctgctgctggttggggacgtctacggcgaggaggtggcagacaaagggggcatgctgctggacagcacggcgctcctggtgactcccaggatcctgaaagctatgactgagcgtcagtccgaattcacaaatttcaagcggatccggattgctatggggacctggaacgtgaacggaggaaagcagttccggagcaacgtgctcaggacggcggagctgacagactggctgctcgactcgccccagctctcgggagctaccgactcccagggtgagggcagtgactttgggggagacaaaatccaattgcacctaacctgacatgtcacgcttgaccctttagtggccatcgtcttgtggaatttcatctttggtgtcttccctcctcacaatgtctaaatagcaccatggcctgactctcaagaatgctgcctcgcaagtaactgacctttttcctttcccagatgt

SEQ ID NO: 39609 - DNA, 684 bp, Homo sapiens
gcttcttatttacactctttgtcccaccttttctcagcccctgtcaccggaagaacagtttgagcaacagactgtccattttacaatcgggcccccggagacaagcgttgaggcccctcctgtcgtgacagcccctcgagtccctcctgttcccaaaccaagaacatttcagcctgggaaagctgcagagaggccaagccacaggaagccagcatcagacgaagcccctcctggggcaggagcctctgtgccaccacctctggaggcgccgcctcttgtgcccaaggtacccccgaggaggaagaagtcagcccccgcagccttccacctgcaggtcctgcagagcaacagccagcttctccagggcctcacttacaatagcagtgacagcccctctgggcacccacctgccgcgggcaccgtcttcccacaaggggactttctcagcacttcatctgctacaagccccgacagcgatggcaccaaagcgatgaagccagaggcagccccacttcttggtgattatcaggaccccttctggaaccttcttcaccaccctaaactgttgaataacacttggctttctaagagctcagaccctttggactcaggaaccaggagccccgagatccttggacccagtgtagttgcgctttacttgccgcttgccacagatcttgcccc

SEQ ID NO: 39610 - DNA, 610 bp, Homo sapiens
  misc_feature (3)..(3): n is a, c, g, or t
  misc_feature (6)..(6): n is a, c, g, or t
ggncgngcggggagctgtcgcgggcagcgcgccctcgggaggacgtggccccggcccccgcccgcagtgggcccgaccctcatggccctgagcaaagggctgcggctgctggggcgcctgggggccgagggggactgtagcgtgctgctggaggcgcgcggccgcgacgactgcctgctgttcgaggccggcacggtggccacgctgggtgagtccgggccgggggcagcgacgcccggaggagagggcgcccgcattcgcccagcctcgggaagacgggtacccccccttcccgaggggatcgggcggcgctgggactgccggggcgtaggggtcgcgcgcagaggggtggctgtttgaatgaagtggggctggggactcgagagagcactctggctgggccggtggcgcacggaggccggccgcccctccacggggatctccggcccgcgccgccagaggatatggttgctggatagccggctggggcgctttgcgtattcatgaggatcccggggtgttgacttagccggcctgaccctgtgcctggcgccttttcttttgcacctgttgatgaaaccagtgattgccctttggtttgtgttggcgg

SEQ ID NO: 39611 - DNA, 7385 bp, Homo sapiens
  misc_feature (3)..(3): n is a, c, g, or t
  misc_feature (6)..(6): n is a, c, g, or t
ggncgngcggggagctgtcgcgggcagcgcgccctcgggaggacgtggccccggcccccgcccgcagtgggcccgaccctcatggccctgagcaaagggctgcggctgctggggcgcctgggggccgagggggactgtagcgtgctgctggaggcgcgcggccgcgacgactgcctgctgttcgaggccggcacggtggccacgctggctccagaagaaaaggaagtcattaaaggacagtatggcaagctcacggacgcgtacggctgcctgggggagctgaggctgaaatctggtggcacgtctctgagcttcctggtgttggtgacaggctgcacatctgtgggcagaattccagatgctgaaatctacaaaatcactgccactgacttttaccctcttcaggaagaggccaaggaggaggaacgcctcatagctttgaagaaaatcctcagctcgggggtgttctatttctcatggccaaacgatgggtctcgctttgacctgactgtccgcacgcagaagcagggggatgacagctctgaatgggggaactccttcttctggaaccagctgttgcacgtgcccttgaggcagcaccaggtgagctgctgtgactggctgctgaagatcatctgcggggtggtcaccatccgcaccgtgtatgcctcccacaagcaggccaaggcctgcctcgtctctcgcgttagctgtgagcgcacaggcactcgcttccacacccgtggcgtgaacgacgacggccatgtgtccaacttcgtggagacagagcagatgatttacatggacgatggagtgtcatcttttgtccagatcagaggctccgttccgctgttctgggaacagccagggcttcaggttggctcccatcatctgagactccacagaggcctggaagccaatgcccctgctttcgacaggcacatggtgcttctgaaggagcagtacgggcagcaggtggtcgtgaaccttctgggaagcagaggcggagaggaggtgctcaacagagccttcaagaagctgctctgggcttcttgccacgcgggcgacacgcctatgatcaattttgacttccatcagtttgccaaaggtgggaagctagagaaattggagaccctcttgaggccacagttaaagctgcactgggaagacttcgatgtgttcacaaagggggagaacgtcagtccacgttttcagaaaggcactttgcggatgaactgtcttgactgcctggaccgaaccaacactgtgcagagcttcatcgcgctcgaggtcctgcatctgcagctcaagaccctggggctgagttcaaaacccatcgttgaccgctttgtggagtccttcaaagccatgtggtctctgaatggccacagcctgagcaaggtgttcacaggcagcagagccctggaagggaaggccaaggtggggaagctgaaggatggagcccggtccatgtctcgaaccatccagtccaacttcttcgacggggtgaagcaggaggccatcaagctgctgctggttggggacgtctacggcgaggaggtggcagacaaagggggcatgctgctggacagcacggcgctcctggtgactcccaggatcctgaaagctatgactgagcgtcagtccgaattcacaaatttcaagcggatccggattgctatggggacctggaacgtgaacggaggaaagcagttccggagcaacgtgctcaggacggcggagctgacagactggctgctcgactcgccccagctctcgggagctaccgactcccaggatgacagcagcccagctgacatatttgctgtggggtttgaagagatggtggaattgagcgcagggaatattgtcaatgccagtactaccaacaagaagatgtggggtgaacagcttcagaaagccatctcacgctctcatagatacattctgttgacttcggcacagctggtgggcgtctgtctttatatctttgtacgtccataccatgtcccgttcatcagggacgtagccatcgacacagtgaagacgggcatggggggcaaggcggggaacaagggcgccgtcggcatccgcttccagttccacagcaccagcttctgcttcatatgtagtcacctgacggccgggcagtcccaggtgaaggagcggaatgaagactacaaggagatcacccagaaactctgcttcccaatggggagaaatgttttttctcatgattatgtattttggtgtggcgatttcaactaccgcattgatcttacttatgaagaagtcttctattttgttaaacgccaagactggaagaaacttctggaatttgatcaactacagctacagaaatcaagtggaaaaatttttaaggactttcacgaaggagccattaactttggacccacctacaagtatgacgttggctcagccgcctacgatacaagcgacaaatgccgcacccccgcctggacagacagggtgctgtggtggaggaagaaacatccctttgataaaacagctggagaactcaaccttctagacagtgatctagatgttgacaccaaagtcagacacacctggtctcctggtgccctgcagtattatggtcgtgcggagctacaagcgtctgatcacagacctgtgctggcgatcgtggaggtggaagttcaggaagtcgatgtgggtgctcgggagagggttttccaggaagtgtcctccttccagggccccctggatgccactgttgtagtaaaccttcaatcaccgaccttagaagagaaaaacgagtttccagaggacctgcgtactgagctcatgcagaccttggggagttatgggacaattgttcttgtcaggatcaaccaagggcagatgctggtaacttttgcagacagtcactcggctctcagtgtcctggacgtggacggtatgaaggtgaaaggcagagcagtgaagattagaccgaagaccaaggactggctgaaaggtttgcgagaggagatcattcggaaacgagacagcatggcccccgtgtctcccactgccaactcctgtttgctggaggaaaactttgacttcacaagtttggactatgagtcagaaggggatattcttgaagacgatgaagactacttggtggatgaattcaatcagcctggggtctcggacagtgaactcgggggagacgacctctctgatgtccccggccccacagcactggctcctcccagcaagtcacctgctctcaccaaaaagaagcagcatccaacgtacaaagatgacgcggacctggtggagctcaagcgggagctggaagccgtcggggagttccgccaccgttctccgagcaggtctctgtcggtccccaaccggcctcggccacctcaacccccgcagagacccccccctccaaccggtttaatggtgaaaaagtcggcttcagatgcgtccatctcctccggcacccatggacagtattcaattttgcagacggcaagacttctaccaggagcacctcagcaacctcccaaggctcggactggaataagtaaaccttataatgtcaagcagatcaaaaccaccaatgcccaggaggcagaagcagcaatccggtgtctcctggaagccagaggaggtgcctccgaagaagccctaagtgccgtggccccaagggaccttgaagcatcctctgaaccagagcccacaccgggggcagccaaaccagagaccccacaggcgcccccactccttccccgtcggcccccacccagagttcctgccatcaagaagccaaccttgagaaggacaggaaagcccctgtcaccggaagaacagtttgagcaacagactgtccattttacaatcgggcccccggagacaagcgttgaggcccctcctgtcgtgacagcccctcgagtccctcctgttcccaaaccaagaacatttcagcctgggaaagctgcagagaggccaagccacaggaagccagcatcagacgaagcccctcctggggcaggagcctctgtgccaccacctctggaggcgccgcctcttgtgcccaaggtacccccgaggaggaagaagtcagcccccgcagccttccacctgcaggtcctgcagagcaacagccagcttctccagggcctcacttacaatagcagtgacagcccctctgggcacccacctgccgcgggcaccgtcttcccacaaggggactttctcagcacttcatctgctacaagccccgacagcgatggcaccaaagcgatgaagccagaggcagccccacttcttggtgattatcaggaccccttctggaaccttcttcaccaccctaaactgttgaataacacttggctttctaagagctcagaccctttggactcaggaaccaggagccccaaaagagatcccatagacccagtgtcagctggcgcttcagctgccaaggcagagctgccaccagatcatgaacacaaaaccttaggtcactgggtgacaatcagtgaccaagaaaagaggacagcactgcaggtgtttgacccactggcaaaaacatgactgagcagctttgaaggctgcagtcctatagaatgcataccttcctccctctagacatccctccaccagaagagacatctatttaaaggcacactggccaaaacgtttgtgcatctgtcactctcgtgtagtttacaaaaatcgtgtctcttattcagtaagatggttactcagccaccaaaatatatttcactcaaggcttgtacatctgaagtttgctcttcaaggaatgggaaccttcctgttaaattcggtgtatggattttaagaaaggaatctagccaatgaggtccaagaagttctcacccattgaatttttaaatggctgttcagttcatgttgtacgtgatggagatttgtcttttgttttatttgcattttacagatttggtataacattttggggagccacctgaaggttgatgtataaagtaaggattagagaaagaggtcgttgtgaccattagtagctgtcctggcccacttaaacaaggttacaaaaaatcagagtcggaagcagccaaataggtcaacctaatgactagactgtacattcccatgagccttcatgtttaagtgtgtacatgtgcgttaaccttgatgatgcgtgaatcccgagggagccggtggcatacaccgttagcttaaccttagcttaaactagctgaaggctcctgtgccatgtcttagacattgcatgccctatcaattactataatcctgagccatggtgtgctactgaaaccaatttttatccaccatctagtccttattaaatgaaacctcacggatcctttgttccgcttatattccatgcataccacataaaagcacacagtgcgaaaactcttgctgatacgcgatattgattctcattgttagaatatggagagtgtttcagcctcgtctgtccggctggagcttcgggatggaaagtgctatgtgtccctgcatataagaatcaccaggccagtgtttctgggtttgcttgtctatatgtttgtctatattttttgcctatacatttttcccacgtttccaacagcacttctcacctattcaataactgaaaaagacattaccatagtgctttacatttttaaagtaatgttacaaggtctggaatccatttggagcagataccgtgttttcgctatttaataagaagttcagtagtgaaatcttactgtaccgcctgttgtatctgggagcctcgtacagaggctcgcacagcagtgatcaagtgtcatcccttacgtgactgggggatgtctgtcctaaaagctgactgctaggatagtaaggatcatcttgcctgggctatgccactgtcttgttaccaattagacatctggaatttcataattagttttcattgtcactgtcaagatatattgcagattacttaaatatggccatcaaaacaaaagttacaacacgtatctcttttcatctgaaaactaatacctggaaaaggataaaaaaaaaaagggaatccgtgacccacagagctagacagataagatgcatagttgaccagtcataaaaggcggtgtttaggtgatcaggatgccgttggtggcatttacgtgctttatatgatttttacctccgtaacaaacacaagaaataaacagaatggtccttaacagagtttgggggagagagcaagatgggttccttggagaagctgatttgccaagatgcacatcgctattaacagccagagtcataaatgaaatgaaattgaagaattcattcaaatgctcttttccctataacctcttttctcaccaaaaaggagataaatttgaaaacagataaatgtaacaaccagtcaaagaagcaggggaaaagtaagctcctccaaagttgcttgcagtgctggaaatagatctcatttttaggttttctcttcgttccagataccaaataaatgggacagagaataaaatttttgttaaaatatgtgctcatctcctaagtagctcttcagagtctgaccgtaagtaaaaacacacagaattgtgttgactgggggaggtgaatcacaaaaaagttacgaggagtttaagagttaaatattatttgatcgtggctgtcaaatttagtgaacaacatagattggatttggagttggtagtaggtatggttctcataccagaattctcttaaaaaaaaaaaaaaggacaattggaattgccttatttatttttaaaatcaatgcttactagttggtaggattcccaggtcagcagcagggttgattaaataatcttgacaatgagcagctgccatcttgggggatttcattctgtggttttttaaatgtttcgtctttgatgctaccatccagggcttcttattgtgaccttgtagcctattttgttcctgctgttctctaacatggtgcagttcacgcagactggtttaggtacttcacaactcaccattgtctctctgaccccaagcctagtcccttttacatcaccatcttctcagacttcttgcctattcttaaaatatgttttggttaatgattgaattaggacatcagcttaagcaattcctgtaacggtttaacgttgttgaagttcaaggcacataataaaattctccctgatgtgtgtgtaagtataaacaaagtaatgtatcaaagcgttcactttataatgaagtcatttcattgggaaggaaagctgcaaagattattgggggactagtgattaataaaatcctgtaatatttttgaagtgaaaatttgtactgaaattgtacatgatacctattaaatgtttttgtctttttttaaa

SEQ ID NO: 39612 - DNA, 7246 bp, Homo sapiens
cgggtgtgaatgaacaggaatgagcaggagacgctcgctgatgccttctgtgatgtgtttcttccccagctccagaagaaaaggaagtcattaaaggacagtatggcaagctcacggacgcgtacggctgcctgggggagctgaggctgaaatctggtggcacgtctctgagcttcctggtgttggtgacaggctgcacatctgtgggcagaattccagatgctgaaatctacaaaatcactgccactgacttttaccctcttcaggaagaggccaaggaggaggaacgcctcatagctttgaagaaaatcctcagctcgggggtgttctatttctcatggccaaacgatgggtctcgctttgacctgactgtccgcacgcagaagcagggggatgacagctctgaatgggggaactccttcttctggaaccagctgttgcacgtgcccttgaggcagcaccaggtgagctgctgtgactggctgctgaagatcatctgcggggtggtcaccatccgcaccgtgtatgcctcccacaagcaggccaaggcctgcctcgtctctcgcgttagctgtgagcgcacaggcactcgcttccacacccgtggcgtgaacgacgacggccatgtgtccaacttcgtggagacagagcagatgatttacatggacgatggagtgtcatcttttgtccagatcagaggctccgttccgctgttctgggaacagccagggcttcaggttggctcccatcatctgagactccacagaggcctggaagccaatgcccctgctttcgacaggcacatggtgcttctgaaggagcagtacgggcagcaggtggtcgtgaaccttctgggaagcagaggcggagaggaggtgctcaacagagccttcaagaagctgctctgggcttcttgccacgcgggcgacacgcctatgatcaattttgacttccatcagtttgccaaaggtgggaagctagagaaattggagaccctcttgaggccacagttaaagctgcactgggaagacttcgatgtgttcacaaagggggagaacgtcagtccacgttttcagaaaggcactttgcggatgaactgtcttgactgcctggaccgaaccaacactgtgcagagcttcatcgcgctcgaggtcctgcatctgcagctcaagaccctggggctgagttcaaaacccatcgttgaccgctttgtggagtccttcaaagccatgtggtctctgaatggccacagcctgagcaaggtgttcacaggcagcagagccctggaagggaaggccaaggtggggaagctgaaggatggagcccggtccatgtctcgaaccatccagtccaacttcttcgacggggtgaagcaggaggccatcaagctgctgctggttggggacgtctacggcgaggaggtggcagacaaagggggcatgctgctggacagcacggcgctcctggtgactcccaggatcctgaaagctatgactgagcgtcagtccgaattcacaaatttcaagcggatccggattgctatggggacctggaacgtgaacggaggaaagcagttccggagcaacgtgctcaggacggcggagctgacagactggctgctcgactcgccccagctctcgggagctaccgactcccaggatgacagcagcccagctgacatatttgctgtggggtttgaagagatggtggaattgagcgcagggaatattgtcaatgccagtactaccaacaagaagatgtggggtgaacagcttcagaaagccatctcacgctctcatagatacattctgttgacttcggcacagctggtgggcgtctgtctttatatctttgtacgtccataccatgtcccgttcatcagggacgtagccatcgacacagtgaagacgggcatggggggcaaggcggggaacaagggcgccgtcggcatccgcttccagttccacagcaccagcttctgcttcatatgtagtcacctgacggccgggcagtcccaggtgaaggagcggaatgaagactacaaggagatcacccagaaactctgcttcccaatggggagaaatgttttttctcatgattatgtattttggtgtggcgatttcaactaccgcattgatcttacttatgaagaagtcttctattttgttaaacgccaagactggaagaaacttctggaatttgatcaactacagctacagaaatcaagtggaaaaatttttaaggactttcacgaaggagccattaactttggacccacctacaagtatgacgttggctcagccgcctacgatacaagcgacaaatgccgcacccccgcctggacagacagggtgctgtggtggaggaagaaacatccctttgataaaacagctggagaactcaaccttctagacagtgatctagatgttgacaccaaagtcagacacacctggtctcctggtgccctgcagtattatggtcgtgcggagctacaagcgtctgatcacagacctgtgctggcgatcgtggaggtggaagttcaggaagtcgatgtgggtgctcgggagagggttttccaggaagtgtcctccttccagggccccctggatgccactgttgtagtaaaccttcaatcaccgaccttagaagagaaaaacgagtttccagaggacctgcgtactgagctcatgcagaccttggggagttatgggacaattgttcttgtcaggatcaaccaagggcagatgctggtaacttttgcagacagtcactcggctctcagtgtcctggacgtggacggtatgaaggtgaaaggcagagcagtgaagattagaccgaagaccaaggactggctgaaaggtttgcgagaggagatcattcggaaacgagacagcatggcccccgtgtctcccactgccaactcctgtttgctggaggaaaactttgacttcacaagtttggactatgagtcagaaggggatattcttgaagacgatgaagactacttggtggatgaattcaatcagcctggggtctcggacagtgaactcgggggagacgacctctctgatgtccccggccccacagcactggctcctcccagcaagtcacctgctctcaccaaaaagaagcagcatccaacgtacaaagatgacgcggacctggtggagctcaagcgggagctggaagccgtcggggagttccgccaccgttctccgagcaggtctctgtcggtccccaaccggcctcggccacctcaacccccgcagagacccccccctccaaccggtttaatggtgaaaaagtcggcttcagatgcgtccatctcctccggcacccatggacagtattcaattttgcagacggcaagacttctaccaggagcacctcagcaacctcccaaggctcggactggaataagtaaaccttataatgtcaagcagatcaaaaccaccaatgcccaggaggcagaagcagcaatccggtgtctcctggaagccagaggaggtgcctccgaagaagccctaagtgccgtggccccaagggaccttgaagcatcctctgaaccagagcccacaccgggggcagccaaaccagagaccccacaggcgcccccactccttccccgtcggcccccacccagagttcctgccatcaagaagccaaccttgagaaggacaggaaagcccctgtcaccggaagaacagtttgagcaacagactgtccattttacaatcgggcccccggagacaagcgttgaggcccctcctgtcgtgacagcccctcgagtccctcctgttcccaaaccaagaacatttcagcctgggaaagctgcagagaggccaagccacaggaagccagcatcagacgaagcccctcctggggcaggagcctctgtgccaccacctctggaggcgccgcctcttgtgcccaaggtacccccgaggaggaagaagtcagcccccgcagccttccacctgcaggtcctgcagagcaacagccagcttctccagggcctcacttacaatagcagtgacagcccctctgggcacccacctgccgcgggcaccgtcttcccacaaggggactttctcagcacttcatctgctacaagccccgacagcgatggcaccaaagcgatgaagccagaggcagccccacttcttggtgattatcaggaccccttctggaaccttcttcaccaccctaaactgttgaataacacttggctttctaagagctcagaccctttggactcaggaaccaggagccccaaaagagatcccatagacccagtgtcagctggcgcttcagctgccaaggcagagctgccaccagatcatgaacacaaaaccttaggtcactgggtgacaatcagtgaccaagaaaagaggacagcactgcaggtgtttgacccactggcaaaaacatgactgagcagctttgaaggctgcagtcctatagaatgcataccttcctccctctagacatccctccaccagaagagacatctatttaaaggcacactggccaaaacgtttgtgcatctgtcactctcgtgtagtttacaaaaatcgtgtctcttattcagtaagatggttactcagccaccaaaatatatttcactcaaggcttgtacatctgaagtttgctcttcaaggaatgggaaccttcctgttaaattcggtgtatggattttaagaaaggaatctagccaatgaggtccaagaagttctcacccattgaatttttaaatggctgttcagttcatgttgtacgtgatggagatttgtcttttgttttatttgcattttacagatttggtataacattttggggagccacctgaaggttgatgtataaagtaaggattagagaaagaggtcgttgtgaccattagtagctgtcctggcccacttaaacaaggttacaaaaaatcagagtcggaagcagccaaataggtcaacctaatgactagactgtacattcccatgagccttcatgtttaagtgtgtacatgtgcgttaaccttgatgatgcgtgaatcccgagggagccggtggcatacaccgttagcttaaccttagcttaaactagctgaaggctcctgtgccatgtcttagacattgcatgccctatcaattactataatcctgagccatggtgtgctactgaaaccaatttttatccaccatctagtccttattaaatgaaacctcacggatcctttgttccgcttatattccatgcataccacataaaagcacacagtgcgaaaactcttgctgatacgcgatattgattctcattgttagaatatggagagtgtttcagcctcgtctgtccggctggagcttcgggatggaaagtgctatgtgtccctgcatataagaatcaccaggccagtgtttctgggtttgcttgtctatatgtttgtctatattttttgcctatacatttttcccacgtttccaacagcacttctcacctattcaataactgaaaaagacattaccatagtgctttacatttttaaagtaatgttacaaggtctggaatccatttggagcagataccgtgttttcgctatttaataagaagttcagtagtgaaatcttactgtaccgcctgttgtatctgggagcctcgtacagaggctcgcacagcagtgatcaagtgtcatcccttacgtgactgggggatgtctgtcctaaaagctgactgctaggatagtaaggatcatcttgcctgggctatgccactgtcttgttaccaattagacatctggaatttcataattagttttcattgtcactgtcaagatatattgcagattacttaaatatggccatcaaaacaaaagttacaacacgtatctcttttcatctgaaaactaatacctggaaaaggataaaaaaaaaaagggaatccgtgacccacagagctagacagataagatgcatagttgaccagtcataaaaggcggtgtttaggtgatcaggatgccgttggtggcatttacgtgctttatatgatttttacctccgtaacaaacacaagaaataaacagaatggtccttaacagagtttgggggagagagcaagatgggttccttggagaagctgatttgccaagatgcacatcgctattaacagccagagtcataaatgaaatgaaattgaagaattcattcaaatgctcttttccctataacctcttttctcaccaaaaaggagataaatttgaaaacagataaatgtaacaaccagtcaaagaagcaggggaaaagtaagctcctccaaagttgcttgcagtgctggaaatagatctcatttttaggttttctcttcgttccagataccaaataaatgggacagagaataaaatttttgttaaaatatgtgctcatctcctaagtagctcttcagagtctgaccgtaagtaaaaacacacagaattgtgttgactgggggaggtgaatcacaaaaaagttacgaggagtttaagagttaaatattatttgatcgtggctgtcaaatttagtgaacaacatagattggatttggagttggtagtaggtatggttctcataccagaattctcttaaaaaaaaaaaaaaggacaattggaattgccttatttatttttaaaatcaatgcttactagttggtaggattcccaggtcagcagcagggttgattaaataatcttgacaatgagcagctgccatcttgggggatttcattctgtggttttttaaatgtttcgtctttgatgctaccatccagggcttcttattgtgaccttgtagcctattttgttcctgctgttctctaacatggtgcagttcacgcagactggtttaggtacttcacaactcaccattgtctctctgaccccaagcctagtcccttttacatcaccatcttctcagacttcttgcctattcttaaaatatgttttggttaatgattgaattaggacatcagcttaagcaattcctgtaacggtttaacgttgttgaagttcaaggcacataataaaattctccctgatgtgtgtgtaagtataaacaaagtaatgtatcaaagcgttcactttataatgaagtcatttcattgggaaggaaagctgcaaagattattgggggactagtgattaataaaatcctgtaatatttttgaagtgaaaatttgtactgaaattgtacatgatacctattaaatgtttttgtctttttttaaa

SEQ ID NO: 39613 - DNA, 7389 bp, Homo sapiens
  misc_feature (3)..(3): n is a, c, g, or t
  misc_feature (6)..(6): n is a, c, g, or t
ggncgngcggggagctgtcgcgggcagcgcgccctcgggaggacgtggccccggcccccgcccgcagtgggcccgaccctcatggccctgagcaaagggctgcggctgctggggcgcctgggggccgagggggactgtagcgtgctgctggaggcgcgcggccgcgacgactgcctgctgttcgaggccggcacggtggccacgctggctccagaagaaaaggaagtcattaaaggacagtatggcaagctcacggacgcgtacggctgcctgggggagctgaggctgaaatctggtggcacgtctctgagcttcctggtgttggtgacaggctgcacatctgtgggcagaattccagatgctgaaatctacaaaatcactgccactgacttttaccctcttcaggaagaggccaaggaggaggaacgcctcatagctttgaagaaaatcctcagctcgggggtgttctatttctcatggccaaacgatgggtctcgctttgacctgactgtccgcacgcagaagcagggggatgacagctctgaatgggggaactccttcttctggaaccagctgttgcacgtgcccttgaggcagcaccaggtgagctgctgtgactggctgctgaagatcatctgcggggtggtcaccatccgcaccgtgtatgcctcccacaagcaggccaaggcctgcctcgtctctcgcgttagctgtgagcgcacaggcactcgcttccacacccgtggcgtgaacgacgacggccatgtgtccaacttcgtggagacagagcagatgatttacatggacgatggagtgtcatcttttgtccagatcagaggctccgttccgctgttctgggaacagccagggcttcaggttggctcccatcatctgagactccacagaggcctggaagccaatgcccctgctttcgacaggcacatggtgcttctgaaggagcagtacgggcagcaggtggtcgtgaaccttctgggaagcagaggcggagaggaggtgctcaacagagccttcaagaagctgctctgggcttcttgccacgcgggcgacacgcctatgatcaattttgacttccatcagtttgccaaaggtgggaagctagagaaattggagaccctcttgaggccacagttaaagctgcactgggaagacttcgatgtgttcacaaagggggagaacgtcagtccacggtgaggctcgctgcgcactgtgccgcgtcttctgctggggggaagcgtcagtccacgttttcagaaaggcactttgcggatgaactgtcttgactgcctggaccgaaccaacactgtgcagagcttcatcgcgctcgaggtcctgcatctgcagctcaagaccctggggctgagttcaaaacccatcgttgaccgctttgtggagtccttcaaagccatgtggtctctgaatggccacagcctgagcaaggtgttcacaggcagcagagccctggaagggaaggccaaggtggggaagctgaaggatggagcccggtccatgtctcgaaccatccagtccaacttcttcgacggggtgaagcaggaggccatcaagctgctgctggttggggacgtctacggcgaggaggtggcagacaaagggggcatgctgctggacagcacggcgctcctggtgactcccaggatcctgaaagctatgactgagcgtcagtccgaattcacaaatttcaagcggatccggattgctatggggacctggaacgtgaacggaggaaagcagttccggagcaacgtgctcaggacggcggagctgacagactggctgctcgactcgccccagctctcgggagctaccgactcccaggatgacagcagcccagctgacatatttgctgtggggtttgaagagatggtggaattgagcgcagggaatattgtcaatgccagtactaccaacaagaagatgtggggtgaacagcttcagaaagccatctcacgctctcatagatacattctgttgacttcggcacagctggtgggcgtctgtctttatatctttgtacgtccataccatgtcccgttcatcagggacgtagccatcgacacagtgaagacgggcatggggggcaaggcggggaacaagggcgccgtcggcatccgcttccagttccacagcaccagcttctgcttcatatgtagtcacctgacggccgggcagtcccaggtgaaggagcggaatgaagactacaaggagatcacccagaaactctgcttcccaatggggagaaatgttttttctcatgattatgtattttggtgtggcgatttcaactaccgcattgatcttacttatgaagaagtcttctattttgttaaacgccaagactggaagaaacttctggaatttgatcaactacagctacagaaatcaagtggaaaaatttttaaggactttcacgaaggagccattaactttggacccacctacaagtatgacgttggctcagccgcctacgatacaagcgacaaatgccgcacccccgcctggacagacagggtgctgtggtggaggaagaaacatccctttgataaaacagctggagaactcaaccttctagacagtgatctagatgttgacaccaaagtcagacacacctggtctcctggtgccctgcagtattatggtcgtgcggagctacaagcgtctgatcacagacctgtgctggcgatcgtggaggtggaagttcaggaagtcgatgtgggtgctcgggagagggttttccaggaagtgtcctccttccagggccccctggatgccactgttgtagtaaaccttcaatcaccgaccttagaagagaaaaacgagtttccagaggacctgcgtactgagctcatgcagaccttggggagttatgggacaattgttcttgtcaggatcaaccaagggcagatgctggtaacttttgcagacagtcactcggctctcagtgtcctggacgtggacggtatgaaggtgaaaggcagagcagtgaagattagaccgaagaccaaggactggctgaaaggtttgcgagaggagatcattcggaaacgagacagcatggcccccgtgtctcccactgccaactcctgtttgctggaggaaaactttgacttcacaagtttggactatgagtcagaaggggatattcttgaagacgatgaagactacttggtggatgaattcaatcagcctggggtctcggacagtgaactcgggggagacgacctctctgatgtccccggccccacagcactggctcctcccagcaagtcacctgctctcaccaaaaagaagcagcatccaacgtacaaagatgacgcggacctggtggagctcaagcgggagctggaagccgtcggggagttccgccaccgttctccgagcaggtctctgtcggtccccaaccggcctcggccacctcaacccccgcagagacccccccctccaaccggtttaatggtgaaaaagtcggcttcagatgcgtccatctcctccggcacccatggacagtattcaattttgcagacggcaagacttctaccaggagcacctcagcaacctcccaaggctcggactggaataagtaaaccttataatgtcaagcagatcaaaaccaccaatgcccaggaggcagaagcagcaatccggtgtctcctggaagccagaggaggtgcctccgaagaagccctaagtgccgtggccccaagggaccttgaagcatcctctgaaccagagcccacaccgggggcagccaaaccagagaccccacaggcgcccccactccttccccgtcggcccccacccagagttcctgccatcaagaagccaaccttgagaaggacaggaaagcccctgtcaccggaagaacagtttgagcaacagactgtccattttacaatcgggcccccggagacaagcgttgaggcccctcctgtcgtgacagcccctcgagtccctcctgttcccaaaccaagaacatttcagcctgggaaagctgcagagaggccaagccacaggaagccagcatcagacgaagcccctcctggggcaggagcctctgtgccaccacctctggaggcgccgcctcttgtgcccaaggtacccccgaggaggaagaagtcagcccccgcagccttccacctgcaggtcctgcagagcaacagccagcttctccagggcctcacttacaatagcagtgacagcccctctgggcacccacctgccgcgggcaccgtcttcccacaaggggactttctcagcacttcatctgctacaagccccgacagcgatggcaccaaagcgatgaagccagaggcagccccacttcttggtgattatcaggaccccttctggaaccttcttcaccaccctaaactgttgaataacacttggctttctaagagctcagaccctttggactcaggaaccaggagccccaaaagagatcccatagacccagtgtcagctggcgcttcagctgccaaggcagagctgccaccagatcatgaacacaaaaccttaggtcactgggtgacaatcagtgaccaagaaaagaggacagcactgcaggtgtttgacccactggcaaaaacatgactgagcagctttgaaggctgcagtcctatagaatgcataccttcctccctctagacatccctccaccagaagagacatctatttaaaggcacactggccaaaacgtttgtgcatctgtcactctcgtgtagtttacaaaaatcgtgtctcttattcagtaagatggttactcagccaccaaaatatatttcactcaaggcttgtacatctgaagtttgctcttcaaggaatgggaaccttcctgttaaattcggtgtatggattttaagaaaggaatctagccaatgaggtccaagaagttctcacccattgaatttttaaatggctgttcagttcatgttgtacgtgatggagatttgtcttttgttttatttgcattttacagatttggtataacattttggggagccacctgaaggttgatgtataaagtaaggattagagaaagaggtcgttgtgaccattagtagctgtcctggcccacttaaacaaggttacaattcccatgagccttcatgtttaagtgtgtacatgtgcgttaaccttgatgatgcgtgaatcccgagggagccggtggcatacaccgttagcttaaccttagcttaaactagctgaaggctcctgtgccatgtcttagacattgcatgccctatcaattactataatcctgagccatggtgtgctactgaaaccaatttttatccaccatctagtccttattaaatgaaacctcacggatcctttgttccgcttatattccatgcataccacataaaagcacacagtgcgaaaactcttgctgatacgcgatattgattctcattgttagaatatggagagtgtttcagcctcgtctgtccggctggagcttcgggatggaaagtgctatgtgtccctgcatataagaatcaccaggccagtgtttctgggtttgcttgtctatatgtttgtctatattttttgcctatacatttttcccacgtttccaacagcacttctcacctattcaataactgaaaaagacattaccatagtgctttacatttttaaagtaatgttacaaggtctggaatccatttggagcagataccgtgttttcgctatttaataagaagttcagtagtgaaatcttactgtaccgcctgttgtatctgggagcctcgtacagaggctcgcacagcagtgatcaagtgtcatcccttacgtgactgggggatgtctgtcctaaaagctgactgctaggatagtaaggatcatcttgcctgggctatgccactgtcttgttaccaattagacatctggaatttcataattagttttcattgtcactgtcaagatatattgcagattacttaaatatggccatcaaaacaaaagttacaacacgtatctcttttcatctgaaaactaatacctggaaaaggataaaaaaaaaaagggaatccgtgacccacagagctagacagataagatgcatagttgaccagtcataaaaggcggtgtttaggtgatcaggatgccgttggtggcatttacgtgctttatatgatttttacctccgtaacaaacacaagaaataaacagaatggtccttaacagagtttgggggagagagcaagatgggttccttggagaagctgatttgccaagatgcacatcgctattaacagccagagtcataaatgaaatgaaattgaagaattcattcaaatgctcttttccctataacctcttttctcaccaaaaaggagataaatttgaaaacagataaatgtaacaaccagtcaaagaagcaggggaaaagtaagctcctccaaagttgcttgcagtgctggaaatagatctcatttttaggttttctcttcgttccagataccaaataaatgggacagagaataaaatttttgttaaaatatgtgctcatctcctaagtagctcttcagagtctgaccgtaagtaaaaacacacagaattgtgttgactgggggaggtgaatcacaaaaaagttacgaggagtttaagagttaaatattatttgatcgtggctgtcaaatttagtgaacaacatagattggatttggagttggtagtaggtatggttctcataccagaattctcttaaaaaaaaaaaaaaggacaattggaattgccttatttatttttaaaatcaatgcttactagttggtaggattcccaggtcagcagcagggttgattaaataatcttgacaatgagcagctgccatcttgggggatttcattctgtggttttttaaatgtttcgtctttgatgctaccatccagggcttcttattgtgaccttgtagcctattttgttcctgctgttctctaacatggtgcagttcacgcagactggtttaggtacttcacaactcaccattgtctctctgaccccaagcctagtcccttttacatcaccatcttctcagacttcttgcctattcttaaaatatgttttggttaatgattgaattaggacatcagcttaagcaattcctgtaacggtttaacgttgttgaagttcaaggcacataataaaattctccctgatgtgtgtgtaagtataaacaaagtaatgtatcaaagcgttcactttataatgaagtcatttcattgggaaggaaagctgcaaagattattgggggactagtgattaataaaatcctgtaatatttttgaagtgaaaatttgtactgaaattgtacatgatacctattaaatgtttttgtctttttttaaa

SEQ ID NO: 39614 - DNA, 5746 bp, Homo sapiens
agcatcagaaagggggcgagcttaggggcggcattcctcttggggtgtgggtgtgggtgtttggatgctggaggaactcatcttttccccagcttgtggttggcctcatcttaccacctgggcctacccatggcttttgaatttccaccagcctttcggcgagctggcagcaggcgttgaactgacctccccactgagcccctgggtcccgggaagggcctgtgcctgccaagagcaccacgggtacacccctgcagcacctggagactaagactatgctgcccataatcctcttctctgactttcagaagatgtttaggtccctgtccctctgcttgtgttatttgggcagcttggcagtgtcctaggttagcaggtgaagggacgtagccatcgacacagtgaagacgggcatggggggcaaggcggggaacaagggcgccgtcggcatccgcttccagttccacagcaccagcttctgcttcatatgtagtcacctgacggccgggcagtcccaggtgaaggagcggaatgaagactacaaggagatcacccagaaactctgcttcccaatggggagaaatgttttttctcatgattatgtattttggtgtggcgatttcaactaccgcattgatcttacttatgaagaagtcttctattttgttaaacgccaagactggaagaaacttctggaatttgatcaactacagctacagaaatcaagtggaaaaatttttaaggactttcacgaaggagccattaactttggacccacctacaagtatgacgttggctcagccgcctacgatacaagcgacaaatgccgcacccccgcctggacagacagggtgctgtggtggaggaagaaacatccctttgataaaacagctggagaactcaaccttctagacagtgatctagatgttgacaccaaagtcagacacacctggtctcctggtgccctgcagtattatggtcgtgcggagctacaagcgtctgatcacagacctgtgctggcgatcgtggaggtggaagttcaggaagtcgatgtgggtgctcgggagagggttttccaggaagtgtcctccttccagggccccctggatgccactgttgtagtaaaccttcaatcaccgaccttagaagagaaaaacgagtttccagaggacctgcgtactgagctcatgcagaccttggggagttatgggacaattgttcttgtcaggatcaaccaagggcagatgctggtaacttttgcagacagtcactcggctctcagtgtcctggacgtggacggtatgaaggtgaaaggcagagcagtgaagattagaccgaagaccaaggactggctgaaaggtttgcgagaggagatcattcggaaacgagacagcatggcccccgtgtctcccactgccaactcctgtttgctggaggaaaactttgacttcacaagtttggactatgagtcagaaggggatattcttgaagacgatgaagactacttggtggatgaattcaatcagcctggggtctcggacagtgaactcgggggagacgacctctctgatgtccccggccccacagcactggctcctcccagcaagtcacctgctctcaccaaaaagaagcagcatccaacgtacaaagatgacgcggacctggtggagctcaagcgggagctggaagccgtcggggagttccgccaccgttctccgagcaggtctctgtcggtccccaaccggcctcggccacctcaacccccgcagagacccccccctccaaccggtttaatggtgaaaaagtcggcttcagatgcgtccatctcctccggcacccatggacagtattcaattttgcagacggcaagacttctaccaggagcacctcagcaacctcccaaggctcggactggaataagtaaaccttataatgtcaagcagatcaaaaccaccaatgcccaggaggcagaagcagcaatccggtgtctcctggaagccagaggaggtgcctccgaagaagccctaagtgccgtggccccaagggaccttgaagcatcctctgaaccagagcccacaccgggggcagccaaaccagagaccccacaggcgcccccactccttccccgtcggcccccacccagagttcctgccatcaagaagccaaccttgagaaggacaggaaagcccctgtcaccggaagaacagtttgagcaacagactgtccattttacaatcgggcccccggagacaagcgttgaggcccctcctgtcgtgacagcccctcgagtccctcctgttcccaaaccaagaacatttcagcctgggaaagctgcagagaggccaagccacaggaagccagcatcagacgaagcccctcctggggcaggagcctctgtgccaccacctctggaggcgccgcctcttgtgcccaaggtacccccgaggaggaagaagtcagcccccgcagccttccacctgcaggtcctgcagagcaacagccagcttctccagggcctcacttacaatagcagtgacagcccctctgggcacccacctgccgcgggcaccgtcttcccacaaggggactttctcagcacttcatctgctacaagccccgacagcgatggcaccaaagcgatgaagccagaggcagccccacttcttggtgattatcaggaccccttctggaaccttcttcaccaccctaaactgttgaataacacttggctttctaagagctcagaccctttggactcaggaaccaggagccccaaaagagatcccatagacccagtgtcagctggcgcttcagctgccaaggcagagctgccaccagatcatgaacacaaaaccttaggtcactgggtgacaatcagtgaccaagaaaagaggacagcactgcaggtgtttgacccactggcaaaaacatgactgagcagctttgaaggctgcagtcctatagaatgcataccttcctccctctagacatccctccaccagaagagacatctatttaaaggcacactggccaaaacgtttgtgcatctgtcactctcgtgtagtttacaaaaatcgtgtctcttattcagtaagatggttactcagccaccaaaatatatttcactcaaggcttgtacatctgaagtttgctcttcaaggaatgggaaccttcctgttaaattcggtgtatggattttaagaaaggaatctagccaatgaggtccaagaagttctcacccattgaatttttaaatggctgttcagttcatgttgtacgtgatggagatttgtcttttgttttatttgcattttacagatttggtataacattttggggagccacctgaaggttgatgtataaagtaaggattagagaaagaggtcgttgtgaccattagtagctgtcctggcccacttaaacaaggttacaaaaaatcagagtcggaagcagccaaataggtcaacctaatgactagactgtacattcccatgagccttcatgtttaagtgtgtacatgtgcgttaaccttgatgatgcgtgaatcccgagggagccggtggcatacaccgttagcttaaccttagcttaaactagctgaaggctcctgtgccatgtcttagacattgcatgccctatcaattactataatcctgagccatggtgtgctactgaaaccaatttttatccaccatctagtccttattaaatgaaacctcacggatcctttgttccgcttatattccatgcataccacataaaagcacacagtgcgaaaactcttgctgatacgcgatattgattctcattgttagaatatggagagtgtttcagcctcgtctgtccggctggagcttcgggatggaaagtgctatgtgtccctgcatataagaatcaccaggccagtgtttctgggtttgcttgtctatatgtttgtctatattttttgcctatacatttttcccacgtttccaacagcacttctcacctattcaataactgaaaaagacattaccatagtgctttacatttttaaagtaatgttacaaggtctggaatccatttggagcagataccgtgttttcgctatttaataagaagttcagtagtgaaatcttactgtaccgcctgttgtatctgggagcctcgtacagaggctcgcacagcagtgatcaagtgtcatcccttacgtgactgggggatgtctgtcctaaaagctgactgctaggatagtaaggatcatcttgcctgggctatgccactgtcttgttaccaattagacatctggaatttcataattagttttcattgtcactgtcaagatatattgcagattacttaaatatggccatcaaaacaaaagttacaacacgtatctcttttcatctgaaaactaatacctggaaaaggataaaaaaaaaaagggaatccgtgacccacagagctagacagataagatgcatagttgaccagtcataaaaggcggtgtttaggtgatcaggatgccgttggtggcatttacgtgctttatatgatttttacctccgtaacaaacacaagaaataaacagaatggtccttaacagagtttgggggagagagcaagatgggttccttggagaagctgatttgccaagatgcacatcgctattaacagccagagtcataaatgaaatgaaattgaagaattcattcaaatgctcttttccctataacctcttttctcaccaaaaaggagataaatttgaaaacagataaatgtaacaaccagtcaaagaagcaggggaaaagtaagctcctccaaagttgcttgcagtgctggaaatagatctcatttttaggttttctcttcgttccagataccaaataaatgggacagagaataaaatttttgttaaaatatgtgctcatctcctaagtagctcttcagagtctgaccgtaagtaaaaacacacagaattgtgttgactgggggaggtgaatcacaaaaaagttacgaggagtttaagagttaaatattatttgatcgtggctgtcaaatttagtgaacaacatagattggatttggagttggtagtaggtatggttctcataccagaattctcttaaaaaaaaaaaaaaggacaattggaattgccttatttatttttaaaatcaatgcttactagttggtaggattcccaggtcagcagcagggttgattaaataatcttgacaatgagcagctgccatcttgggggatttcattctgtggttttttaaatgtttcgtctttgatgctaccatccagggcttcttattgtgaccttgtagcctattttgttcctgctgttctctaacatggtgcagttcacgcagactggtttaggtacttcacaactcaccattgtctctctgaccccaagcctagtcccttttacatcaccatcttctcagacttcttgcctattcttaaaatatgttttggttaatgattgaattaggacatcagcttaagcaattcctgtaacggtttaacgttgttgaagttcaaggcacataataaaattctccctgatgtgtgtgtaagtataaacaaagtaatgtatcaaagcgttcactttataatgaagtcatttcattgggaaggaaagctgcaaagattattgggggactagtgattaataaaatcctgtaatatttttgaagtgaaaatttgtactgaaattgtacatgatacctattaaatgtttttgtctttttttaaa

SEQ ID NO: 39615 - DNA, 6478 bp, Homo sapiens
ttccagctaaagcacgtcctgcggcgagtcaccttggttagccgcacgggtcaagctctgcaaggagcttgccctcctcgtcctcccttccctctgctcccctcaccgccctcccctcctcttttcagaagctgctctgggcttcttgccacgcgggcgacacgcctatgatcaattttgacttccatcagtttgccaaaggtgggaagctagagaaattggagaccctcttgaggccacagttaaagctgcactgggaagacttcgatgtgttcacaaagggggagaacgtcagtccacgttttcagaaaggcactttgcggatgaactgtcttgactgcctggaccgaaccaacactgtgcagagcttcatcgcgctcgaggtcctgcatctgcagctcaagaccctggggctgagttcaaaacccatcgttgaccgctttgtggagtccttcaaagccatgtggtctctgaatggccacagcctgagcaaggtgttcacaggcagcagagccctggaagggaaggccaaggtggggaagctgaaggatggagcccggtccatgtctcgaaccatccagtccaacttcttcgacggggtgaagcaggaggccatcaagctgctgctggttggggacgtctacggcgaggaggtggcagacaaagggggcatgctgctggacagcacggcgctcctggtgactcccaggatcctgaaagctatgactgagcgtcagtccgaattcacaaatttcaagcggatccggattgctatggggacctggaacgtgaacggaggaaagcagttccggagcaacgtgctcaggacggcggagctgacagactggctgctcgactcgccccagctctcgggagctaccgactcccaggatgacagcagcccagctgacatatttgctgtggggtttgaagagatggtggaattgagcgcagggaatattgtcaatgccagtactaccaacaagaagatgtggggtgaacagcttcagaaagccatctcacgctctcatagatacattctgttgacttcggcacagctggtgggcgtctgtctttatatctttgtacgtccataccatgtcccgttcatcagggacgtagccatcgacacagtgaagacgggcatggggggcaaggcggggaacaagggcgccgtcggcatccgcttccagttccacagcaccagcttctgcttcatatgtagtcacctgacggccgggcagtcccaggtgaaggagcggaatgaagactacaaggagatcacccagaaactctgcttcccaatggggagaaatgttttttctcatgattatgtattttggtgtggcgatttcaactaccgcattgatcttacttatgaagaagtcttctattttgttaaacgccaagactggaagaaacttctggaatttgatcaactacagctacagaaatcaagtggaaaaatttttaaggactttcacgaaggagccattaactttggacccacctacaagtatgacgttggctcagccgcctacgatacaagcgacaaatgccgcacccccgcctggacagacagggtgctgtggtggaggaagaaacatccctttgataaaacagctggagaactcaaccttctagacagtgatctagatgttgacaccaaagtcagacacacctggtctcctggtgccctgcagtattatggtcgtgcggagctacaagcgtctgatcacagacctgtgctggcgatcgtggaggtggaagttcaggaagtcgatgtgggtgctcgggagagggttttccaggaagtgtcctccttccagggccccctggatgccactgttgtagtaaaccttcaatcaccgaccttagaagagaaaaacgagtttccagaggacctgcgtactgagctcatgcagaccttggggagttatgggacaattgttcttgtcaggatcaaccaagggcagatgctggtaacttttgcagacagtcactcggctctcagtgtcctggacgtggacggtatgaaggtgaaaggcagagcagtgaagattagaccgaagaccaaggactggctgaaaggtttgcgagaggagatcattcggaaacgagacagcatggcccccgtgtctcccactgccaactcctgtttgctggaggaaaactttgacttcacaagtttggactatgagtcagaaggggatattcttgaagacgatgaagactacttggtggatgaattcaatcagcctggggtctcggacagtgaactcgggggagacgacctctctgatgtccccggccccacagcactggctcctcccagcaagtcacctgctctcaccaaaaagaagcagcatccaacgtacaaagatgacgcggacctggtggagctcaagcgggagctggaagccgtcggggagttccgccaccgttctccgagcaggtctctgtcggtccccaaccggcctcggccacctcaacccccgcagagacccccccctccaaccggtttaatggtgaaaaagtcggcttcagatgcgtccatctcctccggcacccatggacagtattcaattttgcagacggcaagacttctaccaggagcacctcagcaacctcccaaggctcggactggaataagtaaaccttataatgtcaagcagatcaaaaccaccaatgcccaggaggcagaagcagcaatccggtgtctcctggaagccagaggaggtgcctccgaagaagccctaagtgccgtggccccaagggaccttgaagcatcctctgaaccagagcccacaccgggggcagccaaaccagagaccccacaggcgcccccactccttccccgtcggcccccacccagagttcctgccatcaagaagccaaccttgagaaggacaggaaagcccctgtcaccggaagaacagtttgagcaacagactgtccattttacaatcgggcccccggagacaagcgttgaggcccctcctgtcgtgacagcccctcgagtccctcctgttcccaaaccaagaacatttcagcctgggaaagctgcagagaggccaagccacaggaagccagcatcagacgaagcccctcctggggcaggagcctctgtgccaccacctctggaggcgccgcctcttgtgcccaaggtacccccgaggaggaagaagtcagcccccgcagccttccacctgcaggtcctgcagagcaacagccagcttctccagggcctcacttacaatagcagtgacagcccctctgggcacccacctgccgcgggcaccgtcttcccacaaggggactttctcagcacttcatctgctacaagccccgacagcgatggcaccaaagcgatgaagccagaggcagccccacttcttggtgattatcaggaccccttctggaaccttcttcaccaccctaaactgttgaataacacttggctttctaagagctcagaccctttggactcaggaaccaggagccccaaaagagatcccatagacccagtgtcagctggcgcttcagctgccaaggcagagctgccaccagatcatgaacacaaaaccttaggtcactgggtgacaatcagtgaccaagaaaagaggacagcactgcaggtgtttgacccactggcaaaaacatgactgagcagctttgaaggctgcagtcctatagaatgcataccttcctccctctagacatccctccaccagaagagacatctatttaaaggcacactggccaaaacgtttgtgcatctgtcactctcgtgtagtttacaaaaatcgtgtctcttattcagtaagatggttactcagccaccaaaatatatttcactcaaggcttgtacatctgaagtttgctcttcaaggaatgggaaccttcctgttaaattcggtgtatggattttaagaaaggaatctagccaatgaggtccaagaagttctcacccattgaatttttaaatggctgttcagttcatgttgtacgtgatggagatttgtcttttgttttatttgcattttacagatttggtataacattttggggagccacctgaaggttgatgtataaagtaaggattagagaaagaggtcgttgtgaccattagtagctgtcctggcccacttaaacaaggttacaaaaaatcagagtcggaagcagccaaataggtcaacctaatgactagactgtacattcccatgagccttcatgtttaagtgtgtacatgtgcgttaaccttgatgatgcgtgaatcccgagggagccggtggcatacaccgttagcttaaccttagcttaaactagctgaaggctcctgtgccatgtcttagacattgcatgccctatcaattactataatcctgagccatggtgtgctactgaaaccaatttttatccaccatctagtccttattaaatgaaacctcacggatcctttgttccgcttatattccatgcataccacataaaagcacacagtgcgaaaactcttgctgatacgcgatattgattctcattgttagaatatggagagtgtttcagcctcgtctgtccggctggagcttcgggatggaaagtgctatgtgtccctgcatataagaatcaccaggccagtgtttctgggtttgcttgtctatatgtttgtctatattttttgcctatacatttttcccacgtttccaacagcacttctcacctattcaataactgaaaaagacattaccatagtgctttacatttttaaagtaatgttacaaggtctggaatccatttggagcagataccgtgttttcgctatttaataagaagttcagtagtgaaatcttactgtaccgcctgttgtatctgggagcctcgtacagaggctcgcacagcagtgatcaagtgtcatcccttacgtgactgggggatgtctgtcctaaaagctgactgctaggatagtaaggatcatcttgcctgggctatgccactgtcttgttaccaattagacatctggaatttcataattagttttcattgtcactgtcaagatatattgcagattacttaaatatggccatcaaaacaaaagttacaacacgtatctcttttcatctgaaaactaatacctggaaaaggataaaaaaaaaaagggaatccgtgacccacagagctagacagataagatgcatagttgaccagtcataaaaggcggtgtttaggtgatcaggatgccgttggtggcatttacgtgctttatatgatttttacctccgtaacaaacacaagaaataaacagaatggtccttaacagagtttgggggagagagcaagatgggttccttggagaagctgatttgccaagatgcacatcgctattaacagccagagtcataaatgaaatgaaattgaagaattcattcaaatgctcttttccctataacctcttttctcaccaaaaaggagataaatttgaaaacagataaatgtaacaaccagtcaaagaagcaggggaaaagtaagctcctccaaagttgcttgcagtgctggaaatagatctcatttttaggttttctcttcgttccagataccaaataaatgggacagagaataaaatttttgttaaaatatgtgctcatctcctaagtagctcttcagagtctgaccgtaagtaaaaacacacagaattgtgttgactgggggaggtgaatcacaaaaaagttacgaggagtttaagagttaaatattatttgatcgtggctgtcaaatttagtgaacaacatagattggatttggagttggtagtaggtatggttctcataccagaattctcttaaaaaaaaaaaaaaggacaattggaattgccttatttatttttaaaatcaatgcttactagttggtaggattcccaggtcagcagcagggttgattaaataatcttgacaatgagcagctgccatcttgggggatttcattctgtggttttttaaatgtttcgtctttgatgctaccatccagggcttcttattgtgaccttgtagcctattttgttcctgctgttctctaacatggtgcagttcacgcagactggtttaggtacttcacaactcaccattgtctctctgaccccaagcctagtcccttttacatcaccatcttctcagacttcttgcctattcttaaaatatgttttggttaatgattgaattaggacatcagcttaagcaattcctgtaacggtttaacgttgttgaagttcaaggcacataataaaattctccctgatgtgtgtgtaagtataaacaaagtaatgtatcaaagcgttcactttataatgaagtcatttcattgggaaggaaagctgcaaagattattgggggactagtgattaataaaatcctgtaatatttttgaagtgaaaatttgtactgaaattgtacatgatacctattaaatgtttttgtctttttttaaa

SEQ ID NO: 39616 - DNA, 4559 bp, Homo sapiens
tggaactctaagaagaattcccctttaagagaattcccgccaaagggccaaaattggcctgggtaaacttttgcagacagtcactcggctctcagtgtcctggacgtggacggtatgaaggtgaaaggcagagcagtgaagattagaccgaagaccaaggactggctgaaaggtttgcgagaggagatcattcggaaacgagacagcatggcccccgtgtctcccactgccaactcctgtttgctggaggaaaactttgacttcacaagtttggactatgagtcagaaggggatattcttgaagacgatgaagactacttggtggatgaattcaatcagcctggggtctcggacagtgaactcgggggagacgacctctctgatgtccccggccccacagcactggctcctcccagcaagtcacctgctctcaccaaaaagaagcagcatccaacgtacaaagatgacgcggacctggtggagctcaagcgggagctggaagccgtcggggagttccgccaccgttctccgagcaggtctctgtcggtccccaaccggcctcggccacctcaacccccgcagagacccccccctccaaccggtttaatggtgaaaaagtcggcttcagatgcgtccatctcctccggcacccatggacagtattcaattttgcagacggcaagacttctaccaggagcacctcagcaacctcccaaggctcggactggaataagtaaaccttataatgtcaagcagatcaaaaccaccaatgcccaggaggcagaagcagcaatccggtgtctcctggaagccagaggaggtgcctccgaagaagccctaagtgccgtggccccaagggaccttgaagcatcctctgaaccagagcccacaccgggggcagccaaaccagagaccccacaggcgcccccactccttccccgtcggcccccacccagagttcctgccatcaagaagccaaccttgagaaggacaggaaagcccctgtcaccggaagaacagtttgagcaacagactgtccattttacaatcgggcccccggagacaagcgttgaggcccctcctgtcgtgacagcccctcgagtccctcctgttcccaaaccaagaacatttcagcctgggaaagctgcagagaggccaagccacaggaagccagcatcagacgaagcccctcctggggcaggagcctctgtgccaccacctctggaggcgccgcctcttgtgcccaaggtacccccgaggaggaagaagtcagcccccgcagccttccacctgcaggtcctgcagagcaacagccagcttctccagggcctcacttacaatagcagtgacagcccctctgggcacccacctgccgcgggcaccgtcttcccacaaggggactttctcagcacttcatctgctacaagccccgacagcgatggcaccaaagcgatgaagccagaggcagccccacttcttggtgattatcaggaccccttctggaaccttcttcaccaccctaaactgttgaataacacttggctttctaagagctcagaccctttggactcaggaaccaggagccccaaaagagatcccatagacccagtgtcagctggcgcttcagctgccaaggcagagctgccaccagatcatgaacacaaaaccttaggtcactgggtgacaatcagtgaccaagaaaagaggacagcactgcaggtgtttgacccactggcaaaaacatgactgagcagctttgaaggctgcagtcctatagaatgcataccttcctccctctagacatccctccaccagaagagacatctatttaaaggcacactggccaaaacgtttgtgcatctgtcactctcgtgtagtttacaaaaatcgtgtctcttattcagtaagatggttactcagccaccaaaatatatttcactcaaggcttgtacatctgaagtttgctcttcaaggaatgggaaccttcctgttaaattcggtgtatggattttaagaaaggaatctagccaatgaggtccaagaagttctcacccattgaatttttaaatggctgttcagttcatgttgtacgtgatggagatttgtcttttgttttatttgcattttacagatttggtataacattttggggagccacctgaaggttgatgtataaagtaaggattagagaaagaggtcgttgtgaccattagtagctgtcctggcccacttaaacaaggttacaaaaaatcagagtcggaagcagccaaataggtcaacctaatgactagactgtacattcccatgagccttcatgtttaagtgtgtacatgtgcgttaaccttgatgatgcgtgaatcccgagggagccggtggcatacaccgttagcttaaccttagcttaaactagctgaaggctcctgtgccatgtcttagacattgcatgccctatcaattactataatcctgagccatggtgtgctactgaaaccaatttttatccaccatctagtccttattaaatgaaacctcacggatcctttgttccgcttatattccatgcataccacataaaagcacacagtgcgaaaactcttgctgatacgcgatattgattctcattgttagaatatggagagtgtttcagcctcgtctgtccggctggagcttcgggatggaaagtgctatgtgtccctgcatataagaatcaccaggccagtgtttctgggtttgcttgtctatatgtttgtctatattttttgcctatacatttttcccacgtttccaacagcacttctcacctattcaataactgaaaaagacattaccatagtgctttacatttttaaagtaatgttacaaggtctggaatccatttggagcagataccgtgttttcgctatttaataagaagttcagtagtgaaatcttactgtaccgcctgttgtatctgggagcctcgtacagaggctcgcacagcagtgatcaagtgtcatcccttacgtgactgggggatgtctgtcctaaaagctgactgctaggatagtaaggatcatcttgcctgggctatgccactgtcttgttaccaattagacatctggaatttcataattagttttcattgtcactgtcaagatatattgcagattacttaaatatggccatcaaaacaaaagttacaacacgtatctcttttcatctgaaaactaatacctggaaaaggataaaaaaaaaaagggaatccgtgacccacagagctagacagataagatgcatagttgaccagtcataaaaggcggtgtttaggtgatcaggatgccgttggtggcatttacgtgctttatatgatttttacctccgtaacaaacacaagaaataaacagaatggtccttaacagagtttgggggagagagcaagatgggttccttggagaagctgatttgccaagatgcacatcgctattaacagccagagtcataaatgaaatgaaattgaagaattcattcaaatgctcttttccctataacctcttttctcaccaaaaaggagataaatttgaaaacagataaatgtaacaaccagtcaaagaagcaggggaaaagtaagctcctccaaagttgcttgcagtgctggaaatagatctcatttttaggttttctcttcgttccagataccaaataaatgggacagagaataaaatttttgttaaaatatgtgctcatctcctaagtagctcttcagagtctgaccgtaagtaaaaacacacagaattgtgttgactgggggaggtgaatcacaaaaaagttacgaggagtttaagagttaaatattatttgatcgtggctgtcaaatttagtgaacaacatagattggatttggagttggtagtaggtatggttctcataccagaattctcttaaaaaaaaaaaaaaggacaattggaattgccttatttatttttaaaatcaatgcttactagttggtaggattcccaggtcagcagcagggttgattaaataatcttgacaatgagcagctgccatcttgggggatttcattctgtggttttttaaatgtttcgtctttgatgctaccatccagggcttcttattgtgaccttgtagcctattttgttcctgctgttctctaacatggtgcagttcacgcagactggtttaggtacttcacaactcaccattgtctctctgaccccaagcctagtcccttttacatcaccatcttctcagacttcttgcctattcttaaaatatgttttggttaatgattgaattaggacatcagcttaagcaattcctgtaacggtttaacgttgttgaagttcaaggcacataataaaattctccctgatgtgtgtgtaagtataaacaaagtaatgtatcaaagcgttcactttataatgaagtcatttcattgggaaggaaagctgcaaagattattgggggactagtgattaataaaatcctgtaatatttttgaagtgaaaatttgtactgaaattgtacatgatacctattaaatgtttttgtctttttttaaa

SEQ ID NO: 39617 - DNA, 7332 bp, Homo sapiens
  misc_feature (3)..(3): n is a, c, g, or t
  misc_feature (6)..(6): n is a, c, g, or t
ggncgngcggggagctgtcgcgggcagcgcgccctcgggaggacgtggccccggcccccgcccgcagtgggcccgaccctcatggccctgagcaaagggctgcggctgctggggcgcctgggggccgagggggactgtagcgtgctgctggaggcgcgcggccgcgacgactgcctgctgttcgaggccggcacggtggccacgctggctccagaagaaaaggaagtcattaaaggacagtatggcaagctcacggacgcgtacggctgcctgggggagctgaggctgaaatctggtggcacgtctctgagcttcctggtgttggtgacaggctgcacatctgtgggcagaattccagatgctgaaatctacaaaatcactgccactgacttttaccctcttcaggaagaggccaaggaggaggaacgcctcatagctttgaagaaaatcctcagctcgggggtgttctatttctcatggccaaacgatgggtctcgctttgacctgactgtccgcacgcagaagcagggggatgacagctctgaatgggggaactccttcttctggaaccagctgttgcacgtgcccttgaggcagcaccaggtgagctgctgtgactggctgctgaagatcatctgcggggtggtcaccatccgcaccgtgtatgcctcccacaagcaggccaaggcctgcctcgtctctcgcgttagctgtgagcgcacaggcactcgcttccacacccgtggcgtgaacgacgacggccatgtgtccaacttcgtggagacagagcagatgatttacatggacgatggagtgtcatcttttgtccagatcagaggctccgttccgctgttctgggaacagccagggcttcaggttggctcccatcatctgagactccacagaggcctggaagccaatgcccctgctttcgacaggcacatggtgcttctgaaggagcagtacgggcagcaggtggtcgtgaaccttctgggaagcagaggcggagaggaggtgctcaacagagccttcaagaagctgctctgggcttcttgccacgcgggcgacacgcctatgatcaattttgacttccatcagtttgccaaaggtgggaagctagagaaattggagaccctcttgaggccacagttaaagctgcactgggaagacttcgatgtgttcacaaagggggagaacgtcagtccacggtgaggctcgctgcgcactgtgccgcgtcttctgctggggggaagcgtcagtccacgttttcagaaaggcactttgcggatgaactgtcttgactgcctggaccgaaccaacactgtgcagagcttcatcgcgctcgaggtcctgcatctgcagctcaagaccctggggctgagttcaaaacccatcgttgaccgctttgtggagtccttcaaagccatgtggtctctgaatggccacagcctgagcaaggtgttcacaggcagcagagccctggaagggaaggccaaggtggggaagctgaaggatggagcccggtccatgtctcgaaccatccagtccaacttcttcgacggggtgaagcaggaggccatcaagctgctgctggttggggacgtctacggcgaggaggtggcagacaaagggggcatgctgctggacagcacggcgctcctggtgactcccaggatcctgaaagctatgactgagcgtcagtccgaattcacaaatttcaagcggatccggattgctatggggacctggaacgtgaacggaggaaagcagttccggagcaacgtgctcaggacggcggagctgacagactggctgctcgactcgccccagctctcgggagctaccgactcccaggatgacagcagcccagctgacatatttgctgtggggtttgaagagatggtggaattgagcgcagggaatattgtcaatgccagtactaccaacaagaagatgtggggtgaacagcttcagaaagccatctcacgctctcatagatacattctgttgacttcggcacagctggtgggcgtctgtctttatatctttgtacgtccataccatgtcccgttcatcagggacgtagccatcgacacagtgaagacgggcatggggggcaaggcggggaacaagggcgccgtcggcatccgcttccagttccacagcaccagcttctgcttcatatgtagtcacctgacggccgggcagtcccaggtgaaggagcggaatgaagactacaaggagatcacccagaaactctgcttcccaatggggagaaatgttttttctcatgattatgtattttggtgtggcgatttcaactaccgcattgatcttacttatgaagaagtcttctattttgttaaacgccaagactggaagaaacttctggaatttgatcaactacagctacagaaatcaagtggaaaaatttttaaggactttcacgaaggagccattaactttggacccacctacaagtatgacgttggctcagccgcctacgatacaagcgacaaatgccgcacccccgcctggacagacagggtgctgtggtggaggaagaaacatccctttgataaaacagctggagaactcaaccttctagacagtgatctagatgttgacaccaaagtcagacacacctggtctcctggtgccctgcagtattatggtcgtgcggagctacaagcgtctgatcacagacctgtgctggcgatcgtggaggtggaagttcaggaagtcgatgtgggtgctcgggagagggttttccaggaagtgtcctccttccagggccccctggatgccactgttgtagtaaaccttcaatcaccgaccttagaagagaaaaacgagtttccagaggacctgcgtactgagctcatgcagaccttggggagttatgggacaattgttcttgtcaggatcaaccaagggcagatgctggtaacttttgcagacagtcactcggctctcagtgtcctggacgtggacggtatgaaggtgaaaggcagagcagtgaagattagaccgaagaccaaggactggctgaaaggtttgcgagaggagatcattcggaaacgagacagcatggcccccgtgtctcccactgccaactcctgtttgctggaggaaaactttgacttcacaagtttggactatgagtcagaaggggatattcttgaagacgatgaagactacttggtggatgaattcaatcagcctggggtctcggacagtgaactcgggggagacgacctctctgatgtccccggccccacagcactggctcctcccagcaagtcacctgctctcaccaaaaagaagcagcatccaacgtacaaagatgacgcggacctggtggagctcaagcgggagctggaagccgtcggggagttccgccaccgttctccgagcaggtctctgtcggtccccaaccggcctcggccacctcaacccccgcagagacccccccctccaaccggtttaatggtgaaaaagtcggcttcagatgcgtccatctcctccggcacccatggacagtattcaattttgcagacggcaagacttctaccaggagcacctcagcaacctcccaaggctcggactggaataagtaaaccttataatgtcaagcagatcaaaaccaccaatgcccaggaggcagaagcagcaatccggtgtctcctggaagccagaggaggtgcctccgaagaagccctaagtgccgtggccccaagggaccttgaagcatcctctgaaccagagcccacaccgggggcagccaaaccagagaccccacaggcgcccccactccttccccgtcggcccccacccagagttcctgccatcaagaagccaaccttgagaaggacaggaaagcccctgtcaccggaagaacagtttgagcaacagactgtccattttacaatcgggcccccggagacaagcgttgaggcccctcctgtcgtgacagcccctcgagtccctcctgttcccaaaccaagaacatttcagcctgggaaagctgcagagaggccaagccacaggaagccagcatcagacgaagcccctcctggggcaggagcctctgtgccaccacctctggaggcgccgcctcttgtgcccaaggtacccccgaggaggaagaagtcagcccccgcagccttccacctgcaggtcctgcagagcaacagccagcttctccagggcctcacttacaatagcagtgacagcccctctgggcacccacctgccgcgggcaccgtcttcccacaaggggactttctcagcacttcatctgctacaagccccgacagcgatggcaccaaagcgatgaagccagaggcagccccacttcttggtgattatcaggaccccttctggaaccttcttcaccaccctaaactgttgaataacacttggctttctaagagctcagaccctttggactcaggaaccaggagccccaaaagagatcccatagacccagtgtcagctggcgcttcagctgccaaggcagagctgccaccagatcatgaacacaaaaccttaggtcactgggtgacaatcagtgaccaagaaaagaggacagcactgcaggtgtttgacccactggcaaaaacatgactgagcagctttgaaggctgcagtcctatagaatgcataccttcctccctctagacatccctccaccagaagagacatctatttaaaggcacactggccaaaacgtttgtgcatctgtcactctcgtgtagtttacaaaaatcgtgtctcttattcagtaagatggttactcagccaccaaaatatatttcactcaaggcttgtacatctgaagtttgctcttcaaggaatgggaaccttcctgttaaattcggtgtatggattttaagaaaggaatctagccaatgaggtccaagaagttctcacccattgaatttttaaatggctgttcagttcatgttgtacgtgatggagatttgtcttttgttttatttgcattttacagatttggtataacattttggggagccacctgaaggttgatgtataaagtaaggattagagaaagaggtcgttgtgaccattagtagctgtcctggcccacttaaacaaggttacaaaaaatcagagtcggaagcagccaaataggtcaacctaatgactagactgtacattcccatgagccttcatgtttaagtgtgtacatgtgcgttaaccttgatgatgcgtgaatcccgagggagccggtggcatacaccgttagcttaaccttagcttaaactagctgaaggctcctgtgccatgtcttagacattgcatgccctatcaattactataatcctgagccatggtgtgctactgaaaccaatttttatccaccatctagtccttattaaatgaaacctcacggatcctttgttccgcttatattccatgcataccacataaaagcacacagtgcgaaaactcttgctgatacgcgatattgattctcattgttagaatatggagagtgtttcagcctcgtctgtccggctggagcttcgggatggaaagtgctatgtgtccctgcatataagaatcaccaggccagtgtttctgggtttgcttgtctatatgtttgtctatattttttgcctatacatttttcccacgtttccaacagcacttctcacctattcaataactgaaaaagacattaccgcctgttgtatctgggagcctcgtacagaggctcgcacagcagtgatcaagtgtcatcccttacgtgactgggggatgtctgtcctaaaagctgactgctaggatagtaaggatcatcttgcctgggctatgccactgtcttgttaccaattagacatctggaatttcataattagttttcattgtcactgtcaagatatattgcagattacttaaatatggccatcaaaacaaaagttacaacacgtatctcttttcatctgaaaactaatacctggaaaaggataaaaaaaaaaagggaatccgtgacccacagagctagacagataagatgcatagttgaccagtcataaaaggcggtgtttaggtgatcaggatgccgttggtggcatttacgtgctttatatgatttttacctccgtaacaaacacaagaaataaacagaatggtccttaacagagtttgggggagagagcaagatgggttccttggagaagctgatttgccaagatgcacatcgctattaacagccagagtcataaatgaaatgaaattgaagaattcattcaaatgctcttttccctataacctcttttctcaccaaaaaggagataaatttgaaaacagataaatgtaacaaccagtcaaagaagcaggggaaaagtaagctcctccaaagttgcttgcagtgctggaaatagatctcatttttaggttttctcttcgttccagataccaaataaatgggacagagaataaaatttttgttaaaatatgtgctcatctcctaagtagctcttcagagtctgaccgtaagtaaaaacacacagaattgtgttgactgggggaggtgaatcacaaaaaagttacgaggagtttaagagttaaatattatttgatcgtggctgtcaaatttagtgaacaacatagattggatttggagttggtagtaggtatggttctcataccagaattctcttaaaaaaaaaaaaaaggacaattggaattgccttatttatttttaaaatcaatgcttactagttggtaggattcccaggtcagcagcagggttgattaaataatcttgacaatgagcagctgccatcttgggggatttcattctgtggttttttaaatgtttcgtctttgatgctaccatccagggcttcttattgtgaccttgtagcctattttgttcctgctgttctctaacatggtgcagttcacgcagactggtttaggtacttcacaactcaccattgtctctctgaccccaagcctagtcccttttacatcaccatcttctcagacttcttgcctattcttaaaatatgttttggttaatgattgaattaggacatcagcttaagcaattcctgtaacggtttaacgttgttgaagttcaaggcacataataaaattctccctgatgtgtgtgtaagtataaacaaagtaatgtatcaaagcgttcactttataatgaagtcatttcattgggaaggaaagctgcaaagattattgggggactagtgattaataaaatcctgtaatatttttgaagtgaaaatttgtactgaaattgtacatgatacctattaaatgtttttgtctttttttaaa

SEQ ID NO: 39618 - DNA, 4131 bp, Homo sapiens
ctagaggatcccatggtagcgctaccatggtagcgctcgggttaacatggtggaatctcatctctactaaaaattttaaaaattggctgggcgtggcagtgctcacccgtaatcccagctactcaggaggctgaaatgggagaattgctcgagcctgggaggttgagactgcagtgagccgtgatcatgccgctgcactccggcctgggtggcagagcgagagcccatcttaaaaaagaaaaaagaaaaaaagctgggactgaatctagctgattactcctgaaatacactgaattagtaaatgacacttaggatgtagactgtctaaggacgaaatcatgcagtgaattgccttgtcctttacacttcagccatgtggttttatgtttcaggtgcctccgaagaagccctaagtgccgtggccccaagggaccttgaagcatcctctgaaccagagcccacaccgggggcagccaaaccagagaccccacaggcgcccccactccttccccgtcggcccccacccagagttcctgccatcaagaagccaaccttgagaaggacaggaaagcccctgtcaccggaagaacagtttgagcaacagactgtccattttacaatcgggcccccggagacaagcgttgaggcccctcctgtcgtgacagcccctcgagtccctcctgttcccaaaccaagaacatttcagcctgggaaagctgcagagaggccaagccacaggaagccagcatcagacgaagcccctcctggggcaggagcctctgtgccaccacctctggaggcgccgcctcttgtgcccaaggtacccccgaggaggaagaagtcagcccccgcagccttccacctgcaggtcctgcagagcaacagccagcttctccagggcctcacttacaatagcagtgacagcccctctgggcacccacctgccgcgggcaccgtcttcccacaaggggactttctcagcacttcatctgctacaagccccgacagcgatggcaccaaagcgatgaagccagaggcagccccacttcttggtgattatcaggaccccttctggaaccttcttcaccaccctaaactgttgaataacacttggctttctaagagctcagaccctttggactcaggaaccaggagccccaaaagagatcccatagacccagtgtcagctggcgcttcagctgccaaggcagagctgccaccagatcatgaacacaaaaccttaggtcactgggtgacaatcagtgaccaagaaaagaggacagcactgcaggtgtttgacccactggcaaaaacatgactgagcagctttgaaggctgcagtcctatagaatgcataccttcctccctctagacatccctccaccagaagagacatctatttaaaggcacactggccaaaacgtttgtgcatctgtcactctcgtgtagtttacaaaaatcgtgtctcttattcagtaagatggttactcagccaccaaaatatatttcactcaaggcttgtacatctgaagtttgctcttcaaggaatgggaaccttcctgttaaattcggtgtatggattttaagaaaggaatctagccaatgaggtccaagaagttctcacccattgaatttttaaatggctgttcagttcatgttgtacgtgatggagatttgtcttttgttttatttgcattttacagatttggtataacattttggggagccacctgaaggttgatgtataaagtaaggattagagaaagaggtcgttgtgaccattagtagctgtcctggcccacttaaacaaggttacaaaaaatcagagtcggaagcagccaaataggtcaacctaatgactagactgtacattcccatgagccttcatgtttaagtgtgtacatgtgcgttaaccttgatgatgcgtgaatcccgagggagccggtggcatacaccgttagcttaaccttagcttaaactagctgaaggctcctgtgccatgtcttagacattgcatgccctatcaattactataatcctgagccatggtgtgctactgaaaccaatttttatccaccatctagtccttattaaatgaaacctcacggatcctttgttccgcttatattccatgcataccacataaaagcacacagtgcgaaaactcttgctgatacgcgatattgattctcattgttagaatatggagagtgtttcagcctcgtctgtccggctggagcttcgggatggaaagtgctatgtgtccctgcatataagaatcaccaggccagtgtttctgggtttgcttgtctatatgtttgtctatattttttgcctatacatttttcccacgtttccaacagcacttctcacctattcaataactgaaaaagacattaccatagtgctttacatttttaaagtaatgttacaaggtctggaatccatttggagcagataccgtgttttcgctatttaataagaagttcagtagtgaaatcttactgtaccgcctgttgtatctgggagcctcgtacagaggctcgcacagcagtgatcaagtgtcatcccttacgtgactgggggatgtctgtcctaaaagctgactgctaggatagtaaggatcatcttgcctgggctatgccactgtcttgttaccaattagacatctggaatttcataattagttttcattgtcactgtcaagatatattgcagattacttaaatatggccatcaaaacaaaagttacaacacgtatctcttttcatctgaaaactaatacctggaaaaggataaaaaaaaaaagggaatccgtgacccacagagctagacagataagatgcatagttgaccagtcataaaaggcggtgtttaggtgatcaggatgccgttggtggcatttacgtgctttatatgatttttacctccgtaacaaacacaagaaataaacagaatggtccttaacagagtttgggggagagagcaagatgggttccttggagaagctgatttgccaagatgcacatcgctattaacagccagagtcataaatgaaatgaaattgaagaattcattcaaatgctcttttccctataacctcttttctcaccaaaaaggagataaatttgaaaacagataaatgtaacaaccagtcaaagaagcaggggaaaagtaagctcctccaaagttgcttgcagtgctggaaatagatctcatttttaggttttctcttcgttccagataccaaataaatgggacagagaataaaatttttgttaaaatatgtgctcatctcctaagtagctcttcagagtctgaccgtaagtaaaaacacacagaattgtgttgactgggggaggtgaatcacaaaaaagttacgaggagtttaagagttaaatattatttgatcgtggctgtcaaatttagtgaacaacatagattggatttggagttggtagtaggtatggttctcataccagaattctcttaaaaaaaaaaaaaaggacaattggaattgccttatttatttttaaaatcaatgcttactagttggtaggattcccaggtcagcagcagggttgattaaataatcttgacaatgagcagctgccatcttgggggatttcattctgtggttttttaaatgtttcgtctttgatgctaccatccagggcttcttattgtgaccttgtagcctattttgttcctgctgttctctaacatggtgcagttcacgcagactggtttaggtacttcacaactcaccattgtctctctgaccccaagcctagtcccttttacatcaccatcttctcagacttcttgcctattcttaaaatatgttttggttaatgattgaattaggacatcagcttaagcaattcctgtaacggtttaacgttgttgaagttcaaggcacataataaaattctccctgatgtgtgtgtaagtataaacaaagtaatgtatcaaagcgttcactttataatgaagtcatttcattgggaaggaaagctgcaaagattattgggggactagtgattaataaaatcctgtaatatttttgaagtgaaaatttgtactgaaattgtacatgatacctattaaatgtttttgtctttttttaaa

SEQ ID NO: 39619 - DNA, 5698 bp, Homo sapiens
  misc_feature (3)..(3): n is a, c, g, or t
  misc_feature (6)..(6): n is a, c, g, or t
ggncgngcggggagctgtcgcgggcagcgcgccctcgggaggacgtggccccggcccccgcccgcagtgggcccgaccctcatggccctgagcaaagggctgcggctgctggggcgcctgggggccgagggggactgtagcgtgctgctggaggcgcgcggccgcgacgactgcctgctgttcgaggccggcacggtggccacgctggctccagaagaaaaggaagtcattaaaggacagtatggcaagctcacggacgcgtacggctgcctgggggagctgaggctgaaatctggtggcacgtctctgagcttcctggtgttggtgacaggctgcacatctgtgggcagaattccagatgctgaaatctacaaaatcactgccactgacttttaccctcttcaggaagaggccaaggaggaggaacgcctcatagctttgaagaaaatcctcagctcgggggtgttctatttctcatggccaaacgatgggtctcgctttgacctgactgtccgcacgcagaagcagggggatgacagctctgaatgggggaactccttcttctggaaccagctgttgcacgtgcccttgaggcagcaccaggtgagctgctgtgactggctgctgaagatcatctgcggggtggtcaccatccgcaccgtgtatgcctcccacaagcaggccaaggcctgcctcgtctctcgcgttagctgtgagcgcacaggcactcgcttccacacccgtggcgtgaacgacgacggccatgtgtccaacttcgtggagacagagcagatgatttacatggacgatggagtgtcatcttttgtccagatcagaggctccgttccgctgttctgggaacagccagggcttcaggttggctcccatcatctgagactccacagaggcctggaagccaatgcccctgctttcgacaggcacatggtgcttctgaaggagcagtacgggcagcaggtggtcgtgaaccttctgggaagcagaggcggagaggaggtgctcaacagagccttcaagaagctgctctgggcttcttgccacgcgggcgacacgcctatgatcaattttgacttccatcagtttgccaaaggtgggaagctagagaaattggagaccctcttgaggccacagttaaagctgcactgggaagacttcgatgtgttcacaaagggggagaacgtcagtccacggtgaggctcgctgcgcactgtgccgcgtcttctgctggggggaagcgtcagtccacgttttcagaaaggcactttgcggatgaactgtcttgactgcctggaccgaaccaacactgtgcagagcttcatcgcgctcgaggtcctgcatctgcagctcaagaccctggggctgagttcaaaacccatcgttgaccgctttgtggagtccttcaaagccatgtggtctctgaatggccacagcctgagcaaggtgttcacaggcagcagagccctggaagggaaggccaaggtggggaagctgaaggatggagcccggtccatgtctcgaaccatccagtccaacttcttcgacggggtgaagcaggaggccatcaagctgctgctggttggggacgtctacggcgaggaggtggcagacaaagggggcatgctgctggacagcacggcgctcctggtgactcccaggatcctgaaagctatgactgagcgtcagtccgaattcacaaatttcaagcggatccggattgctatggggacctggaacgtgaacggaggaaagcagttccggagcaacgtgctcaggacggcggagctgacagactggctgctcgactcgccccagctctcgggagctaccgactcccaggatgacagcagcccagctgacatatttgctgtggggtttgaagagatggtggaattgagcgcagggaatattgtcaatgccagtactaccaacaagaagatgtggggtgaacagcttcagaaagccatctcacgctctcatagatacattctgttgacttcggcacagctggtgggcgtctgtctttatatctttgtacgtccataccatgtcccgttcatcagggacgtagccatcgacacagtgaagacgggcatggggggcaaggcggggaacaagggcgccgtcggcatccgcttccagttccacagcaccagcttctgcttcatatgtagtcacctgacggccgggcagtcccaggtgaaggagcggaatgaagactacaaggagatcacccagaaactctgcttcccaatggggagaaatgttttttctcatgattatgtattttggtgtggcgatttcaactaccgcattgatcttacttatgaagaagtcttctattttgttaaacgccaagactggaagaaacttctggaatttgatcaactacagctacagaaatcaagtggaaaaatttttaaggactttcacgaaggagccattaactttggacccacctacaagtatgacgttggctcagccgcctacgatacaagcgacaaatgccgcacccccgcctggacagacagggtgctgtggtggaggaagaaacatccctttgataaaacagctggagaactcaaccttctagacagtgatctagatgttgacaccaaagtcagacacacctggtctcctggtgccctgcagtattatggtcgtgcggagctacaagcgtctgatcacagacctgtgctggcgatcgtggaggtggaagttcaggaagtcgatgtgggtgctcgggagagggttttccaggaagtgtcctccttccagggccccctggatgccactgttgtagtaaaccttcaatcaccgaccttagaagagaaaaacgagtttccagaggacctgcgtactgagctcatgcagaccttggggagttatgggacaattgttcttgtcaggatcaaccaagggcagatgctggtaacttttgcagacagtcactcggctctcagtgtcctggacgtggacggtatgaaggtgaaaggcagagcagtgaagattagaccgaagaccaaggactggctgaaaggtttgcgagaggagatcattcggaaacgagacagcatggcccccgtgtctcccactgccaactcctgtttgctggaggaaaactttgacttcacaagtttggactatgagtcagaaggggatattcttgaagacgatgaagactacttggtggatgaattcaatcagcctggggtctcggacagtgaactcgggggagacgacctctctgatgtccccggccccacagcactggctcctcccagcaagtcacctgctctcaccaaaaagaagcagcatccaacgtacaaagatgacgcggacctggtggagctcaagcgggagctggaagccgtcggggagttccgccaccgttctccgagcaggtctctgtcggtccccaaccggcctcggccacctcaacccccgcagagacccccccctccaaccggtttaatggtgaaaaagtcggcttcagatgcgtccatctcctccggcacccatggacagtattcaattttgcagacggcaagacttctaccaggagcacctcagcaacctcccaaggctcggactggaataagtaaaccttataatgtcaagcagatcaaaaccaccaatgcccaggaggcagaagcagcaatccggtgtctcctggaagccagaggaggtgcctccgaagaagccctaagtgccgtggccccaagggaccttgaagcatcctctgaaccagagcccacaccgggggcagccaaaccagagaccccacaggcgcccccactccttccccgtcggcccccacccagagttcctgccatcaagaagccaaccttgagaaggacaggaaagcccctgtcaccggaagaacagtttgagcaacagactgtccattttacaatcgggcccccggagacaagcgttgaggcccctcctgtcgtgacagcccctcgagtccctcctgttcccaaaccaagaacatttcagcctgggaaagctgcagagaggccaagccacaggaagccagcatcagacgaagcccctcctggggcaggagcctctgtgccaccacctctggaggcgccgcctcttgtgcccaaggtacccccgaggaggaagaagtcagcccccgcagccttccacctgcaggtcctgcagagcaacagccagcttctccagggcctcacttacaatagcagtgacagcccctctgggcacccacctgccgcgggcaccgtcttcccacaaggggactttctcagcacttcatctgctacaagccccgacagcgatggcaccaaagcgatgaagccagaggcagccccacttcttggtgattatcaggaccccttctggaaccttcttcaccaccctaaactgttgaataacacttggctttctaagagctcagaccctttggactcaggaaccaggagccccaaaagagatcccatagacccagtgtcagctggcgcttcagctgccaaggcagagctgccaccagatcatgaacacaaaaccttaggtcactgggtgacaatcagtgaccaagaaaagaggacagcactgcaggtgtttgacccactggcaaaaacatgactgagcagctttgaaggctgcagtcctatagaatgcataccttcctccctctagacatccctccaccagaagagacatctatttaaaggcacactggccaaaacgtttgtgcatctgtcactctcgtgtagtttacaaaaatcgtgtctcttattcagtaagatggttactcagccaccaaaatatatttcactcaaggcttgtacatctgaagtttgctcttcaaggaatgggaaccttcctgttaaattcggtgtatggattttaagaaaggaatctagccaatgaggtccaagaagttctcacccattgaatttttaaatggctgttcagttcatgttgtacgtgatggagatttgtcttttgttttatttgcattttacagatttggtataacattttggggagccacctgaaggttgatgtataaagtaaggattagagaaagaggtcgttgtgaccattagtagctgtcctggcccacttaaacaaggttacaaaaaatcagagtcggaagcagccaaataggtcaacctaatgactagactgtacattcccatgagccttcatgtttaagtgtgtacatgtgcgttaaccttgatgatgcgtgaatcccgagggagccggtggcatacaccgttagcttaaccttagcttaaactagctgaaggctcctgtgccatgtcttagacattgcatgccctatcaattactataatcctgagccatggtgtgctactgaaaccaatttttatccaccatctagtccttattaaatgaaacctcacggaaaaaaaaaaaaaaaaaaaaaaaaaaaaaaaaaaaaaaaaaaaaaaaaaaaaaaaaaaaaaaaaaaagaagaaaaaagaagaaaaggaagggagaggagagaaacagaaaaacaacagaggaaacaagaacaacgacgcgatagcaagcgggagcgcgcccactctccgaagcagaggagtaaccgcgtaggcagcgaaagagataacacaaaacgggagacatgagacaaagaagctgggggcaacacaacaaggaggcggacaccgcggcgacaacc

SEQ ID NO: 39620 - DNA, 3662 bp, Homo sapiens
  misc_feature (3)..(3): n is a, c, g, or t
  misc_feature (6)..(6): n is a, c, g, or t
ggncgngcggggagctgtcgcgggcagcgcgccctcgggaggacgtggccccggcccccgcccgcagtgggcccgaccctcatggccctgagcaaagggctgcggctgctggggcgcctgggggccgagggggactgtagcgtgctgctggaggcgcgcggccgcgacgactgcctgctgttcgaggccggcacggtggccacgctggctccagaagaaaaggaagtcattaaaggacagtatggcaagctcacggacgcgtacggctgcctgggggagctgaggctgaaatctggtggcacgtctctgagcttcctggtgttggtgacaggctgcacatctgtgggcagaattccagatgctgaaatctacaaaatcactgccactgacttttaccctcttcaggaagaggccaaggaggaggaacgcctcatagctttgaagaaaatcctcagctcgggggtgttctatttctcatggccaaacgatgggtctcgctttgacctgactgtccgcacgcagaagcagggggatgacagctctgaatgggggaactccttcttctggaaccagctgttgcacgtgcccttgaggcagcaccaggtgagctgctgtgactggctgctgaagatcatctgcggggtggtcaccatccgcaccgtgtatgcctcccacaagcaggccaaggcctgcctcgtctctcgcgttagctgtgagcgcacaggcactcgcttccacacccgtggcgtgaacgacgacggccatgtgtccaacttcgtggagacagagcagatgatttacatggacgatggagtgtcatcttttgtccagatcagaggctccgttccgctgttctgggaacagccagggcttcaggttggctcccatcatctgagactccacagaggcctggaagccaatgcccctgctttcgacaggcacatggtgcttctgaaggagcagtacgggcagcaggtggtcgtgaaccttctgggaagcagaggcggagaggaggtgctcaacagagccttcaagaagctgctctgggcttcttgccacgcgggcgacacgcctatgatcaattttgacttccatcagtttgccaaaggtgggaagctagagaaattggagaccctcttgaggccacagttaaagctgcactgggaagacttcgatgtgttcacaaagggggagaacgtcagtccacggtgaggctcgctgcgcactgtgccgcgtcttctgctggggggaagcgtcagtccacgttttcagaaaggcactttgcggatgaactgtcttgactgcctggaccgaaccaacactgtgcagagcttcatcgcgctcgaggtcctgcatctgcagctcaagaccctggggctgagttcaaaacccatcgttgaccgctttgtggagtccttcaaagccatgtggtctctgaatggccacagcctgagcaaggtgttcacaggcagcagagccctggaagggaaggccaaggtggggaagctgaaggatggagcccggtccatgtctcgaaccatccagtccaacttcttcgacggggtgaagcaggaggccatcaagctgctgctggttggggacgtctacggcgaggaggtggcagacaaagggggcatgctgctggacagcacggcgctcctggtgactcccaggatcctgaaagctatgactgagcgtcagtccgaattcacaaatttcaagcggatccggattgctatggggacctggaacgtgaacggaggaaagcagttccggagcaacgtgctcaggacggcggagctgacagactggctgctcgactcgccccagctctcgggagctaccgactcccaggatgacagcagcccagctgacatatttgctgtggggtttgaagagatggtggaattgagcgcagggaatattgtcaatgccagtactaccaacaagaagatgtggggtgaacagcttcagaaagccatctcacgctctcatagatacattctgttgacttcggcacagctggtgggcgtctgtctttatatctttgtacgtccataccatgtcccgttcatcagggacgtagccatcgacacagtgaagacgggcatggggggcaaggcggggaacaagggcgccgtcggcatccgcttccagttccacagcaccagcttctgcttcatatgtagtcacctgacggccgggcagtcccaggtgaaggagcggaatgaagactacaaggagatcacccagaaactctgcttcccaatggggagaaatgttttttctcatgattatgtattttggtgtggcgatttcaactaccgcattgatcttacttatgaagaagtcttctattttgttaaacgccaagactggaagaaacttctggaatttgatcaactacagctacagaaatcaagtggaaaaatttttaaggactttcacgaaggagccattaactttggacccacctacaagtatgacgttggctcagccgcctacgatacaagcgacaaatgccgcacccccgcctggacagacagggtgctgtggtggaggaagaaacatccctttgataaaacagctggagaactcaaccttctagacagtgatctagatgttgacaccaaagtcagacacacctggtctcctggtgccctgcagtattatggtcgtgcggagctacaagcgtctgatcacagacctgtgctggcgatcgtggaggtggaagttcaggaagtcgatgtgggtgctcgggagagggttttccaggaagtgtcctccttccagggccccctggatgccactgttgtagtaaaccttcaatcaccgaccttagaagagaaaaacgagtttccagaggacctgcgtactgagctcatgcagaccttggggagttatgggacaattgttcttgtcaggatcaaccaagggcagatgctggtaacttttgcagacagtcactcggctctcagtgtcctggacgtggacggtatgaaggtgaaaggcagagcagtgaagattagaccgaagaccaaggactggctgaaaggtttgcgagaggagatcattcggaaacgagacagcatggcccccgtgtctcccactgccaactcctgtttgctggaggaaaactttgacttcacaagtttggactatgagtcagaaggggatattcttgaagacgatgaagactacttggtggatgaattcaatcagcctggggtctcggacagtgaactcgggggagggcaagtgccacctctctctggggaatgccatggcagcatgtcgcagcttccagagagccctagaactggatcataaaaatgctcaggcacaacaagagttcaagaatgctaatgcagtcatggaatatgagaaaatagcagaaacagattttgagaagcgagattttcggaaggttgttttctgcatggaccgtgccctagaatttgcccctgcctgccatcgcttcaaaatcctcaaggcagaatgtttagcaatgctgggtcgttatccagaagcacagtctgtggctagtgacattctacgaatggattccaccaatgcagatgctctgtatgtacgaggtctttgcctttattacgaagatcgtattgagaaggcagtcagttttcgtacaggctctcaggatg

SEQ ID NO: 39621 - DNA, 3305 bp, Homo sapiens
  misc_feature (3)..(3): n is a, c, g, or t
  misc_feature (6)..(6): n is a, c, g, or t
ggncgngcggggagctgtcgcgggcagcgcgccctcgggaggacgtggccccggcccccgcccgcagtgggcccgaccctcatggccctgagcaaagggctgcggctgctggggcgcctgggggccgagggggactgtagcgtgctgctggaggcgcgcggccgcgacgactgcctgctgttcgaggccggcacggtggccacgctggctccagaagaaaaggaagtcattaaaggacagtatggcaagctcacggacgcgtacggctgcctgggggagctgaggctgaaatctggtggcacgtctctgagcttcctggtgttggtgacaggctgcacatctgtgggcagaattccagatgctgaaatctacaaaatcactgccactgacttttaccctcttcaggaagaggccaaggaggaggaacgcctcatagctttgaagaaaatcctcagctcgggggtgttctatttctcatggccaaacgatgggtctcgctttgacctgactgtccgcacgcagaagcagggggatgacagctctgaatgggggaactccttcttctggaaccagctgttgcacgtgcccttgaggcagcaccaggtgagctgctgtgactggctgctgaagatcatctgcggggtggtcaccatccgcaccgtgtatgcctcccacaagcaggccaaggcctgcctcgtctctcgcgttagctgtgagcgcacaggcactcgcttccacacccgtggcgtgaacgacgacggccatgtgtccaacttcgtggagacagagcagatgatttacatggacgatggagtgtcatcttttgtccagatcagaggctccgttccgctgttctgggaacagccagggcttcaggttggctcccatcatctgagactccacagaggcctggaagccaatgcccctgctttcgacaggcacatggtgcttctgaaggagcagtacgggcagcaggtggtcgtgaaccttctgggaagcagaggcggagaggaggtgctcaacagagccttcaagaagctgctctgggcttcttgccacgcgggcgacacgcctatgatcaattttgacttccatcagtttgccaaaggtgggaagctagagaaattggagaccctcttgaggccacagttaaagctgcactgggaagacttcgatgtgttcacaaagggggagaacgtcagtccacggtgaggctcgctgcgcactgtgccgcgtcttctgctggggggaagcgtcagtccacgttttcagaaaggcactttgcggatgaactgtcttgactgcctggaccgaaccaacactgtgcagagcttcatcgcgctcgaggtcctgcatctgcagctcaagaccctggggctgagttcaaaacccatcgttgaccgctttgtggagtccttcaaagccatgtggtctctgaatggccacagcctgagcaaggtgttcacaggcagcagagccctggaagggaaggccaaggtggggaagctgaaggatggagcccggtccatgtctcgaaccatccagtccaacttcttcgacggggtgaagcaggaggccatcaagctgctgctggttggggacgtctacggcgaggaggtggcagacaaagggggcatgctgctggacagcacggcgctcctggtgactcccaggatcctgaaagctatgactgagcgtcagtccgaattcacaaatttcaagcggatccggattgctatggggacctggaacgtgaacggaggaaagcagttccggagcaacgtgctcaggacggcggagctgacagactggctgctcgactcgccccagctctcgggagctaccgactcccaggatgacagcagcccagctgacatatttgctgtggggtttgaagagatggtggaattgagcgcagggaatattgtcaatgccagtactaccaacaagaagatgtggggtgaacagcttcagaaagccatctcacgctctcatagatacattctgttgacttcggcacagctggtgggcgtctgtctttatatctttgtacgtccataccatgtcccgttcatcagggacgtagccatcgacacagtgaagacgggcatggggggcaaggcggggaacaagggcgccgtcggcatccgcttccagttccacagcaccagcttctgcttcatatgtagtcacctgacggccgggcagtcccaggtgaaggagcggaatgaagactacaaggagatcacccagaaactctgcttcccaatggggagaaatgttttttctcatgattatgtattttggtgtggcgatttcaactaccgcattgatcttacttatgaagaagtcttctattttgttaaacgccaagactggaagaaacttctggaatttgatcaactacagctacagaaatcaagtggaaaaatttttaaggactttcacgaaggagccattaactttggacccacctacaagtatgacgttggctcagccgcctacgatacaagcgacaaatgccgcacccccgcctggacagacagggtgctgtggtggaggaagaaacatccctttgataaaacagctggagaactcaaccttctagacagtgatctagatgttgacaccaaagtcagacacacctggtctcctggtgccctgcagtattatggtcgtgcggagctacaagcgtctgatcacagacctgtgctggcgatcgtggaggtggaagttcaggaagtcgatgtgggtgctcgggagagggttttccaggaagtgtcctccttccagggccccctggatgccactgttgtagtaaaccttcaatcaccgaccttagaagagaaaaacgagtttccagaggacctgcgtactgagctcatgcagaccttggggagttatgggacaattgttcttgtcaggatcaaccaagggcagatgctggtaacttttgcagacagtcactcggctctcagtgtcctggacgtggacggtatgaaggtgaaaggcagagcagtgaagattagaccgaagaccaaggactggctgaaaggtttgcgagaggagatcattcggaaacgagacagcatggcccccgtgtctcccactgccaactcctgtttgctggaggaaaactttgacttcacaagtttggactatgagtcagaagggggatattcttgcagcacgatgatagactactcggcggatctctagactcgccggatcctctagctgtctaactctaccttaagttctatcgcgtgttaccccccggacgcttaaccgctgccctataagcc

SEQ ID NO: 39622 - DNA, 2052 bp, Homo sapiens
  misc_feature (3)..(3): n is a, c, g, or t
  misc_feature (6)..(6): n is a, c, g, or t
ggncgngcggggagctgtcgcgggcagcgcgccctcgggaggacgtggccccggcccccgcccgcagtgggcccgaccctcatggccctgagcaaagggctgcggctgctggggcgcctgggggccgagggggactgtagcgtgctgctggaggcgcgcggccgcgacgactgcctgctgttcgaggccggcacggtggccacgctggctccagaagaaaaggaagtcattaaaggacagtatggcaagctcacggacgcgtacggctgcctgggggagctgaggctgaaatctggtggcacgtctctgagcttcctggtgttggtgacaggctgcacatctgtgggcagaattccagatgctgaaatctacaaaatcactgccactgacttttaccctcttcaggaagaggccaaggaggaggaacgcctcatagctttgaagaaaatcctcagctcgggggtgttctatttctcatggccaaacgatgggtctcgctttgacctgactgtccgcacgcagaagcagggggatgacagctctgaatgggggaactccttcttctggaaccagctgttgcacgtgcccttgaggcagcaccaggtgagctgctgtgactggctgctgaagatcatctgcggggtggtcaccatccgcaccgtgtatgcctcccacaagcaggccaaggcctgcctcgtctctcgcgttagctgtgagcgcacaggcactcgcttccacacccgtggcgtgaacgacgacggccatgtgtccaacttcgtggagacagagcagatgatttacatggacgatggagtgtcatcttttgtccagatcagaggctccgttccgctgttctgggaacagccagggcttcaggttggctcccatcatctgagactccacagaggcctggaagccaatgcccctgctttcgacaggcacatggtgcttctgaaggagcagtacgggcagcaggtggtcgtgaaccttctgggaagcagaggcggagaggaggtgctcaacagagccttcaagaagctgctctgggcttcttgccacgcgggcgacacgcctatgatcaattttgacttccatcagtttgccaaaggtgggaagctagagaaattggagaccctcttgaggccacagttaaagctgcactgggaagacttcgatgtgttcacaaagggggagaacgtcagtccacggtgaggctcgctgcgcactgtgccgcgtcttctgctggggggaagcgtcagtccacgttttcagaaaggcactttgcggatgaactgtcttgactgcctggaccgaaccaacactgtgcagagcttcatcgcgctcgaggtcctgcatctgcagctcaagaccctggggctgagttcaaaacccatcgttgaccgctttgtggagtccttcaaagccatgtggtctctgaatggccacagcctgagcaaggtgttcacaggcagcagagccctggaagggaaggccaaggtggggaagctgaaggatggagcccggtccatgtctcgaaccatccagtccaacttcttcgacggggtgaagcaggaggccatcaagctgctgctggttggggacgtctacggcgaggaggtggcagacaaagggggcatgctgctggacagcacggcgctcctggtgactcccaggatcctgaaagctatgactgagcgtcagtccgaattcacaaatttcaagcggatccggattgctatggggacctggaacgtgaacggaggaaagcagttccggagcaacgtgctcaggacggcggagctgacagactggctgctcgactcgccccagctctcgggagctaccgactcccagggtgagggcagtgactttgggggagacaaaatccaattgcacctaacctgacatgtcacgcttgaccctttagtggccatcgtcttgtggaatttcatctttggtgtcttccctcctcacaatgtctaaatagcaccatggcctgactctcaagaatgctgcctcgcaagtaactgacctttttcctttcccagatgt

SEQ ID NO: 39623 - DNA, 858 bp, Homo sapiens
  misc_feature (3)..(3): n is a, c, g, or t
  misc_feature (6)..(6): n is a, c, g, or t
ggncgngcggggagctgtcgcgggcagcgcgccctcgggaggacgtggccccggcccccgcccgcagtgggcccgaccctcatggccctgagcaaagggctgcggctgctggggcgcctgggggccgagggggactgtagcgtgctgctggaggcgcgcggccgcgacgactgcctgctgttcgaggccggcacggtggccacgctggctccagaagaaaaggaagtcattaaaggacagtatggcaagctcacggacgcgtacggctgcctgggggagctgaggctgaaatctggtggcacgtctctgagcttcctggtgttggtgacaggctgcacatctgtgggcagaattccagatgctgaaatctacaaaatcactgccactgacttttaccctcttcaggaagaggccaaggaggaggaacgcctcatagctttgaagaaaatcctcagctcgggggtgttctatttctcatggccaaacgatgggtctcgctttgacctgactcccaagcctagtcccttttacatcaccatcttctcagacttcttgcctattcttaaaatatgttttggttaatgattgaattaggacatcagcttaagcaattcctgtaacggtttaacgttgttgaagttcaaggcacataataaaattctccctgatgtgtgtgtaagtataaacaaagtaatgtatcaaagcgttcactttataatgaagtcatttcattgggaaggaaagctgcaaagattattgggggactagtgattaataaaatcctgtaatatttttgaagtgaaaatttgtactgaaattgtacatgatacctattaaatgtttttgtctttttttaaa

SEQ ID NO: 39624 - DNA, 466 bp, Homo sapiens
gtctgcgttccatcaggaagaagatagatccaattaaaaaaaattaaaaccaatttaaaaaaaaaaagaacacaggagattccagtctacttgagttagcataatacagaagtcccctctactttaacttttacaaaaaaagtaacctgaactaatctgatgggaagaagacgcatcttgctccccatcaggattgaattaggacatcagcttaagcaattcctgtaacggtttaacgttgttgaagttcaaggcacataataaaattctccctgatgtgtgtgtaagtataaacaaagtaatgtatcaaagcgttcactttataatgaagtcatttcattgggaaggaaagctgcaaagattattgggggactagtgattaataaaatcctgtaatatttttgaagtgaaaatttgtactgaaattgtacatgatacctattaaatgtttttgtctttttttaaa

SEQ ID NO: 39625 - DNA, 219 bp, Homo sapiens
gtcggcctcctgtgctcagatccgtgtctgacacgctcacgtgtggaacagaccattgtactcatgccccgccatgtcctccagatgacgcggacctggtggagctcaagcgggagctggaagccgtcggggagttccgccaccgttctccgagcaggtctctgtcggtccccaaccggcctcggccacctcaacccccgcagagacccccccctccaa

SEQ ID NO: 39626 - DNA, 428 bp, Homo sapiens
ggcaaagccaaaaacggctctcagggcaaggcttcctgggctcaattcatgaccatgggctttgggaccaggggaagctaaagatcatcatcacttctgcaaaacagcggacctcgaagacgggaaacaacaaggccagaataggagcgagaagagatgaacttccctctcgaagtggttctctgagccccccggtaagagaaataatgaaggaggaagcgagagaggattcgtggtgtgtttagtaaaacaaggaagggctacagatacgctggaacaaagcctcagagcttgctttccaagtagcagtccagatacacaaatgggtcagctctgactgtgtaggcatcaccccttaggaaacctgaccacagaatgcccttgcaaagaaacggagacaaaaatagagtccttccatcctgcagtgg

SEQ ID NO: 39627 - DNA, 420 bp, Homo sapiens
gacggcccctcccttttcctcttccatcatagctgcctgcctgtccttgggaagcatctgatttgcaggtacctgggtttcccagcccggcgcttgctggctgcaagatagtgtgattgtcgcactgacactgcacaggctgcaagctgaggggtcgatgtggcccaggaagggcgggccctgtgcagcttccctggctatggatgaaggtgcaggctgcggaaggcacgactgttcctgcagggaatgcgtctcactggagaagacgaggtagcaggggaacagttaccaccttcaagcagagacggagccttggcagggccgcccaggggagccgtgtcggaatcaaatgtcctgacagcctagagagccagccgtggtgtgctgggctgtgcattttaggagaaagttagtacagcc

SEQ ID NO: 39628 - DNA, 460 bp, Homo sapiens
taacctctgtataggactgtcttaaactgtctctcatgcttgcaaattttagttagtaaattacatttattgggagtggggaaaactaatcattttttatatacttatctttaaaaataatttctccaggcctagtaattctggcaattctggttccttttaccttttcttaggatacaaagctgccactagtatgtttgtgttcaaaatgtagacttcatactctgcaaaaattgatcaaaacctgtgtgcctgaacagtttatctgcctttaccccagaatatttttggagtacatactttaatttcttcttatttcttgattattcttctcaagagagagaggattaaaaattgctttgagactcccagcgggcactcctcatagtagcccaaggagaaatgtagatttgttcatggtggaatcactcaaacgttaagttgctaattataaaaaggg

SEQ ID NO: 39629 - DNA, 225 bp, Homo sapiens
tactaaaattaattgtgctatggttatgaaataggatattatacagtcattaaaacagtcgaagacattaaaaactcataatttaataagacagtaattttaaaaactgtatatataatatatgactcccattctgggaaataaaatacatgtatacgttgctaggagcataagaaaggtgtgcagagaggtatcaatcagggtctcaatgagaaatatagtgat

SEQ ID NO: 39630 - DNA, 375 bp, Homo sapiens
atatggcttaggaagtgggggcctaggatctttataggttttggctctcgggaggctttgtttgggagtgtgtgggtctctgggtaacagagagtaatactggtgtgttttatcctttggggccccctgttggaaggtggataacataattttcattttttctttttgcttctcctcatccctccttacacacactttctgagcttctctaagaagctcgttcgtgggatggtccttccaatttcctatcttttgtaatttccttgtgatatctggctgttagtaacaaaatgaagctttaacattcactgcctaagaggatcttctaaatctaggccagcatattttctcatttgttctttcaacctgtctaaa

SEQ ID NO: 39631 - DNA, 316 bp, Homo sapiens
gacacaaaagaccccattatacctgagtacaataaatgcactttaaaatagagataaaggccagatgcggggctcacgcctgttatcccagtactttgggaggccaaggctggcagatagcttgagtccaggagtttgagaccagcctgggcaacactgtgaaaacctgtctctacaaaaaaaatacaaaaaaattagctgggcattgtggcacagcccatggtcccagctacttgggaagctgaggtgggaagatcacttgagcccgggaagccaagcttgcagtgagccgagactgtgccgctgcactccagcc

SEQ ID NO: 39632 - DNA, 474 bp, Homo sapiens
gccagcaatgcatttactgcctttggaaggaggcatttcaggggtgcagcatggtagaagagaggtgattcagtctgctattcttgtcaatgcaggtgaaaagcctaatgctatttgctaggcagaagagaccttatctctgaaatgcccttaataggatatctctggctaaggattactatggtaagtagaacacgggatctctgaggcacagatggcttcctggagaatgtcaatggagctatccaaatctctggggtgtaaaatgaagatatttgcaatgctcccctttgtgtgtggaaacccacaaaccccagtataaacctcatctattctgggccagaggtgcatttctgaggcagtaagaagtgacgtggggggctgcccttcccttctctgcttcacttgagccttctgactgcctgtatccttgagattatttagtaaagcttggtactagttaagaagatctct

SEQ ID NO: 39633 - DNA, 309 bp, Homo sapiens
gtgtaatgaattgataccattttgagagcagctggataatgtaaagaaacaaactgagtttaaattaatttttagttgttcaaagttgaaaactttaactggaaatacttctgatcatagtgtgacatgaagttaatatttttacctatgaaagtggttacgtatatatatatacacatatatgtatagactgttacagataattgtataaatttgcttgtggagctagtctatatttgaagttatttgtctctgatttctgattttcaaagcttaatgagagttcttctagaaataacccagccccca

SEQ ID NO: 39634 - DNA, 414 bp, Homo sapiens
ctagtatcaccctacttgacagatgagaaaactgagacccagagagtgacttgcccaatatcacacagctgttaactgacaggactgggatttgaactcagctcatgctcttaaccaccacaagtccccaggctggaaactgaaaaagttggggggtcaggttgctgcgagtacctaatgggaaggagtcacagagagacatgagtgaagacttggggacagcagtcctgggaaagtcaatgagggctgaaaatttggagttgccccaggagagagggcagaaaaggggataaccatcccccagcactccctgcccccacagcccagacttgaccaactcccagctgggcctgggacttccagatatggggccccacccttgcaggccttggggacgctgaagatattgactat

SEQ ID NO: 39635 - DNA, 215 bp, Homo sapiens
ttattctataagcttttccttttaacattttttatttttttactttttaaacttttttcttaaacatacacattagcctaggcttacagagggtcaggatcatcaatatcactgtcttccacctccacatcttgtcccaatgcagctggcacctcctgtgatcgcaatgccttcttctggaatccctcctgaaggacctgcctgaggctctttta

SEQ ID NO: 39636 - DNA, 396 bp, Homo sapiens
cccaggtcaggcctcacggtggcctctccaggatgagctcctgccctccgatggcatctccaggccccaaatggtctccggtcggtgggctcctccacgccaaggttgggcctcccggcgaccgcccaggccaagttgtcctgaagtcgggctctcccggctgcatctccaggccggactctggcccgactccaggtcccaacaacgtctttggactcagctcctgcccagctcccagcggccctggtaggcccacaacttccctaagccaagctccccaggcccagctcaggcctcgcggtggcctctccaggctcagctcctgggccctccgatgacatcttgcaggccccaaatggcttccggtcggtggggttcctctaggcccagcttggg

SEQ ID NO: 39637 - DNA, 280 bp, Homo sapiens
aaaacaaaaaaattcaattttttttcaaaaaaaggtacttatgaagaatgagacaaaaaccaaaactgatgaaaataaaagatctagatgataaatgatagaaagcagaaaaggaagcaaaataaaatggaaacacataaagtatttaaaagtattagagaaaaaatgagactcttatatacaatcagcaatctaagagccacagagtagtttttcccaaagaagaaaattaaaataattatacagaagtttataaatgtaattcaagtaaatatttcca

SEQ ID NO: 39638 - DNA, 406 bp, Homo sapiens
gcctcatatcatggcccagagtgtaactgaaattatgaaagcaaggaagtccattcaatggtgagccaacagagctagcagtgccttggcatcaacgctgccatgagtttgtgccttcattacacaaatgtcctcttcttggagccacgttattatacaatatgtgtccttaaggccttcaattaacatataaccttaagttcatagttttaagttcttaaatatgtttgtatgtttattgttatcatcttatactttgatttttataagtatatatcacatatattatatagtatatataataaatgtgtatatatatttctatatgtatatagtataaatatatgcatataaaatttgcaaacttttataaccttattctagaatttcacactggcataaaatg

SEQ ID NO: 39639 - DNA, 624 bp, Homo sapiens
agagagagctgaatggttggtctgaaagatctgtatgacaggggtgagcatagatgacaggaagttgttttccttccacagcacattatgcttcgaatctctttctgtggagcattaaggcaatgattgaaatctgatgctctgaggaaacttttggaggggatgggtatattcactatcttgattgtggtgatggtttcattggtgtatacatatgtcagacttatcagattgtacactgtaaatatgtgcacttgattaaatgttaaacctcaattaaaaaagaaaagaggctgagtgtgttagctcatgcctgtaatccccagcactttgaggggccatggcaggtggatcgccgaggccaagtttgagaccagtctgggcaacatagtaagaccttgtctctacaaaaaaagtaaaaacaaaattagcccgatgccctggcaagaacctgtagtcccagctatttgggagactgaggtgggaggatcacttgagcctgggaggtcaaggctgcaatgagctgagatcacaccactgcactccatgcactccagcctgggtgacagtgagatcctgtctaaaacacacacatgcacacatataagcacacacacaaataaa

SEQ ID NO: 39640 - DNA, 808 bp, Homo sapiens
cacaggtagtattacatgtctagtcacttgctatatatctatatttcttcactattcagtgtccacaccccttatttgtcaatgagatatttctttgctagattttaagttctaagagggcaaggactgtgtgttaaacaagttcagtgcaggttagaaggcaagcccagcaggtacgtgctgagtaatactttcctgatgttttgaccaaccacatgcaagctcttttcatataattaggatgaatctaattttaaaatgagcaaccgcgtgtcctcagatgaaccagaatatacacttacaaggccctgctgtcctgcattataaataagggaataggttgtcctgcagaaaagctctgctgttttctttttccgtaaaaaaaaaaaaaaaaaaaaaaaaaaaacagaaagaaacgcatccacacatataaaaactgagatagacgatcttctcaattcctcaactaagttgggaagaatcatggccccaaagtggatgttctctgcaaagatgaaacctagcaaaaatccacaatctgatgatttgtaaggaaacttgcttaagaatggcttacggcaaaaagacccagagcttggcagcctgattcttcaacttgtatggcagcaataacttccttaggtgacaggttcaaatttctgcagggatgatattgtgagactgttcagaaagtgtcaagctccatcgctttttaaattttcttttcactgataggaggaactcactggacacagagctcctgtggcagctttcacaatgcctggctttctttggccttttatttctt

SEQ ID NO: 39641 - DNA, 128 bp, Homo sapiens
tagcactttaaagttgtcattccattactatctattttgcaatggttctgataagaaatttttaaaaaaattgttctcttgtatgtgacgtatcttttattttgtctgcttttaagaggtttttattt

SEQ ID NO: 39642 - DNA, 539 bp, Homo sapiens
cggtgtggctcagtccctatgccgtgtgtccctgtggggccctccagcagtcctctgtcccaatctggcaactccatacatttgcccacatggctctggatttcggatgggtgtgtgtgtgtgtgtgtgtgtgtgtttgattgagtgttctcttgtcccctccttcatggcccctcactatagagcaagcttgtccaacccgtggcctaagggccgcatatggcccaggatggttttaaatgcagcccaacacaaattggtaaactttcttaaaacattaagagatttttttgtgatttttttccagcttattagctatcgttagtgtgttagtgtattttacgtgtgagccaccgcgcctggcctgagtgttttattggattacattaaacacatgtattagttgtcagaaaaatgacatatttacattcccatttgggaatttgatctctttctctgttattcaagccttttatatcctttggtgacctgttttttccatctacatagttctcattaagttcctagtatttacagat

SEQ ID NO: 39643 - DNA, 788 bp, Homo sapiens
cggtgtggctcagtccctatgccgtgtgtccctgtggggccctccagcagtcctctgtcccaatctggcaactccatacatttgcccacatggctctggatttcggatgggtgtgtgtgtgtgtgtgtgtgtgtgtttgattgagtgttctcttgtcccctccttcatggcccctcactatagagcaagcttgtccaacccgtggcctaagggccgcatatggcccaggatggttttaaatgcagcccaacacaaattggtaaactttcttaaaacattaagagatttttttgtgatttttttccagcttattagctatcgttagtgtgttagtgtattttacgtgtggcccaagacaattcttcttccaatgcggccagggaagcgaaaagattggccacccctgccatagaggtagtaaatagggacagaggttagtactggggctgggcgtgctacttgcaagtgattcgattgcaaatccaccaccttcccacagctgaaccatgactccccataaataccaggggaagtcgaccctcagtgatcagaggacctctgatccttttcactgatctgggtggtcagaaacccccaaaagccttgagaaacactctgagtcctttggtcatttgcagtcagcttgcagtcaccaggcctcccgttctcccttccatccttagagcactccacggctacctggctactgtcacacatgcagggtgaagggggagagcacctctcagaacccaccggtcagcactgccacagccttacgactccagagt

SEQ ID NO: 39644 - DNA, 831 bp, Homo sapiens
tccatagcaacaaataccagccgatgccagttattctcaagtgtgtcttcccatccctgactccaccagtctcctgttctgtacttccaattgcctactggatctctccttttgaatgttgcgtaaactcagtgtgtctcaaatagttacccaacccaatcctccacactgaaatattttctggcagtgctacaccttttgcagtgatactgtctcaggcactcacacagctgcagtactctaatactctgccactggccccttggcagtcgacaagagccagtgatgttgggaacagaaaagaagggatagacattagaatcatgttacatgatggagaaagggttcaagataagtatcagtgcaggacaggacttggagaatggttagttattggaatgaatggcaaatccaacaatctgaagacaggagcagtttgagcaaaggtgatcccaggactttcagcctgtcctgcatgtttctacggtttcgtctacagtgactggatcagttctggagtctcccagttctcattatccacctgggggctggggataagactccagagagtcctaggacaagctggcctttgggaatgcagtagatagttctcatttctctgattcactctttaatttattgaataaacactgtcaagtgcttcttatgacaaggcactctgctagatgctatgtgggacataatgaagtttacagctttaaaaaaaaaaagtcattattttggccaggcacgatggctcacgcctataatcccaacactttgggaggccaaggttgggggatcacttgaagccaggagtgaaaagaaaga

SEQ ID NO: 39645 - DNA, 708 bp, Homo sapiens
  misc_feature (672)..(672): n is a, c, g, or t
  misc_feature (674)..(674): n is a, c, g, or t
gaagaagagaagaagggggctttatttgtattttttaaatgttctgcttggagataattacagataagcacacaattttaagaacttatgcagagataccctcacccagtttcccccaaaggtaacatcttatgtcactatagcacaacattacaaccaggaaatcagtgatacaatccatagtccttacacaggtgccgtcagttttacatgcactcatttgtgtgtgtgtgtgcatctgtgtgtgcatttaatttgatggaattttgtcacatgcattgattcatgtggccaccaccacagttaagatacagaatagtttcatcacaaggttcctttgcactaaccttttacagctacacccacctgcctctcccccaatctcacctctgacaaccactaatctgttctccatctctataattttgtcattttaagaatgcaatataaatggagtcatacagtatgtaaccttttatgattggctttgttcactcaatagaattctctggggcctcatccaagtggctgtgtatatcagtagttgctgagtcctattccataatacagcactatggtgtgtttagccattcattggttgaaggacatctgagcggtttccagattttagctattgcaaataaagctgcaatgagcattcatatacaaaananaaaataaaaaattcacttgccatcccttgtacat

SEQ ID NO: 39646 - DNA, 210 bp, Homo sapiens
ggatcatcagctgaagacagaggtctgaaatcactccaaactcatgtagtaaactcaaggtttttccatttggtcaggagaaaagcaaatgaagaaagaatccctagcagtaagcaagcaaaactaaaataaaagaggggaacggataatgaacgggagccagggagaatgatacagaatgttgctataacaagtaggttaacactttgc

SEQ ID NO: 39647 - DNA, 440 bp, Homo sapiens
cacctcagcctctcaaggagctgggactacaggtgtgtgccaccatgaccagctaatttttgtagaaatggggtttccccacgttacccaagctggtctcgaactcctgagttcaagagatccaccggccacagcctcccaaagtgttgggattacaggtgtgagctaccgtggctgactgaagtttaccaatttacatgttaatctcatccaaaaccactctccaagctgacacataaaattaagcatcatactacctcctaggtctgctgtgtttgcctgacacatagtgtgggctgtgtacatgtttgtgccatttttatgactgggaaaatgacagtgatgatgaggattcctagttctattgttactaataccgctatggagtctgaagtgccaggttttaaaacccaggtgtatcgctcattagctgtgtgacc

SEQ ID NO: 39648 - DNA, 427 bp, Homo sapiens
aacagtccccggtgctttgcaagggttcagattgcagaacagtcacatatgggtatttgtagttataaatacttgaccgttctctaggggtggggtttccaactctttaaacaaccctgttgcctgttatcaagctgactttttgctccaagtgccagaattgattgtggttaggacatcttacgctgagaaataaataaaatggaacataatgggtctgcttcaaatgctgataaaatccaccagaatcgcctgtcgagtgttacagaagatgaagaccaagacgctgctcttaccattgtgactgtgctggacaaagtagcctccatcgtggacagtgtgcaggcaagccagaagagaatagaagagagacacagggaaatggaaaatgccataaaatccgtccagattgacctgttgaagcttt

SEQ ID NO: 39649 - DNA, 374 bp, Homo sapiens
aacaatggataacaatttagtataagtatgccccatgcaactcaaatttaactgggcattttgtaattttatttggtatatgtggcaaccctaatccctatacatgcatatgttcatatctgtgtaacatagttcttgggctaaatagttactgacatctgtagtaagcctcagtacctttcattcctaaaaccccagttcaaactggaaccagatcattgtttctgtcatcattaccattctagagaagtacagggattatcttcccttccacccctggctcaacttgtgggaaaaattcttgtacttacacaaatagtttcaatttttagaattattactgggaaaataatccaaggttcattaaaacccac

SEQ ID NO: 39650 - DNA, 366 bp, Homo sapiens
aacctccccagtaactggcacttgtggtagattgattccatgtcccatgttcttagatcatggcttaagtcctaagacaactcaaagcttcaaccctcaagctcttgaatctgatcactgaaaagtattctgttagaccatacatgtattaatccagtggaaaaggccatcttgcttttacctgctcttcatttagaaaactcctttctctgaacagaagtccaatgtcaactaataagagtatggtagtcaaccatgttcacagattcattagctcttgctcaaatttattccttgcatctatgcaataataaacacctattatgaaactcccaaacaaatattacctacttaaatagtccctag

SEQ ID NO: 39651 - DNA, 453 bp, Homo sapiens
cttttgctcaggtatcttctcaatgagctgatgactctacctaaaacttcgtagtgccctgcacacctccctcctcacagcactcttgatgcccttacccggcttcacttgtgctctttctccacaccattctcctttgtatataccttgtaattgacacatttgttgtgtttattgtctttttctccctactagaatgggagttccacaagggcagggagctgtctgttgttcactgatgaaagcaaagtgccttgaatagtggctacttcaagaaatatttattgaatgaaaatttaaaaacagcctagaagtgtttccactatttctcatatgagaatgccaatgtcatgaggaccagttccatgagtattttgttaattactttatatccaatgcccagcaaagtatctgccattagtaggcacttaataaatgtttgtgaaatgaata

SEQ ID NO: 39652 - DNA, 629 bp, Homo sapiens
ttcaggcagttagagttcaaccagtttaaaagccacatagctcatcgtggatagaaggactttaccatggtatataatgggtgttctttctgtctttagttttttaagtagagatagggtcttgcagtgttgtccagactggtctcaaattcctggcctataaaaggaattattatttttatttatttatttattttgtcagccagctggagtgcagtggcgcaatctcggctcactgcaacctctgcctcccaggttcaagcagttctcttgcctcagtctcccgagtgtctaggattacaggtgcccaccatcacgcccgtccaattttgtgtttttagtagagatggggtttctccatgttggtcaggctggtctcgaactcatgacctcgtgatccgcccaaagtgctaggattacaagcgtgagccaccacgcccggcctgtaaagggaattcttaatccagagtcttgggtctctttaaattgtatgcattcttaattttgaatgtgaatatgcacaattttcttgggaggtggtccatagcttttgtcagatactcaaaggagcccatgaccccaaaaaggttaaataaaagctaacgtttaaaaatattttggtatatatt

SEQ ID NO: 39653 - DNA, 341 bp, Homo sapiens
ttttacagataaagtataatcctttcccttgatcacctcaaatatttgaagataagtctcatgcccaatactgtaataaaaactaatgtacacaaaagtacaagctcttcagagacagcagtaagcactcaaagtgttgttattattagtactatattattttaggcatgaaattgtcatcaaaagaacctttaaaaagttaaaaagcactgcttcaaatctaagctaaaagcagacaggataatggttatccactggggatgggatgtaactgtaagggaataccaaggggacttcagggagaatattctgcttcctgatctagatgctgaatacacatg

SEQ ID NO: 39654 - DNA, 326 bp, Homo sapiens
ttgagacagagtcttgcttagtcacccaggctggtctcgaattcctgacctcaagtgatccacccatctcggcctcccaaagtgctgggattacagacgtgagccactgcagccggcctattctttagcaagaaaaatgaagccaaaaagaagcaatgataacaaccaggcgttgcgatgagccgaggaggtggaggttgcaatgagccgagatcgtgccactgcacttcccgcctgggtgactaagcaagactctgtcttcaaaaaaaaagaagagaaaaaaagaacatactgttttatgtttgtgagggtctatgatgttattt

SEQ ID NO: 39655 - DNA, 492 bp, Homo sapiens
cttaatcagtgaaatggtgctgaaaatggaatacttcaaaagcctgtcttaaattttaaagtaaatgactttaaaaaataattttttttcaattgggccagtcatctgaaacacaaaacctgagacgagggaaatgtgcaaatactgcgtttgtgagaagagcctagaatgctagccattttacaccccacgtgacttcttgccaacctgcttcaattctcactgcttggctccaaatgttctggaatcaatgggattacagacgtgagccactgcagccggcctattctttagcaagaaaaatgaagccaaaaagaagcaatgataacaaccaggcgttgcgatgagccgaggaggtggaggttgcaatgagccgagatcgtgccactgcacttcccgcctgggtgactaagcaagactctgtcttcaaaaaaaaagaagagaaaaaaagaacatactgttttatgtttgtgagggtctatgatgttattt

SEQ ID NO: 39656 - DNA, 1715 bp, Homo sapiens
  misc_feature (1)..(1): n is a, c, g, or t
  misc_feature (3)..(4): n is a, c, g, or t
  misc_feature (110)..(110): n is a, c, g, or t
  misc_feature (121)..(121): n is a, c, g, or t
  misc_feature (123)..(124): n is a, c, g, or t
ngnncgagcgcaggagacacaggcgctggctgccccgtccgctctccgctccgccgcgccctcctcgcccgggatgggcccccccgccgccgccggatccctcgctcccngccgccgcctngnnctgccgcgctcgcactgaagcccgggccctcgcgcgccgcggttcgccccgcagcctcgccccctgcccacccgggcggccgtagggcggtcacgatgctgccgcccttaccctcccgcctcgggctgctgctgctgctgctcctgtgcccggcgcacgtcggcggactgtggtgggctgtgggcagccccttggttatggaccctaccagcatctgcaggaaggcacggcggctggccgggcggcaggccgagttgtgccaggctgagccggaagtggtggcagagctagctcggggcgcccggctcggggtgcgagagtgccagttccagttccgcttccgccgctggaattgctccagccacagcaaggcctttggacgcatcctgcaacaggacattcgggagacggccttcgtgttcgccatcactgcggccggcgccagccacgccgtcacgcaggcctgttctatgggcgagctgctgcagtgcggctgccaggcgccccgcgggcgggcccctccccggccctccggcctgcccggcacccccggaccccctggccccgcgggctccccggaaggcagcgccgcctgggagtggggaggctgcggcgacgacgtggacttcggggacgagaagtcgaggctctttatggacgcgcggcacaagcggggacgcggagacatccgcgcgttggtgcaactgcacaacaacgaggcgggcaggctggccgtgcggagccacacgcgcaccgagtgcaaatgccacgggctgtcgggatcatgcgcgctgcgcacctgctggcagaagctgcctccatttcgcgaggtgggcgcgcggctgctggagcgcttccacggcgcctcacgcgtcatgggcaccaacgacggcaaggccctgctgcccgccgtccgcacgctcaagccgccgggccgagcggacctcctctacgccgccgattcgcccgacttctgcgcccccaaccgacgcaccggctcccccggcacgcgcggtcgcgcctgcaatagcagcgccccggacctcagcggctgcgacctgctgtgctgcggccgcgggcaccgccaggagagcgtgcagctcgaagagaactgcctgtgccgcttccactggtgctgcgtagtacagtgccaccgctgccgtgtgcgcaaggagctcagcctctgcctgtgacccgccgcccggccgctagactgacttcgcgcagcggtggctcgcacctgtgggacctcagggcaccggcaccgggcgcctctcgccgctcgagcccagcctctccctgccaaagcccaactcccagggctctggaaatggtgaggcgaggggcttgagaggaacgcccacccacgaaggcccagggcgccagacggccccgaaaaggcgctcggggagcgtttaaaggacactgtacaggccctccctccccttggcctctaggaggaaacagttttttagactggaaaaaagccagtctaaaggcctctggatactgggctccccagaactgctggccacaggatggtgggtgaggttagtatcaataaagatatttaaaccaccagggctggacc

SEQ ID NO: 39657 - DNA, 1014 bp, Homo sapiens
tgatttcctccccctgaacttgcggtctccttttgtctgcattttcctctcttcctttcacctcccattcccaatcttattttctgtccatccgctgggcccttccctgcaccccctacctgtccacatgcgtccgcccctctgcctcccgcaggccgtgcggagccacacgcgcaccgagtgcaaatgccacgggctgtcgggatcatgcgcgctgcgcacctgctggcagaagctgcctccatttcgcgaggtgggcgcgcggctgctggagcgcttccacggcgcctcacgcgtcatgggcaccaacgacggcaaggccctgctgcccgccgtccgcacgctcaagccgccgggccgagcggacctcctctacgccgccgattcgcccgacttctgcgcccccaaccgacgcaccggctcccccggcacgcgcggtcgcgcctgcaatagcagcgccccggacctcagcggctgcgacctgctgtgctgcggccgcgggcaccgccaggagagcgtgcagctcgaagagaactgcctgtgccgcttccactggtgctgcgtagtacagtgccaccgctgccgtgtgcgcaaggagctcagcctctgcctgtgacccgccgcccggccgctagactgacttcgcgcagcggtggctcgcacctgtgggacctcagggcaccggcaccgggcgcctctcgccgctcgagcccagcctctccctgccaaagcccaactcccagggctctggaaatggtgaggcgaggggcttgagaggaacgcccacccacgaaggcccagggcgccagacggccccgaaaaggcgctcggggagcgtttaaaggacactgtacaggccctccctccccttggcctctaggaggaaacagttttttagactggaaaaaagccagtctaaaggcctctggatactgggctccccagaactgctggccacaggatggtgggtgaggttagtatcaataaagatatttaaaccaccagggctggacc

SEQ ID NO: 39658 - DNA, 1537 bp, Homo sapiens
cattaggctagtacgaggctggtgtgaatcggccgaggacgatgctgccgcccttaccctcccgcctcgggctgctgctgctgctgctcctgtgcccggcgcacgtcggcggactgtggtgggctgtgggcagccccttggttatggaccctaccagcatctgcaggaaggcacggcggctggccgggcggcaggccgagttgtgccaggctgagccggaagtggtggcagagctagctcggggcgcccggctcggggtgcgagagtgccagttccagttccgcttccgccgctggaattgctccagccacagcaaggcctttggacgcatcctgcaacaggacattcgggagacggccttcgtgttcgccatcactgcggccggcgccagccacgccgtcacgcaggcctgttctatgggcgagctgctgcagtgcggctgccaggcgccccgcgggcgggcccctccccggccctccggcctgcccggcacccccggaccccctggccccgcgggctccccggaaggcagcgccgcctgggagtggggaggctgcggcgacgacgtggacttcggggacgagaagtcgaggctctttatggacgcgcggcacaagcggggacgcggagacatccgcgcgttggtgcaactgcacaacaacgaggcgggcaggctggccgtgcggagccacacgcgcaccgagtgcaaatgccacgggctgtcgggatcatgcgcgctgcgcacctgctggcagaagctgcctccatttcgcgaggtgggcgcgcggctgctggagcgcttccacggcgcctcacgcgtcatgggcaccaacgacggcaaggccctgctgcccgccgtccgcacgctcaagccgccgggccgagcggacctcctctacgccgccgattcgcccgacttctgcgcccccaaccgacgcaccggctcccccggcacgcgcggtcgcgcctgcaatagcagcgccccggacctcagcggctgcgacctgctgtgctgcggccgcgggcaccgccaggagagcgtgcagctcgaagagaactgcctgtgccgcttccactggtgctgcgtagtacagtgccaccgctgccgtgtgcgcaaggagctcagcctctgcctgtgacccgccgcccggccgctagactgacttcgcgcagcggtggctcgcacctgtgggacctcagggcaccggcaccgggcgcctctcgccgctcgagcccagcctctccctgccaaagcccaactcccagggctctggaaatggtgaggcgaggggcttgagaggaacgcccacccacgaaggcccagggcgccagacggccccgaaaaggcgctcggggagcgtttaaaggacactgtacaggccctccctccccttggcctctaggaggaaacagttttttagactggaaaaaagccagtctaaaggcctctggatactgggctccccagaactgctggccacaggatggtgggtgaggttagtatcaataaagatatttaaaccaccagggctggacc

SEQ ID NO: 39659 - DNA, 180 bp, Homo sapiens
attctaagaattatttggtggagtctttaggattttctgtatgtaagatcatgtgccaggcatagtggtgtgcatctgtagtcccagctactcaggagcgcaggagactaaggcaagaggatcttgagcccaggagtttgagaccagcctaggcaacatagaccccatctctataaaaaa

SEQ ID NO: 39660 - DNA, 521 bp, Homo sapiens
ggctgagctgctacaggggcagagggtggggtggggttgggtgggagaatcatcccggcacttcatcgtgcatgctatttcgggcagcatcttttttttttattttattattattttttttcctgatgcttgagttatgaatgaggatgacctctgcaatcatgatgtctcccatagactctgttccttgttcctttgccagctttctcatgcatggtcctaacacttccatgatttaatctgctgcagaccatagtcttcagccacctcagcaataacttgttagaacattaaaaggaagtaaattgagaacaacttgttgccatcccattttcattagaaatcagacatcttagagatgtcaagaaagcagctagcagctagggggtatggggacctgtcctgctcacactgctgtgtgtcagaccagacctgatcctggagctcaggaccctagagagccctgatctctggaactcttgccacgttgttgctgaggcagctgaagtccccatctccca

SEQ ID NO: 39661 - DNA, 204 bp, Homo sapiens
aaagggcagtcaaagagattcaaagcacaagaaggatttgatgcaccatggctggctttgatgatggaggggctctgcccactgatcagagagacgtctttaaaagctgagagtggtccctgctgacagtcagcgagggcacgtgactggagtcctacaaccacaaggaactgaattctgcccgtcacctcaatgagctttcaa

SEQ ID NO: 39662 - DNA, 531 bp, Homo sapiens
tctaaaaaatagctctaaaacagtggggcagactttcaaataaacatactaataattacatgtctaggaggcccctgtctccttcaaagcagtcacctaggaaggctacacatttgttccagtaatgcttctatggcttaaatatgttgtggaatgcctctgaaatgctaagaaataaaggtgaaatgacattattttaagtaacctgaattgtggcagaggtgaatttaattttgttgagtagtcaaatcatcccaggaccaagtgtagtaaataaaatctgcagtgttgtttggagccatagttggatgtaaaataacaagatgggctttcctaatgatgcataaactaactcttgaaattgtcaaagagggattccagaaccctggaccttggaataaatgtataagctcccaaggtagctactgtgaagaacagtacttgtctaggtaaggaaaaaaatatgtgtatgtttgcaaaataagatcagttttattactttatagacaaaccttgtagatgaaaaaaaaa

SEQ ID NO: 39663 - DNA, 514 bp, Homo sapiens
gagacagggttttgcactgttgcccaggctggagtgcagtggtgcaattgtggctcactacagcgtcaacctctcaggctcaagagatcctcccacctcagccttctgagtagctgggactgcaggcatgcattaccatgtctggttaatttttgattatttgtagagacagggtctcactatgctgctcaggctggtctcgaactcctcagctcaagcaattttcctgccttggcctctcaaattgctggaatttcaggagtgagccactgcatctggcaacactgcttcttaacttgagtagaatcttcctgcctagacagaagtgaatgggaaagcttagtgcatcttagagtatcttctaagagaaacttggtgtgaaaccatggggaataaagcccagtacttgacatgggattttaattcatttacttgatatgacatagtgggtgatgcaaaataggtacctttttcttcacctttttccacagtgacttttcactttagtttgctt

SEQ ID NO: 39664 - DNA, 550 bp, Homo sapiens
gtggaatttattaacaaagaggagttagtaaacggattcaataaatgttaatgtataatgcttttgggattcttgttttaatacatgataatctttcacatatactccataaggaggatcacttataggagattagactaaataaaatcagagatttctcatgaccaagttatgggattcttaattcatcatattatttataaagttttttttttctaagtagttcttaaaggaagggtataattttagtttattcattctgaatcctgagcagaagcagcacactaacataagttttatgaaagtgtcacaatctaacctctggaaggaaaacttataagttgaagtcctttgtgtaatttgacattgctgtaaaattgagctgagtttggagtgacagctccatgaacgcaggggcgtggcttcttccccatgtactccagcacctagacagagcttggcatgtgataagtttcaagcgagtgttgaatgagtcaatgaatgaacaaatgcatttacctctgaatcacttctctgtcggcttttgtta

SEQ ID NO: 39665 - DNA, 696 bp, Homo sapiens
cgctgaagccgttaggatgagccctctccttccagagctttaaccgatgaaggtgcattgtgtttggcgcccctgaggaggatgctgtcttaggcctcttcccactggacgtgtgtggtgggcagagatcccgttcgtcggtcgcacttccaccccgctggggctcactcaggccgcggagctgcgagggagacatcctcgatggactccctctacggagatctcttttggtacctggactataacaaggatgggaccttggacatttttgagcttcaggaaggcctggaggatgtaggggccattcaatctctagaggaagcgaagaaaatttttactactggagatgtcaacaaagatgggaagctggattttgaagaatttatgaagtaccttaaagaccatgagaagaaacatgaaattggcatttaagagtttagacaaaaataatgatggaaaaattgaggcttcagaaattgtccagtctctccagacactgggtctgactatttctgaacaacaagcagagttgattcttcaaagtgccatgcctgttgttcccactgagggcacagaccatgtgtatctggttaacagttctatgtccaccacgttgcaataatggactctcagaaaatattgaagaatatgttaaagaatgagtagaattatgctactgaaaagggtgagtggaag

SEQ ID NO: 39666 - DNA, 436 bp, Homo sapiens
ttagttttagagtcagagacaggcctctaaaatcatggcaatactccctctcatcattatatatatttttcaacctttctatattttattttcaaatatatcttcttgcagttagaaagggtattgaaaaagattgtgtggttgttctagaaaaagtaatagtaatatgccaccagcattttatatcattctgcttttatttttaggttcacggttcaaaatcagacaaaatgaacatatttggtggctttcgacagatggtaaaagaaggaggtatccgctcgctttggaggggaaatggtacaaacgtcatcaaaattgctcctgagacagctgttaaattctgggcatatgaacaggtaattgttatcacccgtggaatttattaacaaagaggagttagtaaacggattcaataaatgttaatgtataatgc

SEQ ID NO: 39667 - DNA, 4725 bp, Homo sapiens
taaatcagtttcaagatgattttactaagcaggcagcccttaatttacaaattctagattcatacatatcttaaacatacaaaatgatatgaggagaggtaagttcagggtctgagttcctggctgttgttggaactgatttctgtgtagtgattcagaagatgtgagacaccctaatttacaagtacagaggtatcttcttttctgcaaacagcagtacaacaatagttcctcttacgcagctgtgaatgaacaggattattacaattaatgatatctcatttgattggcgccttagagaattaagacctttcacacctaatatacaactttgttgtgaaggcagatatttatattctcattttactgatgagagactacccggagacgctatgtcacacctgaaggattaggtactttctctgttaagtccaatgttccttccgttattccatgctaggcagtaataagttctgtcttgcctgagtaataagctccaaacctcggaactgcacccatcttgagaaggaggagggcgctgtggttttttctgataagtgcagctggcagacactctatacgcttaatcacgggcaaatcctagctaagctgcctaccaaactagtccttcttttccccgttgcccacgcagatggctgttgatcttttctgcaacaaatccaggagtttctcctttttgttttataattgctccaatagatgctttaggatttaactctctgctttttaaagcagaatcgccatcccaggtgtgcaaccacgaaaaaattagacatccgtgagagacaatgccctccatggcccagtttccaggcagagagaagcagctctgggctgaccgccaaggctccggcccgagagggtctttaagtggagtaaccagtcttcaagaccccgctcccaagccaccgacgcgctgacgctgcagccctggacctgctgggggcctcttcctcggacccgcatgctgacagcgggactggcaactgggcagaggtcgaccccgggtccgcacagcacctcccgagacccagctcccagctccctcacttccggctctctggaggcgggcccggccagtgccgccgaggccagcgcggcgagctcctccccagcagcggcgggacggccacaccctgcgctccgcgcgggctcgggtggggtctccgctcctgcgccctgcgccctgcgcgccgcagccgcaaccccgacggcgccccaaacgctgttgcgccgcgcgccccgcccagcccggcctcgcgctggtcccggtctcgccccgcagccctcgatctcccgtgacttcctcggccaggccgcctgcgcctctgggaccatgttgcgctggctgcgggacttcgtgctgcccaccgcggcctgccaggacgcggagcagccgacgcgctacgagaccctcttccaggcactggaccgcaatggggacggagtggtggacatcggcgagctgcaggaggggctcaggaacctgggcatccctctgggccaggacgccgaggagaaaatttttactactggagatgtcaacaaagatgggaagctggattttgaagaatttatgaagtaccttaaagaccatgagaagaaacatgaaattggcatttaagagtttagacaaaaataatgatggaaaaattgaggcttcagaaattgtccagtctctccagacactgggtctgactatttctgaacaacaagcagagttgattcttcaaagcattgatgttgatgggacaatgacagtggactggaatgaatggagagactacttcttatttaatcctgttacagacattgaggaaattatccgtttctggaaacattctacaggaattgacataggggatagcttaactattccagatgaattcacggaagacgaaaaaaaatccggacaatggtggaggcagcttttggcaggaggcattgctggtgctgtctctcgaacaagcactgcccctttggaccgtctgaaaatcatgatgcaggttcacggttcaaaatcagacaaaatgaacatatttggtggctttcgacagatggtaaaagaaggaggtatccgctcgctttggaggggaaatggtacaaacgtcatcaaaattgctcctgagacagctgttaaattctgggcatatgaacagtacaagaagttacttactgaagaaggacaaaaaataggaacatttgagagatttatttctggttccatggctggagcaactgcacagacttttatatatccaatggaggttatgaaaaccaggctggctgtaggcaaaactgggcagtactctggaatatatgattgtgccaagaagattttgaaacatgaaggcttgggagctttttacaaaggctatgttcccaatttattaggtatcataccttatgcaggcatagatcttgctgtgtatgagctcttgaagtcctattggctggataattttgcaaaagattctgtaaaccctggagtcatggtgttgctgggatgcggtgccttatccagcacctgtggtcagctggccagctacccattggctttggtgagaactcgcatgcaggctcaagccatgttagaaggttccccacagctgaatatggttggcctctttcgacgaattatttccaaagaaggaataccaggactttacagaggcatcaccccaaacttcatgaaggtgctccctgctgtaggcatcagttatgtggtttatgaaaatatgaagcaaactttaggagtaacccagaaatgatgttgcattttttgctttagcctgataattgaaactttcaacaatctctggagtgactttttctcctcgaattgaaacaagtctatggcaaaagaagctgcatttttttcacaaaagggaagatggtaacaatggtcacttcaaacttttgggctaaattatatgtacacagaaatgttcaaaatcatagttttaatgtgttttgaaaaggccacacaattatactttatcttttcttaataatcctgcaaatctctgccctgaatccgaaatctgaaaatgtactggcttgaacaaaatttgttttgtgtgttagagttataaatcattaatctttatttcgggtggtttacgtttatgccagttcctttatatttaaatttcttgttttatatattttgaatgtctttatagatttctttaaatttccttatagaaccattaatagaaaatcattacatttaaaatataccttacagcaaaagcatccaaataagtatagggtttatgtccttatttttctttcagctgaatacgaatgaacacagtggtggaatttctgaagggaagtgatgaaattatatttatttcagtgggcacttttccattttaccactgtaccattatttggttcctggagttatacactaattttcagtatattactgttaaattaccaacacaaggcaatttatttgaaagattccgtttatcctgccattgctttgaaaagcagcaggaaacgaaatcctttgacttgtatcagcttctgcagagcatctttgttttcctttgtcctttgtttcctaccttttgaatcagattccgttttagtcaggaagacttcttgggaccattcttagtaacctgaaatttcttttttaattgcatgaagtggattgatcatgagcaaatgatgtgcttatttctccctcactgttgaatatctttgaacttgctgttttcaatatgggcagcacaaaggtgagagatacatattaatagtagtatgtattactcttatacattagatacctatatttaaatgaaaggcccaatttgtaaacatatacattcatattctctcttgccccaagttttaggaacatgttaggatataggagacttaatttataataatgagagcatttttttattttactaaagccatttttatagtcaactatcttttcttatttgtgtgattagaacttagaaaaatatttactagttgaagttattatcagtttttaatttagttcttaaactcatttcacttctaataatttctgttataaatttccagcattttaatgaaaatctaatgatgtaataggcattttctttatttgaacctacctcttttattttctgaaccaaagagaaagatggactggtgtttgtgaaacatttttaaaaatgtagtttcatttatattagttatgtttgataaatgtctcagtatttttataatatgataagcctgggattctacttttagggttatttgtacttttgagtaatatataaagtgacaatattaaggtacatgatcagctctttctatttttactcgtaaaaattatggaaatgaataattttgctaacaactttgaaatttcaaacttctggaaaatatgaaaatattcattgttcattatgaatttaaattgtaaggtatgaatgtgatttgtctgtacatcttgtatcttttccaaaaaatgattctgtatcttttggaaaaaagccgagagttgaagatagtatatttctggtagtactgaatatttacttacagtttctatcaaaaatatatatttgtttctaaaattacttgttttccagtttttattttttttagagaaaattcttaagtctcagtttcctaattgaaaaaaaaaaattataaataaagcaaaaattgtatcctaca

SEQ ID NO: 39668 - DNA, 3512 bp, Homo sapiens
cgctgaagccgttaggatgagccctctccttccagagctttaaccgatgaaggtgcattgtgtttggcgcccctgaggaggatgctgtcttaggcctcttcccactggacgtgtgtggtgggcagagatcccgttcgtcggtcgcacttccaccccgctggggctcactcaggccgcggagctgcgagggagacatcctcgatggactccctctacggagatctcttttggtacctggactataacaaggatgggaccttggacatttttgagcttcaggaaggcctggaggatgtaggggccattcaatctctagaggaagcgaagaaaatttttactactggagatgtcaacaaagatgggaagctggattttgaagaatttatgaagtaccttaaagaccatgagaagaaacatgaaattggcatttaagagtttagacaaaaataatgatggaaaaattgaggcttcagaaattgtccagtctctccagacactgggtctgactatttctgaacaacaagcagagttgattcttcaaagcattgatgttgatgggacaatgacagtggactggaatgaatggagagactacttcttatttaatcctgttacagacattgaggaaattatccgtttctggaaacattctacaggaattgacataggggatagcttaactattccagatgaattcacggaagacgaaaaaaaatccggacaatggtggaggcagcttttggcaggaggcattgctggtgctgtctctcgaacaagcactgcccctttggaccgtctgaaaatcatgatgcaggttcacggttcaaaatcagacaaaatgaacatatttggtggctttcgacagatggtaaaagaaggaggtatccgctcgctttggaggggaaatggtacaaacgtcatcaaaattgctcctgagacagctgttaaattctgggcatatgaacagtacaagaagttacttactgaagaaggacaaaaaataggaacatttgagagatttatttctggttccatggctggagcaactgcacagacttttatatatccaatggaggttatgaaaaccaggctggctgtaggcaaaactgggcagtactctggaatatatgattgtgccaagaagattttgaaacatgaaggcttgggagctttttacaaaggctatgttcccaatttattaggtatcataccttatgcaggcatagatcttgctgtgtatgagctcttgaagtcctattggctggataattttgcaaaagattctgtaaaccctggagtcatggtgttgctgggatgcggtgccttatccagcacctgtggtcagctggccagctacccattggctttggtgagaactcgcatgcaggctcaagccatgttagaaggttccccacagctgaatatggttggcctctttcgacgaattatttccaaagaaggaataccaggactttacagaggcatcaccccaaacttcatgaaggtgctccctgctgtaggcatcagttatgtggtttatgaaaatatgaagcaaactttaggagtaacccagaaatgatgttgcattttttgctttagcctgataattgaaactttcaacaatctctggagtgactttttctcctcgaattgaaacaagtctatggcaaaagaagctgcatttttttcacaaaagggaagatggtaacaatggtcacttcaaacttttgggctaaattatatgtacacagaaatgttcaaaatcatagttttaatgtgttttgaaaaggccacacaattatactttatcttttcttaataatcctgcaaatctctgccctgaatccgaaatctgaaaatgtactggcttgaacaaaatttgttttgtgtgttagagttataaatcattaatctttatttcgggtggtttacgtttatgccagttcctttatatttaaatttcttgttttatatattttgaatgtctttatagatttctttaaatttccttatagaaccattaatagaaaatcattacatttaaaatataccttacagcaaaagcatccaaataagtatagggtttatgtccttatttttctttcagctgaatacgaatgaacacagtggtggaatttctgaagggaagtgatgaaattatatttatttcagtgggcacttttccattttaccactgtaccattatttggttcctggagttatacactaattttcagtatattactgttaaattaccaacacaaggcaatttatttgaaagattccgtttatcctgccattgctttgaaaagcagcaggaaacgaaatcctttgacttgtatcagcttctgcagagcatctttgttttcctttgtcctttgtttcctaccttttgaatcagattccgttttagtcaggaagacttcttgggaccattcttagtaacctgaaatttcttttttaattgcatgaagtggattgatcatgagcaaatgatgtgcttatttctccctcactgttgaatatctttgaacttgctgttttcaatatgggcagcacaaaggtgagagatacatattaatagtagtatgtattactcttatacattagatacctatatttaaatgaaaggcccaatttgtaaacatatacattcatattctctcttgccccaagttttaggaacatgttaggatataggagacttaatttataataatgagagcatttttttattttactaaagccatttttatagtcaactatcttttcttatttgtgtgattagaacttagaaaaatatttactagttgaagttattatcagtttttaatttagttcttaaactcatttcacttctaataatttctgttataaatttccagcattttaatgaaaatctaatgatgtaataggcattttctttatttgaacctacctcttttattttctgaaccaaagagaaagatggactggtgtttgtgaaacatttttaaaaatgtagtttcatttatattagttatgtttgataaatgtctcagtatttttataatatgataagcctgggattctacttttagggttatttgtacttttgagtaatatataaagtgacaatattaaggtacatgatcagctctttctatttttactcgtaaaaattatggaaatgaataattttgctaacaactttgaaatttcaaacttctggaaaatatgaaaatattcattgttcattatgaatttaaattgtaaggtatgaatgtgatttgtctgtacatcttgtatcttttccaaaaaatgattctgtatcttttggaaaaaagccgagagttgaagatagtatatttctggtagtactgaatatttacttacagtttctatcaaaaatatatatttgtttctaaaattacttgttttccagtttttattttttttagagaaaattcttaagtctcagtttcctaattgaaaaaaaaaaattataaataaagcaaaaattgtatcctaca

SEQ ID NO: 39669 - DNA, 348 bp, Homo sapiens
cgagggcttctttttgaagttggagatgctgttgagggactggaactgactgaagccaccccagggtacaggtggcagattgtccctaatgccagttctccatttgggttttggtcacaggaaggacaacctttcagagcacggctcagtgggttctttgtggctccagagacaaataattacactttctggattcaggcagacagccaagcttccttgcatttcagttggtcagaggaaccaaggactaaggtgaaagtggcctccatcagcgtcggcactgctgactggtttgactcctgggagcagaatagggatgaagggacctggcagcagaagactcccaag

SEQ ID NO: 39670 - DNA, 414 bp, Homo sapiens
tccagtgtagagatgtattgggctactgagactaggcaggtgctatatctctttctagaatattctggacaattgtgtggcataagaatcaggttgttcttctttattaccataaaagaagacaaagtacaagggcagtcatttgttggttcagtgattcaggccttggttactcttgcttgactctatgttctactttacagagcacggctcagtgggttctttgtggctccagagacaaataattacactttctggattcaggcagacagccaagcttccttgcatttcagttggtcagaggaaccaaggactaaggtgaaagtggcctccatcagcgtcggcactgctgactggtttgactcctgggagcagaatagggatgaagggacctggcagcagaagactcccaag

SEQ ID NO: 39671 - DNA, 438 bp, Homo sapiens
gaggaagactcctggagctggtgaactgtgcatggatatgcagtcacgggcagcccacctcctactcctcaccctccctgtgcctgtgagggtctgcactcaccctggtcttgctttattgcccaggctggagtacagtggcgcaatcacggctcactgcagcctcaacctcttgggcccgagcaatcttcccaccttggtctcctaaagtgctgggataacaggcatgagccaccacatctggctgaggccccacattttcattttgtgctgagacttgtaaattaggtagctggtcctggctgtagcagatggtatagattctttttctggctctgtttttgtgacatctcaacttactgggctcttattaaaggtgatttaggtgacttatcaacttttcatgagtacagatgaagaactcttctagggcagggg

SEQ ID NO: 39672 - DNA, 394 bp, Homo sapiens
atacaccatgttggccaggctggtctcgaactgctggcctcaagtgatccgcccacctcagcctcccaaagtgctgggatcacaggtgtgagccaccacacccggccagtttgtgactttttatacctgtttctcaactatcgctctcacctcctcagtgtgggtcagactttgaaaattgacagcctgcaggccgtgtttggttctcacgcctgtgcagtgagctttttgcttgctttatttgaattagttgccagcatttaaaagtgggagattccgctgggcgtggtggggtgcgcctgtagtcccaggtactcgggaggctgaggcaggagaatcgcttgagcccaggaggcagaggttgcagtgagtcgagactgtgccactgcactcc

SEQ ID NO: 39673 - DNA, 628 bp, Homo sapiens
cgtggaacatgtaccctgcagataaaggactattctatagacaaaccatatgcagcccatttttccactaatgaaagttcagattggggccaggcatggtgctcatgcctgcaatcccagcactttgggaggctgagccaggtggatggcttgagcccaggaatttgagatcagcctgggcaacatggtgaaaccctgtctctataaaaagtaaaaaaaaaaaaaaaaaaaaagtcaagtgtggtggtgagcacctgtagtctcagctacttgggaggttcagggtggagaatagcttgggcccaggaggttcaggctgcagtgagccaagattgcaccactgcacaccagcctgggtgacagggtgagacctgtctcaagaaacaaaaaattcaaattattttaccaataattatacaccaaacagttttgttgtacatatattgttgcatgttgtacttttatatcaataaagtaggtggagtcctaccagttgaattccttgcctacaacatagtggatttaaaatatattcattaatgccttattattgtctgaaatcattaatcttaatgggaatttatgtccatttcctgacaaattcaaccaggactgaacttttttttat

SEQ ID NO: 39674 - DNA, 347 bp, Homo sapiens
gatgcagctagaaggcccttaccagctggccgtctagatgctagtgccatgtccttggacatttcagcattcagaaccatgagccaaatcctgtaaatctttttctttatcaatttcccagtctggtgggaattctgttatagcagcagaaaacagactaagatgtactgctactgttttgtgagcttgagcttaccttatttttttataccttgagggactatagtgtattctggatagattgatgagctgtcatgagaaattttgttaaatattttatagatacacatttttgtctttatctgccagttgtatcaatttgaaatgactgacttcataaatgtatt

SEQ ID NO: 39675 - DNA, 489 bp, Homo sapiens
gtagtttgagagacatgttagctgagggagaagagacaggatatttgcaaaattttgtagcttgaaaggtcaacagcatcagctacttccagcatttcaattgcaagggtagattcattgtcaatgtcatagtttagttgctgagctttacataggactagtttgtactggtaactttgatgagtttagtgagaagaggcaacaacaggaaaaaaatacctcaatgagaaacagcttattaaattaataccactcaaaacagatttatattgcaggttttaagcaaatacagttgttttaaaagcaagaggttcaactgtattcttgttgatattgattaatatgtagggaaataaaccaaaattacatgttttccatgagaagaatcatattttcagtgagaagaattacaattttctagtaaaaaatatcgaatttctgttttaaaagataaattgtgccttttttttatgaactatatgccattgg

SEQ ID NO: 39676 - DNA, 468 bp, Homo sapiens
cacacacacacacatacatgatttatatatcacagcaaaaagaattagaaatgcttttctttacttagatatgtctatagacgttttggttcatgtgatttacagtggtgatttttagaaacacaaagctggaatatgcttttatagttgagattaagtttaaagctatgttctcagtaaaagtctatcccgggccgggcgcagtggcttagggtgtaatcccagcactttaagaggccgaggcgggtggatcacgaggtctggagatcaagaccatcctggctaacatggtgaaaccccgttttactaaaaatataaaaaattagcccggcgtggtggcatgcacctgtagttccagctactcgggaggctgagtttggagaatcacttgaacccgggaggcggaggttgcagtgagctaagatcatgtcactgcattccagcttgggcaacagagactccatctca

SEQ ID NO: 39677 - DNA, 494 bp, Homo sapiens
gacgtgtttagatacacaaatacttagcattgtgttacagttgcctgtggtattcagtatagtaatattgctatataggtttgtagcccagaatttcataaaagaaagaagctttacatgaatgagaaaagcataatctgacaataaagatcactttattagtggttctcagccttggctgcacattgaaatcacctgggtaggttagatttttaaaaaatactacccaaaatcagactctggagatatagcctgggcatctgtgcattttagaaggtcttcagatgactttaatatgtggtcagagttgagaacttctgtgtagctgtgtagcttagcaaaaaacgacagatgtaatcctgcttatggcttgaccacagactttattttgtagttattaaaagttaaaggccgggcgcggtggctcactcctgtaatcccaaagtgctgggattacaggcatgagctactgcacctggcctgagggttattta

SEQ ID NO: 39678 - DNA, 305 bp, Homo sapiens
taaaagaaatgatggagttagaaaatcactgaagtagtttcgttgtctggggaaatacctgtggttcgtcatctcatgtcacacagattaaggacatggactcacacacatggagcgggttaaggagcagaaagtttaataggcaagaaagaagagaacaaatcccttgtacagagctgtgtgtgtgtgtgagagagagagagagagagagagagagcgagcgtgagagcacaagcaaaaaaattattttaaggaattgactcatgcaatattggggatgccacatctgagatctgcagggcagg

SEQ ID NO: 39679 - DNA, 588 bp, Homo sapiens
tgtcttccaaatttgaaatgagtgacagtgggttataattaggggagaagatgctcttgatgctactgagaagatacagagtgagaacttttcttagaaaagtctgaggttgtaaagaagaaccaagcagccaacagagcagtcagcagagcagccacgatgatgattctagcaggttcctgagtcctcgagcgcgggaagaaagcactgccagtaactccaaccgcagcacgccggcctgctcgcccatcctccggaagcggtctcgctcgccaaccccgcagaaccaggacggagacaccatggtggagaagggctcagatcactcctcggacaagtccccgtccacacccggagcagggcgtgcagcgcagcttctcctcccagtccggccggagcggcggcaagaattccaagaaaagccagagttggtataatgtgttaagccccacctacaagcagagaaatgaagacttcagaaagctctttaagcagcttccagacacggagcgcctcattgttgattactcatgtgcactccaaagagacattctccttcagggccgactctacctctctgaaaattgg

SEQ ID NO: 39680 - DNA, 450 bp, Homo sapiens
gcagtggcatgatctaggttcaccacagcctccgcctcccaggctgaaatgattctcccacctccatcccccaagtaggtgggaccacaggtgcatgccaccgtgcctggctaatttttgtactgtttgtagagacagggtttcgccatgttgcccaggctgatctcaaactcctgagctcaagtgatcggcccacctcagcctcccaaattgctgagattacaggcataagccactgcactcagcccaggccttttaactactaatgtatattactcttgttatggcatgcattcactcactaagcattaggtaactgcctaccatggaccagacactgtggcaaacatttataaattttacaagtgtaaataagaagagattcctgttctcatggaactcaaaatctaagagtggaggcaggcatttaaactaagaattacaacagag

SEQ ID NO: 39681 - DNA, 459 bp, Homo sapiens
acaagctcctacctgaacactaagcctgtgtgtgtgtgcgtgtgtgtatgtatgtgtgtgtgtttgcttgcgcccatgcgtgcatatcgtgggggggaacctgaaaagatatatagtatttgcgagaagtgtaacactgggctgcaaattcacacatttgcacatttctcttattattaacaatgatacttagacctttgatttactaatggatgagaattgttggaacaaagacttggtgctgatttcctgatggattaactttatcagtctgcctctctcaagcctcacatctatattactcaggaaccctcatgtacagatacacccctcctggtccctgagttattctagaatagagtggaaagcagattaaaccctcaactcttccacatggagtttgaaattagcctcgccatttggaatttggctcaacatcatagagctggtgtaggacag

SEQ ID NO: 39682 - DNA, 415 bp, Homo sapiens
gtgtttacttatcgatcacaatgcacttacctaacatatttattgggttttcacactctgccaggcactgagttaacgttgctagatgaaaagaccggcagaactatttgcctgctaatttgtttccgttttcttcaaaggaaaatacttccttaagggatgctcacagctctcttgagctttgagcatgtcaggaggatagttaacgcagttcagaagaacccaagtgtccaagcattggcctgttgcgcactagggatagctggagtgtgctggtgtgtgatggccaaaacactggtagggatttctgagtcatcacggaaaatgtaaagaatgtcagagacctgaaatgggaaaatattctacttgttttcaagcatcaatgccctataatctgcgtttacgaatttaaata

SEQ ID NO: 39683 - DNA, 502 bp, Homo sapiens
aaccaacctgtcagttacaaaactcgcagtgttcatgagacataagacagttgttcaaaaaatacatttatccctttgatagtgaatttttagacagaatttcttccggaagttttcataaggaggacaacatgtggtataaccatgatgcctttcctaggactgttttttatttatttgtttattttatttatgtaacttattatttcctctggggttaagaagcaccactgagttttgtaattagacaagaatacatagcgaaggacatgggaattaaatggcaactgtatttttgttttaatactgagcccaaactccttggagttacagtgttcgtcgctccaggtaatcctctactaacataattatttagatgttggttatccaaaaagaaacctgaactccacattaaggaccaatctgctaggagggcagcaagttgtgttaactgtgttaatgaagaagcagacagttttagatggaacttcgtatgataaat

SEQ ID NO: 39684 - DNA, 1589 bp, Homo sapiens
aaattactcctttccactgatatttattgagaaactgctatgctccaggtactgcgataaacactgggcaaatgttggagagctaaaaaggcatattcctcttataaagacattatttacttgtaacaaacaagtaaataaatgtattagtcaatatgtaagtaaacaaaaaaatggacaagcacaaattatattaagtactatgtaggaaaccaatagagtactgtaacagaataataaggtatatgggatgggggtgggaatctgttcagagatgatctacctgagaaggtaacatgtaggcagagatctgaatcgtgaggagtcagcctttcagagtaagtggagtaggcacttccaagagaaaagcatattcctggctatttgcctatcaatgtcatcttgaacaagggttagcaatctcctacctgtaccacagatgctatgtgccacctccatgctacctttgccaccaagagattcaatgtgatgcatgatttgaaggttcctcatcctgataccctgtggaaagtaaaatcagtgacaaataaaagcagatcattatctcaggtagagtctgctaaagatgatacttgcttgtcagtacatgagtatccaccctagtaaaaaaccacagaagaagtgggatttatcttcaatgttctctcacttccccttccaagtgcctctcctgccttctgatgctctttcccacaagttgcaggcaaataaagcatgtatattactctctttttatccagagttgctccttgtccttatatgaagtagattccagacctcacaattgtatatgcctacccttctactccaacccctcaaaaaaagaggaagaatgaaagaatgaacaagagaaaaggaaggaagagagggagagaggaaaggagggaaggatggtcctgaagatcacagttcggtgctgaaaaaagcatttctattaaacttcaagacagaatgaatgaccatagctaataatgtaccttaagcttttctagaatctttgtattaaaaaagttgattgttactaaatgtattttaatctcataaaattttaggaatttaaatgaagaatttcacaaagggtaagaaaaattatatattatatttataaatttgtcattatgattctcccattgtggaaaaaaaaacaaaatctcggtaccccaattcacaaagccaaaaggaagaaagtaagctgaacgctgagtcatgcaagaaactgctcgcttttgttcctaagctaatagctacagataaaaggtcagatatctccataggtaggtactctatgttcaccttatgtaaagtgccaatttattgagcgtaagaggattacctaattgactattccccagcctgctccttttctcttgcaacacatggagtcagcaatgggaccatatcctctctctttcccctccagcctgctttccccctttaaatactgaagccctcaaaatcatctttctaaaaaggtatgaaccatagattgttcctgtggatttgtgtttctttcttccgggcatatccttaagcttggcaaaataaaattctaaattgattgagtcctg

SEQ ID NO: 39685 - DNA, 804 bp, Homo sapiens
ttgagggccctgcagctggagacccatggggatctgatgttccagtttgagggtggtgctgctggcgacccaggcgggagctgatgttctagttttagggacctacagctggagacccggggaggagctgatgttccctttcgagggctgtgcaggtggagacctggggaggaactgatgttgttctaatttgagtgtggtgcagctggagatccagggatgagatggccctgcggttcaaatatgagggtcccggagctggactctacgtgaggaaccaatgctgcctctgatgtcttaggttgtggagctggaaactcgcggaggagctggtattggtgtttctagttgagggttgtggtatttccagggtttcacaaaggccagattttatttcagttactcagaagagaaagaaaatgtcttctgaaagaggtgaattcaatcattaccaatagaaaaagtatccactgtatttatctcttataccaacagaaaaatataacattttcccccttagaataatatatacatatatataaaacttaaggttctattgtatgtagccgaacaatacaatctggaaaccagcatgaaactctattattcacatgttaaaatgttgaaactatgaccaaaatatgaaaactgctagagctatcagaaagacacaagacaaaaagcttcttgcatatgtataaactaaatgtgataatctcaaaaaactgttcaaaattataattactttccagtttaaaaacttcaatcctaaatttaaaaaaaaatctatatacaaaccactga

SEQ ID NO: 39686 - DNA, 750 bp, Homo sapiens
ttgagggccctgcagctggagacccatggggatctgatgttccagtttgagggtggtgctgctggcgacccaggcgggagctgatgttctagttttagggacctacagctggagacccggggaggagctgatgttccctttcgagggctgtgcaggtggagacctggggaggaactgatgttgttctaatttgagtgtggtgcagctggagatccagggatgagatggccctgcggttcaaatatgagggtcccggagctggactctacgtgaggaaccaatgctgcctctgatgtcttaggttgtggagctggaaactcgcggaggagctggtattggtgtttctagttgagggttgtggtatttccagggtttcacaaaggccagattttatttcagttactcagaagagaaagaaaatgtcttctgaaagaggtgaattcaatcattaccaatacccccttagaataatatatacatatatataaaacttaaggttctattgtatgtagccgaacaatacaatctggaaaccagcatgaaactctattattcacatgttaaaatgttgaaactatgaccaaaatatgaaaactgctagagctatcagaaagacacaagacaaaaagcttcttgcatatgtataaactaaatgtgataatctcaaaaaactgttcaaaattataattactttccagtttaaaaacttcaatcctaaatttaaaaaaaaatctatatacaaaccactga

SEQ ID NO: 39687 - DNA, 773 bp, Homo sapiens
caattagaacaacatcagttcctccccaggtctccacctgcacagccctcgaaagggaacgtcagctcctccccgggtctccagctgtagggccctaagaagcccctgcctgaccacgtgagcattgtggacctggggaggaactgatgttgttctaatttgagtgtggtgcagctggagatccagggatgagatggccctgcggttcaaatatgagggtcccggagctggactctacgtgaggaaccaatgctgcctctgatgtcttaggttgtggagctggaaactcgcggaggagctggtattggtgtttctagttgagggttgtggtatttccagggtttcacaaaggccagattttatttcagttactcagaagagaaagaaaatgtcttctgaaagaggtgaattcaatcattaccaatagaaaaagtatccactgtatttatctcttataccaacagaaaaatataacattttcccccttagaataatatatacatatatataaaacttaaggttctattgtatgtagccgaacaatacaatctggaaaccagcatgaaactctattattcacatgttaaaatgttgaaactatgaccaaaatatgaaaactgctagagctatcagaaagacacaagacaaaaagcttcttgcatatgtataaactaaatgtgataatctcaaaaaactgttcaaaattataattactttccagtttaaaaacttcaatcctaaatttaaaaaaaaatctatatacaaaccactga

SEQ ID NO: 39688 - DNA, 707 bp, Homo sapiens
aaacccaaaccctgggcacagtgcctggaagtgtcagggtcacccactccccttaagttagccactatacatgttcatcttctgacaggcggggcaggacagacgccaggcacaggaatcagggcctggggtcctgcggttcaaatatgagggtcccggagctggactctacgtgaggaaccaatgctgcctctgatgtcttaggttgtggagctggaaactcgcggaggagctggtattggtgtttctagttgagggttgtggtatttccagggtttcacaaaggccagattttatttcagttactcagaagagaaagaaaatgtcttctgaaagaggtgaattcaatcattaccaatagaaaaagtatccactgtatttatctcttataccaacagaaaaatataacattttcccccttagaataatatatacatatatataaaacttaaggttctattgtatgtagccgaacaatacaatctggaaaccagcatgaaactctattattcacatgttaaaatgttgaaactatgaccaaaatatgaaaactgctagagctatcagaaagacacaagacaaaaagcttcttgcatatgtataaactaaatgtgataatctcaaaaaactgttcaaaattataattactttccagtttaaaaacttcaatcctaaatttaaaaaaaaatctatatacaaaccactga

SEQ ID NO: 39689 - DNA, 369 bp, Homo sapiens
tgcaggtggagacctggggaggaactgatgttgttctaatttgagtgtggtgcagctggagatccagggatgagatggccctgcggttcaaatatgagggtcccggagctggactctacgtgaggaaccaatgctgcctctgatgtcttaggttgtggagctggaaactcgcggaggagctggtattggtgtttctagttgagggttgtggtatttccagggtttcacaaaggccagattttatttcagttactcagaagagaaagaaaatgtcttctgaaagaggtgaattcaatcattaccaatagaaaaagtatccactgtatttatctcttataccaacagaaaaatataacattttccccctta

SEQ ID NO: 39690 - DNA, 363 bp, Homo sapiens
ggccggcgcctgtaatccccatctactcaggaggctgaggcatgaaaatagcttgaactctggaggcggaggttgcagtgagccgagatcgtgccactgtactccagcctgggcgacaagagcgagactccatctcaaaaaaataaaaataaaaataaaataaaatatccaaatgaaaactttcacacaagtagaaagtttattttttatgacatcttcgtatttatttcttacatatcatatgtgaaaagcagctcctttgctgaaaatctagtccatccaagaatgcatcatcatctctgaccaaaaacaatggctggtggtaaggccgtactgagaaaaaagaaaaaaatgttgaagctg

SEQ ID NO: 39691 - DNA, 2557 bp, Homo sapiens
  misc_feature (631)..(631): n is a, c, g, or t
agcggagtccccgaggtcacaaggcagtggcaggtgtctgtagtcctcgggttgactgcagctcgcggtggtccctctccgagcccaggaagccactccagtgccgagggagaggcctgggagcgctcggagtgtgcgcggactggagaagggggaggtggcggagtgattcgtagagtaaattcggtaccgaggggcggggtcggggatttgaatcggtcggcgggcggaggaggcgggtggaggaggctgccgggcagagcgcaggccaggatcagcgcaggctgtgagtccaggtcagccgtcgggacctcgggctccgggttcgaagagcggctcccggctgcgggtgctttgccaggagagcccttccggacagaggagccggggtctggaaggagcggccgacgcgacgctcgcctgccacggggctctgggagtaagcctgtctgcctggcgggccttcaggtgcggcgtgagagatggatgccaattcaaaagacaagccccctgaaaccaaggagtctgcaatgaataatgctggaaatgcctctttcattttgggaactgggaagattgtgactcctcagaagcatgccgaattacctcctaatccttgcacaccagatanttttaaatcacctttgaacttttccacagtaaccgtagagcaattgggaattacacctgaaagctttgttaggaactctgcaggaaagtcatcatcctaccttaaaaaatgtagacgacgttctgcagtcggtgctcggggctctcctgaaacaaaccatctgattcgtttcattgctcggcagcaaaatataaagaatgctaggaaatctcctttggcacaagattctccttcccagggcagccctgcactgtatcgaaatgttaacactttaagagaacgaatatcagccttccagtcagcttttcactccataaaggaaaacgagaaaatgaccggctgtctggaattctcagaggcaggaaaagagtccgagatgacagacttgaccagaaaggaaggtctcagcgcttgccagcagtctgggttccctgcagtgttgtcctccaaacgtcggagaatatcctatcagagagactctgatgaaaatctgacggatgctgaaggaaaagtaattggtctccagatattcaatattgatacagacagagcatgtgcagttgaaacttctgtagatctttctgagatatcatctaaacttggttcaacacagtctggatttttagttgaagagtctcttcccctttcagagctcacagagacttcaaatgcactaaaggttgctgactgtgtagtgggcaaaggatcaagtgatgccgtttcgcctgacacgttcacagcagaagtgagctcagacgcagtccctgatgtcaggtcaccagctactccagcctgcaggagggaccttcccacccccaagacctttgtacttcgttctgtactgaagaaaccctctgttaagatgtgtctagagagcttacaggaacactgtaacaacctctatgatgatgatgggactcatccgagcttaatctcaaatctcccaaactgttgcaaagagaaagaagcagaagatgaagaaaattttgaagcacctgcctttctaaatatgaggaagaggaagagagttacttttggagaggacttaagcccggaagtgtttgatgaatctttgccagcaaatactccattgcgtaaaggaggaacacctgtttgtaaaaaagacttcagtggtctcagttccctgctgcttgagcagtcacctgttcctgagccattacctcaaccagattttgatgacaagggggagaatcttgaaaacatagaaccacttcaagtatcatttgccgttctcagttctcctaataaatcatcaatctctgagaccctttcaggcactgatacctttagttcttcaaataaccatgagaaaatatcctctcctaaagttggtagaataacaaggacttctaacagaagaaatcaattggtcagtgttgtagaagagagtgtttgcaacttattgaatacagaagttcagccttgtaaagaaaagaaaattaataggaggaagtctcaagaaacaaagtgtacaaagagagcacttcctaagaagagtcaggttttaaaaagttgcagaaagaagaaaggaaagggaaagaaaagtgttcagaaatctttatatggggaaagagacattgcttctaagaagcccctcctcagtcctattcccgagctgcctgaagtccctgagatgacaccttccattccgagcatccgaagactgggttcaggttatttcagttcaaatggcaaactggaagaagtgaagactcctaaaaatccagtgaaaagaaaggatcttttgcgtcatgacccagatttgcatatgcatcaaggctatgataaatatgatgtctctgaattctgctcttatataaaaagttcctcatcgcttggcaatgctacttctgatgaagatccaaatacaaatataatgaacattaatgaaaataaaaatattcc

SEQ ID NO: 39692 - DNA, 3690 bp, Homo sapiens
  misc_feature (631)..(631): n is a, c, g, or t
agcggagtccccgaggtcacaaggcagtggcaggtgtctgtagtcctcgggttgactgcagctcgcggtggtccctctccgagcccaggaagccactccagtgccgagggagaggcctgggagcgctcggagtgtgcgcggactggagaagggggaggtggcggagtgattcgtagagtaaattcggtaccgaggggcggggtcggggatttgaatcggtcggcgggcggaggaggcgggtggaggaggctgccgggcagagcgcaggccaggatcagcgcaggctgtgagtccaggtcagccgtcgggacctcgggctccgggttcgaagagcggctcccggctgcgggtgctttgccaggagagcccttccggacagaggagccggggtctggaaggagcggccgacgcgacgctcgcctgccacggggctctgggagtaagcctgtctgcctggcgggccttcaggtgcggcgtgagagatggatgccaattcaaaagacaagccccctgaaaccaaggagtctgcaatgaataatgctggaaatgcctctttcattttgggaactgggaagattgtgactcctcagaagcatgccgaattacctcctaatccttgcacaccagatanttttaaatcacctttgaacttttccacagtaaccgtagagcaattgggaattacacctgaaagctttgttaggaactctgcaggaaagtcatcatcctaccttaaaaaatgtagacgacgttctgcagtcggtgctcggggctctcctgaaacaaaccatctgattcgtttcattgctcggcagcaaaatataaagaatgctaggaaatctcctttggcacaagattctccttcccagggcagccctgcactgtatcgaaatgttaacactttaagagaacgaatatcagccttccagtcagcttttcactccataaaggaaaacgagaaaatgaccggctgtctggaattctcagaggcaggaaaagagtccgagatgacagacttgaccagaaaggaaggtctcagcgcttgccagcagtctgggttccctgcagtgttgtcctccaaacgtcggagaatatcctatcagagagactctgatgaaaatctgacggatgctgaaggaaaagtaattggtctccagatattcaatattgatacagacagagcatgtgcagttgaaacttctgtagatctttctgagatatcatctaaacttggttcaacacagtctggatttttagttgaagagtctcttcccctttcagagctcacagagacttcaaatgcactaaaggttgctgactgtgtagtgggcaaaggatcaagtgatgccgtttcgcctgacacgttcacagcagaagtgagctcagacgcagtccctgatgtcaggtcaccagctactccagcctgcaggagggaccttcccacccccaagacctttgtacttcgttctgtactgaagaaaccctctgttaagatgtgtctagagagcttacaggaacactgtaacaacctctatgatgatgatgggactcatccgagcttaatctcaaatctcccaaactgttgcaaagagaaagaagcagaagatgaagaaaattttgaagcacctgcctttctaaatatgaggaagaggaagagagttacttttggagaggacttaagcccggaagtgtttgatgaatctttgccagcaaatactccattgcgtaaaggaggaacacctgtttgtaaaaaagacttcagtggtctcagttccctgctgcttgagcagtcacctgttcctgagccattacctcaaccagattttgatgacaagggggagaatcttgaaaacatagaaccacttcaagtatcatttgccgttctcagttctcctaataaatcatcaatctctgagaccctttcaggcactgatacctttagttcttcaaataaccatgagaaaatatcctctcctaaagttggtagaataacaaggacttctaacagaagaaatcaattggtcagtgttgtagaagagagtgtttgcaacttattgaatacagaagttcagccttgtaaagaaaagaaaattaataggaggaagtctcaagaaacaaagtgtacaaagagagcacttcctaagaagagtcaggttttaaaaagttgcagaaagaagaaaggaaagggaaagaaaagtgttcagaaatctttatatggggaaagagacattgcttctaagaagcccctcctcagtcctattcccgagctgcctgaagtccctgagatgacaccttccattccgagcatccgaagactgggttcaggttatttcagttcaaatggcaaactggaagaagtgaagactcctaaaaatccagtgaaaagaaaggatcttttgcgtcatgacccagatttgcatatgcatcaaggctatgataaatatgatgtctctgaattctgctcttatataaaaagttcctcatcgcttggcaatgctacttctgatgaagatccaaatacaaatataatgaacattaatgaaaataaaaatattccaaaagcaaaaaataagtcagaaagtgaaaatgaaccaaaagctggaactgacagtcctgtttcttgtgcttctgtaactgaagaacgtgtggcatcagatagtcccaaacctgctctgaccctgcagcagggtcaagaattttctgctggtggtcaaaatgcagaaaacctttgtcagttctttaaaatttcaccagatttaaacataaagtgtgaaagaaaggatgacttcttaggagctgcagaaggaaaactgcaatgcaatcgtttaatgcctaattcacaaaaagactgtcattgtttaggagatgtcttaattgaaaatacgaaagaatctaaaagccagagtgaggatttgggaagaaaacccatggaaagtagcagtgttgtgagttgcagagacaggaaagatagaagacgttccatgtgttattctgatggtcgaagtttacatttggaaaaaaatggaaatcacacaccatcctccagtgtgggcagctctgtagaaattagtttagaaaattctgaactgtttaaagatttgtctgatgccattgagcaaacctttcagaggagaaatagtgaaaccaaagtgcgacgtagcacgaggctacagaaggatttagaaaacgaaggtcttgtatggatttcacttccacttccttccacttcccaaaaagccaaaagaagaacaatatgtacatttgacagcagtggatttgaaagtatgtctcccataaaagaaactgtgtcctccagacaaaaaccgcagatggcacctcccgtctcagatccagaaaacagccagggccctgctgctggttcttccgatgaacctggtaagaggaggaagagcttttgtatatctacacttgcaaatactaaagccacttcccagttcaaaggctaccggagaagatcctctcttaatgggaagggagagagctctctgactgccttggaaaggattgaacataatggagaaagaaagcagtaattgacatttcctgcagagtctgtggcaagagggaaagtaaccatctatgctgaaatgatctgtctagttcccattctctgttcaacctcagtgtttcaaaagttcctaataaataaactcatttgagttgaaccta

SEQ ID NO: 39693 - DNA, 3733 bp, Homo sapiens
  misc_feature (631)..(631): n is a, c, g, or t
agcggagtccccgaggtcacaaggcagtggcaggtgtctgtagtcctcgggttgactgcagctcgcggtggtccctctccgagcccaggaagccactccagtgccgagggagaggcctgggagcgctcggagtgtgcgcggactggagaagggggaggtggcggagtgattcgtagagtaaattcggtaccgaggggcggggtcggggatttgaatcggtcggcgggcggaggaggcgggtggaggaggctgccgggcagagcgcaggccaggatcagcgcaggctgtgagtccaggtcagccgtcgggacctcgggctccgggttcgaagagcggctcccggctgcgggtgctttgccaggagagcccttccggacagaggagccggggtctggaaggagcggccgacgcgacgctcgcctgccacggggctctgggagtaagcctgtctgcctggcgggccttcaggtgcggcgtgagagatggatgccaattcaaaagacaagccccctgaaaccaaggagtctgcaatgaataatgctggaaatgcctctttcattttgggaactgggaagattgtgactcctcagaagcatgccgaattacctcctaatccttgcacaccagatanttttaaatcacctttgaacttttccacagtaaccgtagagcaattgggaattacacctgaaagctttgttaggaactctgcaggaaagtcatcatcctaccttaaaaaatgtagacgacgttctgcagtcggtgctcggggctctcctgaaacaaaccatctgattcgtttcattgctcggcagcaaaatataaagaatgctaggaaatctcctttggcacaagattctccttcccagggcagccctgcactgtatcgaaatgttaacactttaagagaacgaatatcagccttccagtcagcttttcactccataaaggaaaacgagaaaatgaccggctgtctggaattctcagaggcaggaaaagagtccgagatgacagacttgaccagaaaggaaggtctcagcgcttgccagcagtctgggttccctgcagtgttgtcctccaaacgtcggagaatatcctatcagagagactctgatgaaaatctgacggatgctgaaggaaaagtaattggtctccagatattcaatattgatacagacagagcatgtgcagttgaaacttctgtagatctttctgagatatcatctaaacttggttcaacacagtctggatttttagttgaagagtctcttcccctttcagagctcacagagacttcaaatgcactaaaggttgctgactgtgtagtgggcaaaggatcaagtgatgccgtttcgcctgacacgttcacagcagaagtgagctcagacgcagtccctgatgtcaggtcaccagctactccagcctgcaggagggaccttcccacccccaagacctttgtacttcgttctgtactgaagaaaccctctgttaagatgtgtctagagagcttacaggaacactgtaacaacctctatgatgatgatgggactcatccgagcttaatctcaaatctcccaaactgttgcaaagagaaagaagcagaagatgaagaaaattttgaagcacctgcctttctaaatatgaggaagaggaagagagttacttttggagaggacttaagcccggaagtgtttgatgaatctttgccagcaaatactccattgcgtaaaggaggaacacctgtttgtaaaaaagacttcagtggtctcagttccctgctgcttgagcagtcacctgttcctgagccattacctcaaccagattttgatgacaagggggagaatcttgaaaacatagaaccacttcaagtatcatttgccgttctcagttctcctaataaatcatcaatctctgagaccctttcaggcactgatacctttagttcttcaaataaccatgagaaaatatcctctcctaaagttggtagaataacaaggacttctaacagaagaaatcaattggtcagtgttgtagaagagagtgtttgcaacttattgaatacagaagttcagccttgtaaagaaaagaaaattaataggaggaagtctcaagaaacaaagtgtacaaagagagcacttcctaagaagagtcaggttttaaaaagttgcagaaagaagaaaggaaagggaaagaaaagtgttcagaaatctttatatggggaaagagacattgcttctaagaagcccctcctcagtcctattcccgagctgcctgaagtccctgagatgacaccttccattccgagcatccgaagactgggttcaggttatttcagttcaaatggcaaactggaagaagtgaagactcctaaaaatccagtgaaaagaaaggatcttttgcgtcatgacccagatttgcatatgcatcaaggctatgataaatatgatgtctctgaattctgctcttatataaaaagttcctcatcgcttggcaatgctacttctgatgaagatccaaatacaaatataatgaacattaatgaaaataaaaatattccaaaagcaaaaaataagtcagaaagtgaaaatgaaccaaaagctggaactgacagtcctgtttcttgtgcttctgtaactgaagaacgtgtggcatcagatagtcccaaacctgctctgaccctgcagcagggtcaagaattttctgctggtggtcaaaatgcagaaaacctttgtcagttctttaaaatttcaccagatttaaacataaagtgtgaaagaaaggatgacttcttaggagctgcagaaggaaaactgcaatgcaatcgtttaatgcctaattcacaaaaagactgtcattgtttaggagatgtcttaattgaaaatacgaaagaatctaaaagccagagtgaggatttgggaagaaaacccatggaaagtagcagtgttgtgagttgcagagacaggaaagatagaagacgttccatgtgttattctgatggtcgaagtttacatttggaaaaaaatggaaatcacacaccatcctccagtgtgggcagctctgtagaaattagtttagaaaattctgaactgtttaaagatttgtctgatgccattgagcaaacctttcagaggagaaatagtgaaaccaaagtgcgacgtagcacgaggctacagaaggatttagaaaacgaaggtcttgtatggatttcacttccacttccttccacttcccaaaaagccaaaagaagaacaatatgtacatttgacagcagtggatttgaaagtatgtctcccataaaagaaactgtgtcctccagacaaaaaccgcagatggcacctcccgtctcagatccagaaaacagccagggccctgctgctggttcttccgatgaacctggtaagaggaggaagagcttttgtatatctacacttgcaaatactaaagccacttcccagttcaaaggctaccggagaagatcctctcttaatgggaagggagagagctctctgactgccttggaaaggattgaacataatggagaaagaaagcagtaattgacatttcctgcagagtctgtggcaagagggaaagtaaccatctatgctgaaatgatctgtctagttcccattctctgttcaacctcagtgtttcaaaagttcctaataaataaactcatttgagttgaacctacttttatgtagaaataaataagtttcttcatcattcagataga

SEQ ID NO: 39694 - DNA, 792 bp, Homo sapiens
tgaacttttccacagtaaccgtagagcaattgggaattacacctgaaagctttgttaggaactctgcaggtaagaaaagttgtcattctgttgtaatgcttttcaagtttaaaaataactttaatataactcagctttatttgtttatacgtactgtcatattttaggtacctaaattgcctactctgcaaacttgcttcttcagagagacttctttgcacatgcacagttcatttagcatagcagggatcacggaatcgcagggcacccagcatgataatgttcccaagtcagagtcgtgcttgatgccaatactagaaaataatgtgtgtgtgagtcactttttgacctgtcacctaggatacaggagggtgtatgatatgaatagtaataatgcattttgttttcatttatggcaaaaataagagaaagtttaagagcaattaagaaaatataatactgaaagagcaggatgtacctcctttaacaatcacaaacagggttgggctcagtggctcaagcccgtaatcccagcgctttgggaggccgaggcaggcagatcaccggaggtcaggagttcgagaccagcctgaccaacatagagaaacctcgtctctactaaaaatacaaaattagccgggcatggtggtgcatgcctgtaatcccagctactcaggagtttgaggcaggagaatcgcttgaacctgggaggcagaggttaccgtgagtcgaaatcgcaccattgcattccagcctgggcaacaagagtgaaactctgtctccaaaaaaaaa

SEQ ID NO: 39695 - DNA, 3625 bp, Homo sapiens
  misc_feature (631)..(631): n is a, c, g, or t
agcggagtccccgaggtcacaaggcagtggcaggtgtctgtagtcctcgggttgactgcagctcgcggtggtccctctccgagcccaggaagccactccagtgccgagggagaggcctgggagcgctcggagtgtgcgcggactggagaagggggaggtggcggagtgattcgtagagtaaattcggtaccgaggggcggggtcggggatttgaatcggtcggcgggcggaggaggcgggtggaggaggctgccgggcagagcgcaggccaggatcagcgcaggctgtgagtccaggtcagccgtcgggacctcgggctccgggttcgaagagcggctcccggctgcgggtgctttgccaggagagcccttccggacagaggagccggggtctggaaggagcggccgacgcgacgctcgcctgccacggggctctgggagtaagcctgtctgcctggcgggccttcaggtgcggcgtgagagatggatgccaattcaaaagacaagccccctgaaaccaaggagtctgcaatgaataatgctggaaatgcctctttcattttgggaactgggaagattgtgactcctcagaagcatgccgaattacctcctaatccttgcacaccagatanttttaaatcacctttgaacttttccacagtaaccgtagagcaattgggaattacacctgaaagctttgttaggaactctgcaggaaagtcatcatcctaccttaaaaaatgtagacgacgttctgcagtcggtgctcggggctctcctgaaacaaaccatctgattcgtttcattgctcggcagcaaaatataaagaatgctaggaaatctcctttggcacaagattctccttcccagggcagccctgcactgtatcgaaatgttaacactttaagagaacgaatatcagccttccagtcagcttttcactccataaaggaaaacgagaaaatgaccggctgtctggaattctcagaggcaggaaaagagtccgagatgacagacttgaccagaaaggaaggtctcagcgcttgccagcagtctgggttccctgcagtgttgaaaagtaattggtctccagatattcaatattgatacagacagagcatgtgcagttgaaacttctgtagatctttctgagatatcatctaaacttggttcaacacagtctggatttttagttgaagagtctcttcccctttcagagctcacagagacttcaaatgcactaaaggttgctgactgtgtagtgggcaaaggatcaagtgatgccgtttcgcctgacacgttcacagcagaagtgagctcagacgcagtccctgatgtcaggtcaccagctactccagcctgcaggagggaccttcccacccccaagacctttgtacttcgttctgtactgaagaaaccctctgttaagatgtgtctagagagcttacaggaacactgtaacaacctctatgatgatgatgggactcatccgagcttaatctcaaatctcccaaactgttgcaaagagaaagaagcagaagatgaagaaaattttgaagcacctgcctttctaaatatgaggaagaggaagagagttacttttggagaggacttaagcccggaagtgtttgatgaatctttgccagcaaatactccattgcgtaaaggaggaacacctgtttgtaaaaaagacttcagtggtctcagttccctgctgcttgagcagtcacctgttcctgagccattacctcaaccagattttgatgacaagggggagaatcttgaaaacatagaaccacttcaagtatcatttgccgttctcagttctcctaataaatcatcaatctctgagaccctttcaggcactgatacctttagttcttcaaataaccatgagaaaatatcctctcctaaagttggtagaataacaaggacttctaacagaagaaatcaattggtcagtgttgtagaagagagtgtttgcaacttattgaatacagaagttcagccttgtaaagaaaagaaaattaataggaggaagtctcaagaaacaaagtgtacaaagagagcacttcctaagaagagtcaggttttaaaaagttgcagaaagaagaaaggaaagggaaagaaaagtgttcagaaatctttatatggggaaagagacattgcttctaagaagcccctcctcagtcctattcccgagctgcctgaagtccctgagatgacaccttccattccgagcatccgaagactgggttcaggttatttcagttcaaatggcaaactggaagaagtgaagactcctaaaaatccagtgaaaagaaaggatcttttgcgtcatgacccagatttgcatatgcatcaaggctatgataaatatgatgtctctgaattctgctcttatataaaaagttcctcatcgcttggcaatgctacttctgatgaagatccaaatacaaatataatgaacattaatgaaaataaaaatattccaaaagcaaaaaataagtcagaaagtgaaaatgaaccaaaagctggaactgacagtcctgtttcttgtgcttctgtaactgaagaacgtgtggcatcagatagtcccaaacctgctctgaccctgcagcagggtcaagaattttctgctggtggtcaaaatgcagaaaacctttgtcagttctttaaaatttcaccagatttaaacataaagtgtgaaagaaaggatgacttcttaggagctgcagaaggaaaactgcaatgcaatcgtttaatgcctaattcacaaaaagactgtcattgtttaggagatgtcttaattgaaaatacgaaagaatctaaaagccagagtgaggatttgggaagaaaacccatggaaagtagcagtgttgtgagttgcagagacaggaaagatagaagacgttccatgtgttattctgatggtcgaagtttacatttggaaaaaaatggaaatcacacaccatcctccagtgtgggcagctctgtagaaattagtttagaaaattctgaactgtttaaagatttgtctgatgccattgagcaaacctttcagaggagaaatagtgaaaccaaagtgcgacgtagcacgaggctacagaaggatttagaaaacgaaggtcttgtatggatttcacttccacttccttccacttcccaaaaagccaaaagaagaacaatatgtacatttgacagcagtggatttgaaagtatgtctcccataaaagaaactgtgtcctccagacaaaaaccgcagatggcacctcccgtctcagatccagaaaacagccagggccctgctgctggttcttccgatgaacctggtaagaggaggaagagcttttgtatatctacacttgcaaatactaaagccacttcccagttcaaaggctaccggagaagatcctctcttaatgggaagggagagagctctctgactgccttggaaaggattgaacataatggagaaagaaagcagtaattgacatttcctgcagagtctgtggcaagagggaaagtaaccatctatgctgaaatgatctgtctagttcccattctctgttcaacctcagtgtttcaaaagttcctaataaataaactcatttgagttgaaccta

SEQ ID NO: 39696 - DNA, 1045 bp, Homo sapiens
aggagtctaactacagcagaaaattcctgcaccctgcagcagggtcaagaattttctgctggtggtcaaaatgcagaaaacctttgtcagttctttaaaatttcaccagatttaaacataaagtgtgaaagaaaggatgacttcttaggagctgcagaaggaaaactgcaatgcaatcgtttaatgcctaattcacaaaaagactgtcattgtttaggagatgtcttaattgaaaatacgaaagaatctaaaagccagagtgaggatttgggaagaaaacccatggaaagtagcagtgttgtgagttgcagagacaggaaagatagaagacgttccatgtgttattctgatggtcgaagtttacatttggaaaaaaatggaaatcacacaccatcctccagtgtgggcagctctgtagaaattagtttagaaaattctgaactgtttaaagatttgtctgatgccattgagcaaacctttcagaggagaaatagtgaaaccaaagtgcgacgtagcacgaggctacagaaggatttagaaaacgaaggtcttgtatggatttcacttccacttccttccacttcccaaaaagccaaaagaagaacaatatgtacatttgacagcagtggatttgaaagtatgtctcccataaaagaaactgtgtcctccagacaaaaaccgcagatggcacctcccgtctcagatccagaaaacagccagggccctgctgctggttcttccgatgaacctggtaagaggaggaagagcttttgtatatctacacttgcaaatactaaagccacttcccagttcaaaggctaccggagaagatcctctcttaatgggaagggagagagctctctgactgccttggaaaggattgaacataatggagaaagaaagcagtaattgacatttcctgcagagtctgtggcaagagggaaagtaaccatctatgctgaaatgatctgtctagttcccattctctgttcaacctcagtgtttcaaaagttcctaataaataaactcatttgagttgaaccta

SEQ ID NO: 39697 - DNA, 626 bp, Homo sapiens
ttggcgatcactaggtaaaaccacgggtgcaggtgtcatggcggccccaggtagaagctacatttgcataacaaaaaattagggtgggagggccagtctttagacgggctatgtaaatgattcacctggtcaaaccagtcccctgggccctatgtaaatcaccacctcctcaagcctctgtacaaaatcgattgcgtttcaccccaaacccggagaccctctcttgggtgatatttctcagcgtgaggaacctttccctattaaattttccgctcctaaacccactccttgtgtgtgtccatgtcctgaattctttcttggctcgagacaaccacgggtgtatcccccaggcaatggagccatttcattatgaggtaaatactataaaaatcatttttaaatttttttccaagagatgggattctcaactgtgttccccaggctggtcttgaactgggctcaagtgatcctcctgcttcagccttcagagtagctgggactacaagtgtgtggcaccattcccagatataaaaatcctaattttatgaaggataaaactggtgcttgaacacaggtactcaaaagcaggttctgtgctttccccttcactagagagcctgttaaac

SEQ ID NO: 39698 - DNA, 368 bp, Homo sapiens
gagatgttctggaattagatagtggtcatcactaactttgcttaacttttttaatatactaaatatcaccgaattgtatattttggtttttgtttgtttgtttttttgaggtggcgcctcaattggtcgcccagggtggagcgcagtggtgcaatctcggctcactgcaacctccacctcctgggttcaagtaaaatctcccacatcagtctcctgagtagctgagattacaggtatgtgccactgctgctggttaatttttttatttttagtagagacgaagtttcaccatgctggccaaactggtcttgaacacctgacctcaagtgatccaccagccttggcctcccaaagtgcgggattacagg

SEQ ID NO: 39699 - DNA, 319 bp, Homo sapiens
ccacgtcacaatactaatcagaaaatatagaagtctggatcaagttaaataagtaagggattaaacaaaacagaatagcacaccccctgcccctcctcccccttctttacctttactaagtcaacaagacagctagagatgccaagaattccagttcataacagttccaagtttgggctttcctgttatcttatcagagaggataggtagtttggtagcttggagtgataaaaataatgtaacccctataggcaaattttaaaaattcagctagaagttatggttttcttaacctgatcaacacagcaacatgaaatct

SEQ ID NO: 39700 - DNA, 373 bp, Homo sapiens
aaagaacacataattaaactacaccaaagcagagacaataaaaattagatccctaaggaaatcagcattagaatttctagatacaaatgtaaaataattagatataaaatgttcaaagatattttttaaaatggaattataatagcgagcaacaaaaggctatcaaaaataaccagaaagatttgaaaaacaatgttaaacaacagctataaaagagttaatgaaagatgaatctgaagaaataacagaatttcacacagaggagcaaggggatggaacatatgagagcttgagatgttgaagacactgagaaagtcaaacatgcccattgcaatcccagtaggaaagaatggaggaattgcaataatctgaa

SEQ ID NO: 39701 - DNA, 305 bp, Homo sapiens
tgaaacttcatagccattaaactctaactccccatttctccccgctctcagcccctggcaaccactattgtgctttcttaacattaagctccccccggctttttcttttaacatttattttaggttccggggtacatgtgcaagtttgttatataggtaaactcatgatatcacggggatttgttgtacagattattttgtcacccaggtactaagcctagtatccagtagttttgcccttctctgtcctcccaccctccaccctcaggtaggccccagtgtctgtcgttcccctctttgtgtcc

SEQ ID NO: 39702 - DNA, 232 bp, Homo sapiens
gtcactatgccaattcaaaacaaaacaaaacataactgattcccagctgtgcccagtccaagcccaaatctggagaaggcagccaccagagaccctcggaatcctcccgcctctggacacctgagccccatgccagaaaggaaaggaaagccaagcccagggttgggtgccttcctcagcgggctgtgtctgttgtccccgagactgctcctgcccacatctggccacggac

SEQ ID NO: 39703 - DNA, 317 bp, Homo sapiens
gtgactttaaaaactagggaaatgaatagaatcttatctgctgggaatcttgcttcaacaagatctcttagacttgctttggcctcattacaactctacaaaaaaaggaattttttttaaacctcaaataattgaggtaattaatttctttcttcaattcatggcacactctttacattattcttgcaaagcccctctgtgttactttttttgttttattcttcagttcatctccactttcccctatatacaaccacttaaaatatgcctttccagtcgactacttatgtatttatttagcaatatgtttctttata

SEQ ID NO: 39704 - DNA, 186 bp, Homo sapiens
cctagaaatgatgaaaccccaatagtaatgagcatatctagcatctaggacttgatatctcttagcagtcatcttagcaaagttgatgcaaaagtaattgcggattttgctattacctttaatgacaaaaaaaacgcaattacttttgcaccaacctaaaaaaggaaccctggctcctgggagaaa

SEQ ID NO: 39705 - DNA, 357 bp, Homo sapiens
gacccactggaggctgggatttgagatgagaggtcaccctcggagttggctccagctgctgcctctgcctgggacccctccttgggagttgggtggcagggccttgctgggggcacttcccttcgcatctggattttggcctcgggcccagggctatgggggtttccagagtggtgacagccttgtcctagcagggaccagcccaagcacttcctcccagagccctctgggagcgtcccagccccaaggctgtcattttgtcgtagggagtaaattgtggagtcagcagaggctgtcttccacactttctgtgccttccaggtatcctgtcattcctcattctgaaaacctaggctt

SEQ ID NO: 39706 - DNA, 298 bp, Homo sapiens
cagacccaggtcccccacccaccaccgagggcagcttttgccaccagaatcttgtcgttcagaggtcccggcacctccaggccgggtgtctgggcagaggtggtgtggaagtccccatgtacctgcttctgtccagcctcaaatgggagcgtcacaagcaccttccctgcacctcaggctccccgggcacgtggcggaccgaccctcgtccctgtgtgggccccgtcccctttactgggtctctaagcctcaagctccccaggcacctgggagaccaaccctcctccgtgtggggggt

SEQ ID NO: 39707 - DNA, 461 bp, Homo sapiens
aaccttgatgacagagaagtggaactcactgtgtacagtctttctaagataaaatgtgtttggattaaataatgtatataggatattgtttagttctgattgtttatagtaaaagcattgctgtcagtgaggcagtatagtgtagtgattgcaagctctggaagtatactgccaaggtgtgcatcattcctctgtactgtgtagaatggcaaaagcaaccttaagaggtagactgtatctttatgtagcaaattaaattatgatatactttgcgttatgtctaacacaaatgatcaataaaggctagctgctgttataatgaatttcctttcagagacattagttatgtgctcagtaatctttttgaaatgttcttttttattttttaagaatagttaaaaagtgtcctattccctgtccatccctggcccaccatggttttcttcaagattatctttaaa

SEQ ID NO: 39708 - DNA, 305 bp, Homo sapiens
ggattaatccattgatggatcaatgggttaatggattatcataggaggggaacgggtggctttatattaggaggaagagatacctgggctaacatgctccacttcctcatcatgtgatgtcctgtgctaccatgagactctacagagttcccagcagcaagaaggccctgagcagatatggccctctgaccttggacttctcagcctccgtgactagataaaacttgaattaaaagaagaggcaagaactggtgcttcattcatctctcccatcaactctctctttgtggtcctgatttgtcagt

SEQ ID NO: 39709 - DNA, 330 bp, Homo sapiens
ggattaatccattgatggatcaatgggttaatggattatcataggaggggaacgggtggctttatattaggaggaagagatacctgggctaacatgctccacttcctcatcatgtgatgtcctgtgctaccatgagactctacagagttcccagcagcaagaaggccctgagcagatatggccctctgaccttggacttctcagcctccgtgactaagccactgagacagtggtggggcagccaccttctcgttcttcttcttcttcctgctttccctcagagatggactcttaataagatatctcagaagctggactggcctaactggg

SEQ ID NO: 39710 - DNA, 394 bp, Homo sapiens
gaattccttatagacaagttctggaaaacagcctcagagccaaaagcaaggactttcaggaagaaagcaagtctcagagacagcctgcttcccaaggacaatcatgactcttctgggtcttaactaccagcaaaactaatggtggatttaatttctcagcccttgaggctgggagaatgcagaaaaaccagagggcagaggaacctgctggcagagacagctgaatccctgacagaaaaaatgagagcctggaagagatatgtgtgaagctcaaacacaaaagatttccttgaactagaaaatgtgatctcagaactaaaaatttccattgataaatcaaaggagaggacagtcattgctgaaaccccaaaataggtctagaaaattaaataga

SEQ ID NO: 39711 - DNA, 560 bp, Homo sapiens
ggggtttcatcatcttggccaggctggtcttgaactcctgacctcaggtgatctgcctgtctcagcttcccaaagttctgggattacaggcataagccaccgtgcccagtctatggcaggttttttggatttatgtttcttcaatatctttctacaaagatcagtttctaatagaagccaattaaacatagaaactctaaggtagcatatttcccaagtgttgggaggctttggagctttttagcttcgagttggtgtgcctgatagatgagaaacagcacaacagaaaagctgttcataggatccatgactctagctattgcattttttctcttgcattaatttttctagtgtatttgtaaaacctttttaaaaatatggattcttaattttaaaattaacctggtgcaatggcacatgcccgtagtcctagttacttgggaggctgaggtgggaagatgacttgagcccaggagttcaaggctgtagttcaccgtgatcacgccagtatactccagcctgggtgacagagtgagaccctgtctgtaagaataaaaaat

SEQ ID NO: 39712 - DNA, 284 bp, Homo sapiens
tggtttctacctcagttgtgatattaatctctccatttcattctaaatcctattaagagagtagaagcttaactttatcatattaatgccaagatctgggcaagcatttatctagatataaacaaggatatatgcctttcagaaggttatatcctcattgtgataatgaagaaaggggcttatatgttaactactgtgattccacaagacagagtgtttgggaagccccctttcacatttttctaacctgataagcaagaaaacataagaagaaattattttga

SEQ ID NO: 39713 - DNA, 367 bp, Homo sapiens
ggggatttgcatggtaagctatctgagttcagcccttggcatatcttttgtggggaaatctgatcaaagagattaaaaaggagcaggtaggctgctttccctagcccacctcaatcttggacattccaattcatgaattggaattggaattccaattcataccgagtgttcttccccactgagcttcccagctgagctccctgtcgtgggagacccaggaccggcacacggcccctgcctcaggaagctggcatgtgcctggaccccctgggtgcgagggccctgcttggtcctatcctgccggggactgagactgtcccatattctacttcagctgtcactggccgttcccacctattttaggagc

SEQ ID NO: 39714 - DNA, 397 bp, Homo sapiens
gtttcaccgtgttagccaggatggtctcgatctcctgaccttgtgatccacccgcctcagcctcccaaagtgctgggattacaggcgggagccaccgcacccagccactggactgtgccttttgattggaacatctctgtcagccccagggtctgcatcacacatggtctgcatctgtgcacatggctactgtctctttttagcagtgatatcaccctgcctcatactgttgtttatgaggccatctccccacctggctgggggccactgctttggccattcagagtggaattcctctgtcttccagcccctagcacaggcctgggccagcattgctgctcaggaaatgcctgtggaatcaaagtgaggactgtcccaggtgttgaggatttactgt

SEQ ID NO: 39715 - DNA, 712 bp, Homo sapiens
gttaagtgaccttcagattttagcaatttcatgatttacaaatcgtgggttatatttttttctcttaaatatatttctgtgtcatatttttagtctgtagattttcttatggtcccatgattattggtgtatactttttttttcttggtaagacctttaagttttatgattttcaattgagataatgtataatgtttgagttttaggctatataaggaattagctttcctgcatttaaaggaatcatttggcagtcagtagcatattttcctgattttttgttgttgttaaaggagataagttgataactgtatgttgaagggttctcatgatattctctaaaaagtgcaaatatcagtgcttgatttatagatgtgtaataaacagtggtctgtaaaagcatgtagtataaaaaatatggtattttcccttatatacagcctataaactcttcctattccttgagtttagggtagactaacaaattacagcgtagaagagagtcagctaccagattaaatgcatgcgtaccatacagataatttattaagtatttttgcatattgaacattgacttacattaattttcccttttcaccaccacgtctttgtcattttgaccctgaacacttaataaatcactcagattgatctaaaatatgcttatgtatactttaatagaaaattacattgcatggctttctgacttggg

SEQ ID NO: 39716 - DNA, 345 bp, Homo sapiens
  misc_feature (19)..(19): n is a, c, g, or t
  misc_feature (164)..(164): n is a, c, g, or t
  misc_feature (168)..(168): n is a, c, g, or t
gatccaccccgcctcgccntcccaaagtgctgggattacaggcgtgagccactgcgcccggcctttttttaaaattttttttctttctcccttctagtcaaagcatgaaacctttacgtcactggaaatatactgtagtgactttgaggggaataggatggtgnaagngtccgaattcggcacgaggcaaagaggtgtgggcaacccaaacatctactgttgggctaatagataaagaaaaagtggcctgtaatcccagcactttgggaggctgaggcaggcggatcacgaggtcaggagatcgagaccatcctggctaacatggtaaaacctcgtctctactaa

SEQ ID NO: 39717 - DNA, 1139 bp, Homo sapiens
gatccaagtgcattacagcacagaatcaggacccaaaataataaaacaggctgaactaatgggccaaatccaatgagataaagtttaagtaggataatataaagttctgtactttggtccaaaaaatccccactactcaagtatagggtacacaaaattttgttatatagatggcagcatatagatgtagctgttaaaataagtccattaaatgttaggcagcattataagcagtagctatctattgagtagtagaaagaacattggatttggcattagaaaactgggtcaaatcccagttctgacagtttggcccttaaactctttgatccttgctttcttctcagggtggttgtgaagttaaaatgagttaacatgtcttttgagttaacaagtctaatttccaagcacttgtgctcaataaatatgacctagaaaaattaccattcacaataatataagtggctgtgccactccattttgtcctagaaaagatggtacttggaatgagaggggccacactcaaaagcaaaccagagctacttctaaagttagtgactaggatggatgagcgactcaaaagagaacatgaagaatggctacaggaactggggataactgacttgaagaacagtagacttaaggagaccatatctaccttcaaacatctgatggtgtgcttcatggccttctgtagagctccaaaagatagaagaacactggagaacggaaaatagaagaatgtaggcaagggcgaccacttggtggggatgttgtgagcgatttcagcacaagtggatggttggactacatggcctttaacacgagagtctgactgtcatatttctaggacatttttcatgaaatggatccttctaagtctgtctcaaaataatcccaggatctctgctatcttgggttgggctggcttcttgccttaaaatatcatctttcttccagttctaggccagatctcttctttatccagtctgactttcttgcaccagtttactcttgctgactactttgttcaggaatttctggtcacttttaaaatgtcattccccccccccaaaaaaaaactatccaagggacacagtacaaggataatttgtggacatttttggggagatgagcca

SEQ ID NO: 39718 - DNA, 3196 bp, Homo sapiens
atttgacaagattcataaacgtggatggcatagcatcatcatttctcttaccaattaagaaaaattatggtggcacttaaaatattttactttgatttttcctttttggaacagtcagttttaaggtaaaatggcttgtaaatttgagtttttgctgctgcttgtaaggcaggtaaattatggcttgcatgttttcataagcataaataaatcttgtgctttatttgggatgaggaagttaaggcagttgaaaataaaataagtggtttggaagtttcttgagaagaggatcaaaagaaagagaaccaatatatagaaatttcacatgatcaaggaagtttatggatgcgtttgtggaaatcttactctatgaacttgttggattagatgctgttttattctctactaagtgaaaagtgctttatttcagtgctttcccatggttgggagagagtagctgttaactattctgggtaatgggggtgagtatgttgaggaagagatttagaaccagaagagtgaagagactcaaactgttccataacaaggaaagctttaaagaccttgtatttcacagtctggagaactagagggatctgactcttggtcagttcatgtaacaaattatttattgagtacttgctgggctctcaagattcatgctttgagcacaggcagtcattcagtttccagtccacctgattacatcagcatgcacttagttttctttcttgttcacaaggacttttgatcatgcaagacctggccaagtcttctataatccagatgggtttcctggggctgttacttgagtattcctgtcaaaatattttcgtgaaccctgcctctcttagcaaacactacttcataagtgttaacaaacatccttttaataatctattccagaatattctccaggagtaagtttactggttgggatttgtggaagccattttctcatgtttcccaaataagatatgtagtcttcagctgattcctcaaagatgattgacagggagtttcacccatctttgtggtagtttgtgagttcctaggcatgtaagtgattaaaagattgagtacctgctctcctaatatctacccacttttaccatgtcagtgttttatgaattagatcacttaccaagagaaagcagaaacgaaatacttgaatctgacaatatccgactggctcttttcattgctctggatttattttccacatcaatctctttggggtggccctagcctattattcctgtgggttcagctgaggcatggttagcctgggtttataattcagtttacgttaaacattccctgtgcagcaacagctgttcatttaggtactctttttttttttctccttattacagttacttttggtattatgtgctttatctttaaaagctttctagctctaggaaattgttttccctgtttgtgtctattttattgcatcttgtgtaacactgtggttatatctataccaacaactttttgttgctatggataccacagattgtcctgaattaaaaccctaacataataaatgtctgtttagccgttactttactgagtaataatactatattgtggcagtatggccctttaatactaaggaggtatggtgtagaaattatttgaacactcatatccaaatgttattaatgatgtttgacagttttctcaatgcttaatgatattcctcactcctcattccagggtagaggagggtttggtcccaggctatggacaaactgctaatttgtttgaagtttgaattatttttcatgggaaagggaagtgataggaaatgaccaagaccatccacttttgacttgagtatggatcgagtataagtaatagtttcctagcctcactgattgtaccatgaactgacagacctaccagtcaaattcatgtacccagataatggtctctcacatggcaacaaagtacacagcagtttgcagtatgtgtctcttttaaagccagttcagtgttttcaccttgacgaccactcctgcaaacagttctcatagagctcttctctgctccccaaatcaatatattttgaagctatgtcaaatatttacatagaaaggaaataaagttgtatgtgctttgaaaccagcaaaatcctttgtacaacacctctcttctccttctatgtttatgaatagagttcgtggaatattgccatagtgcaaataatgacttccgtgtatcacttataccctgtaggggtgagctttcaccttaggtgtggttatatcctagcagtgtatcaagcccactcaaataatggtctatatttaaaagtatgtgtctagtttacttatttatgtcatttaacatccataaatgtacatctctcagttgtatatcatgattgtaaatcagaaattttgatggcaaaaatattctaaaacaacattcttcaggggaaagaaaaacatggataccttatctagcattgctcataaaagtactcatgttcatcctttttggaaactattaatcatgctagccttagatcattttaagctcctttgctcaaaccaatcattgatgtgcagtatgaccagcagctagtaagtctgtggtgctaccagtatagcttggaagatggttctgaattaatacctcagaatgatatcaaaagtaaaagagtggttctattgctaaatatattgactagctttcttataacaattttactttgaaattcaaagttccaaagctaaatgtctaaaagaagtaactgcagcttgttctgctgattttggaaaatagtattaaccatgtaagatctttggggttggagtgaaggtcttatctgcattaattttgttaatgcacattgtagatgtggagaacatcttgacctgcataaggattgcgtctcattttattgtgtagtgctttttcgaaatatttacatttctttggttcccatgttcatgtattctggagaagtaaaatttcttgattactgggcagaccctaaaactactaagagaaacataacatgtagttagctgtctgctcatggtttgttcaaatctaagctaaccttaatggtgctgtgtccgctgtccacagaaaacgcccttaagtagccctaccttactccttagagcttattttgcttttgtatttaataaaagctgtcttaaatgttaaaaaaata

SEQ ID NO: 39719 - DNA, 359 bp, Homo sapiens
cggcctactataagaattctaccccaaagaggcaccttatattacctggtaagttacccattcaatccatttcttccttatgtttagaaacagggataggaacaagaaaacatacaccgtattttcatctatttattgttacaagtatgatgtgccaggtactagatgttatcccacaaataattttaaaaatctggaaaagtattatttctactttgaagtggagacagctagctaaaaatagcaaagctgcaatacaaacacaggctaagtgactcttatgtccatgcacttaactactgcttcagaaatgacaagacagaggccaccaataagccatagctttataacagtgggaa

SEQ ID NO: 39720 - DNA, 388 bp, Homo sapiens
ctgcccatcttggcctcccaaagtgctgggattacaggcgtgagccattgtgctcggccattcagttatttttctgtttccttagtagagcccaatgataatgaagaatagctgcagagatcaaagtatcctgaaatctattctgatttatgaaaagaaatttaaatggttttcaaaatagttttactattttctttgaaaacttgtgatccacaaattatctatatacatgcataaacctatatatgcacagacatcatatctcaggtaaacagaagacacatcttctaattttactggataaagtattcctcactgtagtatggtaaggttcacatttaccaattatgtattatttaaacaatcttactttaagatgaatgaattt

SEQ ID NO: 39721 - DNA, 557 bp, Homo sapiens
gccatatccagctttgacatggggtggctgagctgtggctgctagttcgaccccatccagagaagagaggctagcaatcaggtgctctggtcagcgtggttcctgtgggaagtgactctcccatgaacccaagcatattgttcctcagagaatattagactgttggagcagcaaataaccctaagatgagcttattcagcttcttcatttcacaggtgaggaaactgaactccaagaagttaaaaagacttgcttttttaaactccagggatgggctaatggcagagccaggacgactgaatccaacttcctgacctcttgtccactaatctttcctagacaccaggctaggccctgctaatctccttttgttactcaaataattaatttattaacctttgacctcctgataattgcagcatgaattttcgttcagttatccagtgtctacagatataatgaatgtcatatattactgaaatacttgattatggcattttaaaactggggtccaagttaacaccaaaagtggctacagtaatatgtctgttaagaaa

SEQ ID NO: 39722 - DNA, 339 bp, Homo sapiens
gaatttgagccaaccaaaatattaaacctgtcttacacacacacacacacacacacacacacacacaccggattgctgtccctggttcaagtgtgccaagtgtgcagacagaacatgagcgagtctggcttcgtgactaccgaccataaacccacttgacaggggaaacatgccttggaaggtttaattgcacaattccaaccttgagctgcgcgggttccaagagccaggcccgtacttgctgttgatgtcattggcttggggagttggggtttggtgcccagcgcggtcgttgggggaggggcaaggcatagaacagtggttcccagaccttgctgc

SEQ ID NO: 39723 - DNA, 358 bp, Homo sapiens
cccggccttccagaaatatttttcaaaggactagtaatctaatcgcgctatcgagtttatattattattttgtattatttgcacgctgttacatagtatataatgataatgttttctacagtgaaagagctatcccgtcttccctttacaactgtctgaactttatttactcattagtcaaggttctttgcaaggcaggtgattaacttaaatatctcagtttatacagtggtttaaaagacttttgttatggtaatagggagagaaacttgtcagataggctaaaatctagataattctacatattctgaggaattcatgctcctgtggctcttgcttataaatatcttggaatgtt

SEQ ID NO: 39724 - DNA, 506 bp, Homo sapiens
cccggccttccagaaatatttttcaaaggactagtaatctaatcgcgctatcgagtttatattattattttgtattatttgcacgctgttacatagtatataatgataatgttttctacagtgaaagagctatcccgtcttccctttacaactgtctgaactttatttactcattagtcaaggttctttgcaaggcaggtgattaacttaaatatctcagtttatacagtggtttaaaagacttttgttatggtaatagggagagaaacttgtcagataggctaaaatctagataattctacatattctgaggaattcatgctcctgtggctcttgcttataaatatcttggaatgtttctgaatgcctctaagcctatgttcagactctgttgcgtcaatgactggtagtatttctttcattaatatgtttgtcatctggtctgcaagatagggttggatgaatatacttaacactactgaactgtacacttaaagatcgttagg

SEQ ID NO: 39725 - DNA, 331 bp, Homo sapiens
atcgggagtgtctcatactttggtttactttagagataacataaacaagattaacacggtatttagaggcatgctatatccaagggagagaaacttgtcagataggctaaaatctagataattctacatattctgaggaattcatgctcctgtggctcttgcttataaatatcttggaatgtttctgaatgcctctaagcctatgttcagactctgttgcgtcaatgactggtagtatttctttcattaatatgtttgtcatctggtctgcaagatagggttggatgaatatacttaacactactgaactgtacacttaaagatcgttagg

SEQ ID NO: 39726 - DNA, 465 bp, Homo sapiens
ggttagaaggcccttctgcaggctggtagtgtctgttccacctggattaggttaactcaacaggtaattcctatctgtttatacacagatgctttagcgcttgctgtacaaagtcatttggctacacactgaggaggcccatgggagtagtagcctcctcaaataatgttccctacctatctgtcaataccttccatcttaggtattgagaatttaatgaggctgtgttttcttggctgtgcttcttgatgttggaagccatgttcctggggaacaaatctgtattcttttctcctaagatgtgagtttttttcaacctttgctaatattttaatggagcaaatgtacagatgttgagattttgcactgcttataaaatgcctaccatgttttttgcataatggattgtatagaaatgcagattatattcttacagcaaataaaaagatgcttttaacagaaaaa

SEQ ID NO: 39727 - DNA, 367 bp, Homo sapiens
ttttgctctctagtggctgtatgggaccgtggtaataatagttgctcttgtttatttcctgtttgatgtgttttgatgcaacagactattcagctcagacagagaccgtgtgctgcaggtgaggaacacaggctttggagtctgaattcaaatgcaacttctactgcttacagcgatagcaacccagggatgtttcttcgacttgcttccttcatttattcctcaaatgtttatcgagcatccgctgtatatcatgtgttatgttagaggctggggttacaatgggggcaaagatagacatggtcctggctctagtgactcttacagttcaattcaagagagatgtcaaataaacaaatgagtttgt

SEQ ID NO: 39728 - DNA, 314 bp, Homo sapiens
gcctagcaagttagtgctggttgttgtcaggagacttccacttagctgcttgagtgttctcatgtcatggcagctgatttcctccagagccattggtgtgaaagaataagccaaaaagccaatatgctttttatgaactagtctcggaagtcatatattctagtattgccatattctattctttggaagcaagtcactaaatataggaataagggtgattaggttctaccctttgaatggaagagtataaaagaatttatggacatattttaaaatcaccatgatggtaaaatgctatgttgtaatgcttagtt

SEQ ID NO: 39729 - DNA, 367 bp, Homo sapiens
actctctttgagagttactcatttttccctggatatctcccacatatagacaaggatacatagtcataagacaaaattacaacaaatttagtttaaagatcttaattagcttttatttgcaattccagaatcaggcaacatttcaatctatagaatagaatgggccaggcgcggtggctcacaaggtcaggagatcaagaccatcctggctaacacagtgaaaccccatctgtactaaaaatacaaaaaactagccaggtgtggtggcaggcacctgtagtcccagctactcgggaggctgaggcaggagaatgacatgagcccaggaagtggagcttgcaagtgagccgagattgtgtcactgcac

SEQ ID NO: 39730 - DNA, 318 bp, Homo sapiens
cattgaggagtttgaaagcaaagagtcttggattttagacatttgggaatggccaagattttgacttgttttgtgaaaagatgtatttgttcagttgagcaagtgtgaagcaaaatctttcagcatgtctattaatcttagcggtctgagtgatgtaagggtatgcgcactcatgttttatgatgtttggtttcataaaaatatgtttggtttcaaggcattggcctctattctctgttgactaagaacaaatttggagtaaggaaggcatcttgaattttatcccaaacctagtttgttttttaatcatcaactgga

SEQ ID NO: 39731 - DNA, 434 bp, Homo sapiens
acagactaatacagtaagttggtactagaggtggggtgctgctataaggatacctaaaagtgcagaagtgactttggaactagataacagacagcctgtgaaagcagccgaggcgggggggtttaccatgcaaagccacaggagctgagcttcccaagactgtgggagcccacctcttgcaacagcattacctggatgtaagacatggagtcaaaagagattattaagatgctttaagatttaattactgctccactggatttcagacttgcatgggcctgtagctcctgtttttggccaatttatcctatttagaatgggtgcatttacccattgcctataccctcattgtatctaggaagtaactaacttgcttttgattttacaggctcataggtggaagggacttgccttgtctcagatgagactttgga

SEQ ID NO: 39732 - DNA, 1377 bp, Homo sapiens
tttctggcaaaccttcttcttgagacattactacttttcataccacctctgtcctttttgaagaataaaagttttaacattccgtaggttaatgagaataggacttgggcagcagcaatcatccttcctgtcacctgtaacccacagcttatgctttcttcctggaggttcttgtctgccacaaaggctcactgctgataggaatttgtatatgatcaaaggtgtttagttttataaaacagttaagtccagtcttaattttccacattatcactttcaattttgtattgtggattacgcattttaaataaaaaattgtgtgattgctacattttggaaaacatttttttcaagaggcccatccgtaatttaattgtaaaagatactgacaaactaacttggtttattattttggttatgaccccgtcatttgacttgtctttagttgtcttaacggggactgaatatgcgtgcaaaggcacgattgatttatcatgctggcttttatgcaacttgtatatattttaacaattttcctgtttgctaaaggcttaggttaaaagttcattatgattgtttatacatttctggtgaatacatcatgatttaacaagtggaaagaacatctctttccttccattttctggcatactccccttggaatcagatctgaaacttttaagctaaaatttccattgcatttggagagtagttatttgtgtatgcatgcttttgagacattgtagcaataatactgtaatgttgagccgaatctttctcctcattgtgttcattcactgccaacatctggcttcatcttttggatgaatgttcattggttttgaaacagcctatagggtaaatactgtgtttgaggtacggatgattttcataactacttcctagaacatgtccatttgaagagcagtggggccttagaccccaaagtccatttatgtgtgggcaaataggaaatgttgcaaacaaaacaaagcactagatctaatgtccagtgaaatctggaatgaactagtcattagagccggttctttcatgccaggaaaaagttactcagccaaatctgaactactctcctgcagtttacacaggtggtatttaattgctgtctgtatggaggcaggctaggagcaaggctgtggacttgttgtgattgtcactagttaatcaagattccctttgtggtgcttaagaccctaaaaaggacactaggagctgggcatggtggctgacacctgtaatccaagaacttggggaggctgaagtggaggatcgcttagcccaggtgttcaagaccagtctaggcaggatggcgagatcccatctctaccaaaaaaaaaaaaaaaaaaaaaaaaaaaa

SEQ ID NO: 39733 - DNA, 542 bp, Homo sapiens
  misc_feature (77)..(77): n is a, c, g, or t
caacacctataaaaatatggcaagcgtcatgtttaatggggttcctctaggaggagaaaggtggatttttttttttngggcccaactcaaacattaaacaaaaacaggcatccagatgaatccaagatgatttcctttacaaccaagaaaatgaattttctttttgtctgaatagttgttacacagaccggggctccacagtacactgatgcagaattgcatcctaaaaacgggtcttctggtcacatacatttggaaaacaccttagtaccaaatcttcctcatgaatacttaaagatgtgagttataagtcctacggtaaaaacatgattcagctttgtagaatattaggttaaaaacatatttgactgcagatgccttctctgtcctgtgaagttacgaatgacactgaacactaacaagactacggatagggggtaactcaatcagagtcactatgaaacaacataaccctaaatcactcagcaaatgttcattaagaatgaactgctggggtcaggggaggcagtgaaagaaaaaaa

SEQ ID NO: 39734 - DNA, 428 bp, Homo sapiens
tctccccttccctgtcacccactaatctggtttctgtccctatcgttttaccttttctaaagtgtcatataagtggaatcatactatgtgtagacttgttttttgcttttttcacttagaataatgcttttcacacatgctcacttttacattgtatgtgaaacatcctttggatgggtatagcacgtgatccttgagagagcttatgagatcctacacacttctctgtgttgcaaaactctcagcagcactttggtgttcttaggaaaggttattgtggattgcttttagggttttagggctctgttggggtctctggaatacaagctttttattatcctagccttccatccctctaacttattatttggattggaagaatgattccaaagaccatctttgcttgcttgatcctgtataatatctta

SEQ ID NO: 39735 - DNA, 386 bp, Homo sapiens
gtcaaatacctgttttgataatgaaattggcttcctgtggcgttctcttggtacctcattaattacatttgctcagatgatatcagaggtaagccagcaagcatattctgaattccaatctagaggacatgctgcctccatgaggagccaatatgctttcattgttggcacatatgctccaaggggcagcaaatgctacatttggctttagccttcagctctcatctcaacacagtaacttgtcgattagatcactctcatcatgagttactccttactcataaacaaaatgttataagaagcctgacactggcaatataatagcaaagaccagaatactttacatttccaggttaaaaatggtgtattaaagatgccagtatagc

SEQ ID NO: 39736 - DNA, 311 bp, Homo sapiens
gcaggagctcacctgcacagcaccacacctctgcttccatccacatccaacctgtgtcctctctggcccctgagcgagcagaggatggaccttgccattcccaggggcagaggctccgtcatccctgggacagaaaattaccaaacgctagagtgtttatttcacccactggttacgatctggccacaaggagctcattcaccctgacctgcctgtcttcctggccttctccagacatttctttgttctcgttccaccaaatgctggagaccagctcctggagcattatccttctccacgtggccatttta

SEQ ID NO: 39737 - DNA, 452 bp, Homo sapiens
gcaatggttgtacaacagtgtggaggtacttaatgccactgaactgtacacttaaaaatggttacaatggtcaattttatgatgtgtatcttttaccacagttgtgttagtttgctagggctgccataataaagtaccacagactggcaggcttaaacaataggaattcatgttctcacagtcctggtggctgcaagtctgagatcaatgttatcagcagggttggtttcttccaaggccttgatccttgccttgcggcataaacagcaattacttttgcaccaacccaattgatggctgtcttccctgtgtctttatgtagtcttcctgctgtaccagtctgtgccctaatttcttcttcttaaagcaaaaccaggctgggtgtggtggctcacgtctgtaatcccagcactttgggaggccaaggctggcagatcacttgagttcaggag

SEQ ID NO: 39738 - DNA, 2741 bp, Homo sapiens
gaggaatctgtccctatgacccaaatatctcccagcaggccccacctccagcactggagatcaacatgaaatttggggggaacaaatatccagcctctatgattggtttggagcaatgagatcaattacaccaacaagccaagcatttctcttagtatcctatggtcattgctaatgcatatggtcattttgacagctgtggtttctccttcatattcatttgggactcttcatagggtctcgagagacatgacaatactgttcaaaacgtctccaaggcaaaattaattttattccgttgactggaaatatatcacaaagaatgaggtttttccagtcccacccacaagacagtcctctgaaagtggaaaagcttgcccggccacctgcccctaccctgaccttggggtagttcatcagttgagcacaacccccatgccgggcatagactcacccatctcttttcctcaggtgtgatgggttggctttcaaactagtgtttctcgcactgttagaagttattgtccaagtggaaaggatgcagaggctggaattttccagtgggatagaagagcaggctaattaggaaggaatattccagggaatgcaaggtgcaactgcgatattgctccatccctggacctgagggagacaaagaaagttcttaaagggctgcagatgctgtcctctgaaggtcttctctggatcgctggcctactttggaaacatgcaggccattgagtgccatggggctgcccatcagtctgatccacacgaaaggctctgtgcatttcaagagcaggctggtagctcgccattcctgggaggatgctgacatctgtcaagcccagaatgcctctctcagggctctcagacctgttaaactgaggccaggagagcagaagaaagaactcaaagtgtggacggtactaccagctggagaaagcccaggagccaggactcttccacccactatctaggttatgttgagtgacattcctccctggcttcaggtttctctaaagccagaggaaaagtaaaccagacaagccctcccatctattttgtctgaaacaagatggagtgaatgctccctactgagagggtctggatttcacccatgaattgcactaggaactgggagctcctttttgaacacaagtcccaagaggcagttgtgataaagtctctcttttggtgtccgctgtctgtaaatgaaacaatgcaaattggtgtatgttaaatgtgtcacagcttgcaggcaagaggttttgtttattctctaaggacttgctgactcgagggagcatcaaagatgagctttctgtctgtcttggcaagtgtgaaaataaagggagtcagtcacctccccaaaggtcatgtgaatcagaattcaggagaaagttggaggaaacaatggcagattccaagaagagatgcttgtttctccatttgagaaagccttactgaaagctactgaataaagagcacaatttccagttatttctttctttgcttttttttttttctggccactataacagcacttccagtatatgttgatagtagcttgtaattattcctaataccccagaaagaagagagtcgtgatctttggtgattgtgaggaattagattaacagtcgcgggggaccggctacctgcgacagccctttaaatggctaatgagggatgctgagtgctgagcggtgcctgcttttgatgtggcccacccatgaccagggagagagggcaggaagagagcagctgcaggatccacaagtctctaacccttctgccccaggcaacataaaaccctagattcttgttctttttccctcttcctaaagtagactgacgtcccagtaattgtttttctaacaagccctgttgttctccctgggaaagacctagattggccaagaaaggatcctgtcagctcctggtggagagttgcacaagccagtggctctcaactctctccaaggaaaattaaagcatattttctctttcttagctcaaaatcagctttcaggggtccttattggggtctgattttcttccccagttctgaatccaggaagaagctttttctccaaggaccaaccaaaaacaatgactttggagaaaaattagactcagaaagtctgtccaggcattgggttggtgaactgtcaactgttggatggggaggaggggtcgctgtgatcgtagcggtcattagacttgggacgtgagttgtctctcaaagcacagtagtaaatgactgtattttgtatattgcccccaatatgttgggtgtaaatagaagcacagctggggattgatcatggccaggacgattggagcttggcagctctcatatccagaataagccactaagacggaactcatcaatcaccatcttcccatttacctcattagcatcccattttctctcattcagtattagttgatgatttctgctattaagtgatgagaaagtcagcagactagtcaaaaaagaatctttatataaaatgtacatattaatataaattaacttagcatgcaacttaccgatcaaatgaagtatatattattaatatgttatcttagtgtataaaggaaaactgccatatttaccagatgttttctttaaccgaacttgtctgtaaatatataatctgtataaaaagagtctaatttaccattatttatgcaatagaaaaaataaaagtttttttttcttttgacaagag

SEQ ID NO: 39739 - DNA, 271 bp, Homo sapiens
gaagtgatactctcctgtttctgatgattcaacatgcaactgtggacaattaatttcctttagctttgctttcatttcttcatgtgtaaaatcaggctaacataagctgttttgtggattttgtgaataattctattataaaacatttgtaggttgtgatgcttattgaattagatattagtaataagcctttaataagtaatttcaagaaacatcccttgctaccgtctacttccccagaccaagaaaaatcttaatttattttagttgt

SEQ ID NO: 39740 - DNA, 408 bp, Homo sapiens
tggtgctccaggtaaggctaatattttagttttcattatcctttcattttttccacaggcagaaggcatatatgtaaacttttggcaaaacactagtttttctttatagcatggaatccagttttattgctggggtgaaaggatggggattatgaggtaaatgccttgagctcagttggcctctctcaaactgcaaattcgaaacccttccaaagcacataataatttccatgcaatttactatgtaaaagtctttggcaaaaggccctattaggaacataagactccagcttgctagaacactattccatgacatctttattctagattcatttgtcctggagttatttgtcaaattcttgttgaaaatctgataactctgattatttacattggatagttgagatt

SEQ ID NO: 39741 - DNA, 439 bp, Homo sapiens
cagtctcctgagaaaatagatttttcttttctgttgcatcatcaggctacaaattttctgaaattgtatgctctgcttcttctcgaatgctttgctgcttagaaatttcttgtgtcagataccttaaatcatctctctcaagttcaaagttccacagatctgtagggaactctagaaaaaaattcttattttccctctttcccgcctatctgatgcccgtttctaatacaggtgcacaatgcctgcagtgtctttgcatagtaagagtgactttactccatttcccaacaaattcctcatctccctctgagaccacctccgcctggaccttgttgtccatatcactattaacattttggtcaaagccattcaacaagtctctaggaagttccaaactttcccacattttcctatcctcttctgagccttccaaactgtt

SEQ ID NO: 39742 - DNA, 561 bp, Homo sapiens
caatctagttaacatgtctgtttacttcctctttgactaggaaataacttctcatggataaactaacttcctgaggaagtccccaacttccctaggttgttagactaattaacaaatcagcagagagaagcactttagttgtaaacggtgtctttgcattctgtatatgtaaaaaagaaaaatgtagaaagtccacactgtggagggaataatatacaagtagtttaaaaattgtgtgtaaatcatttagagatggttgaagaattgtaacgggtgaagtctatgggaattaggtggcaacagagttaattattttatatatataacaaagaaactttctgttgtttatagcggctagtggttttcaagatggggtggggcatctggtacactgagggacatttattcttctaaatagtgagacatgtttggttatgtgaatattcagatgtgggctatagaaaaccagatttctctgcccagaagagagattctgagctgcaaaagaagaaggtgtaggaggatatccaggagggtgaagaaggagatggacccaaagaa

SEQ ID NO: 39743 - DNA, 400 bp, Homo sapiens
ggaccttatggaggtttgtactttcagttatgcatatttgactgcccagatgaggagattgtattcacatacatagctgctcttggcagagtcatggttaaaggtttgaacatactgtaccttgttggctattcccatagtcctaagggaggcattttgcttctccatagacagtaatcggcttgtcagagtggagtggctttttgtttttcctttatctagtagaatggagtgggctaagcctttctgggaagcaatttcttcctccaccgcatgaacagaaggtcatgggatactgtctctgaaacaaaggggaggtagtgatagaaaaatcagtgtctggggcataattggattgaagctctgtcaaggagacaccagttcctgcttggaagctgga

SEQ ID NO: 39744 - DNA, 453 bp, Homo sapiens
gcatatgcatgggcaattagagctacatcacctctgctgcctgtcttttaacattgattctaagctgcatactaatttcaaaaatctcaaaaccctaaaagaaatttaaaagcccctatatcttaggcttaaagaaataaactctttgtcctggctgagatgtcgttgtgaaaaagctttgtcctggttcctcagcattcgccctacacctgtctggcccaagcctcctcccctccagcctgggattactgtgatgactagtcccccaactctcagttacttgtacaaagtggacatcatgagacctggttctagtcttataaccttgagcagcttgcttaatctctctgagccagcagacgttttgttcagcacgaaaggaggatagaaatagatgtttccttttgacacataaaggcaaaatttctaggagttctcaggcatcctcaagat

SEQ ID NO: 39745 - DNA, 424 bp, Homo sapiens
gaaatacagccgaacacatacacacaaatcagattatgaggaattacaaaggtgggaggtgggattttaattattttgtgatagcgaatccagtaggaggtgggggtgcctccccatcccctttccctgctcctgttgtatgtctaggctcaggctttgtcatgtgattataaacatgttctttgatttcctctgcgtaaactggaatgttctggccaggccttcttctggaccacataaaagctttaggagatgtataaatagagttaaagtcacaggatcgtttccccacagtttgttctctaaattgagaaggctaaagtgagaggtgaaaggacacaggggatggggactcgcctctgtcctccctctccctgggcaaattcattgtcattgcctctgtcaccaggactttgaaccctgg

SEQ ID NO: 39746 - DNA, 975 bp, Homo sapiens
  misc_feature (10)..(10): n is a, c, g, or t
  misc_feature (203)..(203): n is a, c, g, or t
cttcggcacnagggtgatttgacctatagaattttccaaattcaaaatgtagaaaattaacctggcatgctggctgacgcttataatcctagcactttgggaggttgaagtgatcctacaacttcagcccctcaagtaactgggacagcaggtgtgtgccaccacatccagctaatttttttttgttgttgtattttttatanagacagggtttcgccatgttgccaaggctggtctcaactcctgagctcaaataatccgcctaccttgggcctgccaaagtgctgggatttcaggcatgagccactgctcctggatgcatgcaacttcttttttttttttgtttttttggagacagagtttcgcttttattgcccaggctggagtgcaatggctcgatctcggttcactgcaaccttcacctccttggttcaagtgattctcctgcctcagcctctcaagtagctgggattacaggcatgtgccaccacgcccagctaattttgtattttcagtagagactgggtttctccatgttggtcaggctggtctagaactcctgacctcaggggatctgcctgccttggcctcccaaagtgctgggattacaggtgtgagccactgcgcctggcctgcatgcaactcttaaaaacaaacaaaccagaggggaggggggtggggggagggatagcattaggagatatacctaatgctacgtgacaagttaatgggtgcagcacaccaacatggcgcaggtacacatatgtaacaaacctgcatgttgtgcacatgtaccctaaaacttaaagtaaaataacaataaaatgaaaaaaaaaagaaaaaaaagaaatatttatgaatgtaaatgtttattgtccatttttaactaataagcaagcttactaaaaactgcacttcacacttagcttaatgtttgagggaattaacttcataaataaaaactagaaaattaaa

SEQ ID NO: 39747 - DNA, 389 bp, Homo sapiens
tcatttcccgagaagccattcaacaccttatcttcatctaacctcgacccacagccccatgaggaagatcccattcccacccccattccgaagagggaactgggcttcagagagctatggagcttggatgagggggactgggatcagactgagcttggtccctcacaaaatcccttctccaaccactctttcatccacgagacaacgacctgtgcccagcggtgctactgagtgcccgttatttcccactggccacttctggaaattgagattaaagtgacttgatttctcagtcacactgttttgccatatttggtcatttttaccacaaggctgcactgtatttaaatcagaaaaataaaataaagaagcttcaaagataaagaaaa

SEQ ID NO: 39748 - DNA, 301 bp, Homo sapiens
tcatttcccgagaagccattcaacaccttatcttcatctaacctcgacccacagccccatgaggaagatcccattcccacccccattccgaagagggaactgggcttcagagagctatggagcttggatgagggggactgggatcagactgagcttggtccctcacaaaatcccttctccaaccactctttcatccacgagacaacgacctgtgcccagcggtgctactgagtgcccgttatttcccactggccacttctggaaattgagattaaagtgacttgatttctcagtcacactg

SEQ ID NO: 39749 - DNA, 1101 bp, Homo sapiens
ctgggtctctgcgccgcagccgcccgcccgcccgctcagcgcccggccccgggatgacggcggcccaggccgcgggtgaggaggcgccaccaggcgtgcggtccgtcaaggtggtcctggtgggcgacggcggctgcgggaagacgtcgctgctgatggtcttcgccgatggggccttccccgagagctacacccccacggtgtttgagcggtacatggtcaacctgcaagtgaaaggcaaacctgtgcacctccacatctgggacacagcagggcaagatgactatgaccgcctgcggcccctgttctaccctgacgccagcgtcctgctgctttgcttcgatgtcaccagcccgaacagctttgacaacatctttaaccggtggtacccagaagtgaatcatttctgcaagaaggtacccatcatcgtcgtgggctgcaagactgacctgcgcaaggacaaatcactggtgaacaagctccgaagaaacggattggagcctgtgacctaccacaggggccaggagatggcgaggtccgtgggcgcggtggcctacctcgagtgctcggctcggctccatgacaacgtccacgccgtcttccaggaggccgccgaggtggccctcagcagccgcggtcgcaacttctggcggcggattacccagggcttttgcgtggtgacctgagcggctcggggcgtcccagcgacgcgggaaggggcagggcgctgacctgctgctgagctggctgggctggacccggtccctaggctgtgaccgccgaactccactgcaacagacgggcgccaccaaagccaggccctgaggcctgggagtcctggactgagaaagggggttcctgggcccacctgctctgtgtagggctcgtcctgcggtgcccgagaatcactcgctaacccctatgcccggtcccggaccgacatcctggagccgcctgtgcagcctgatgccccctcgtggctgctcccagggctgcacctgccaggacctaatgttcttaggtccctctggccagaacccacacccggccccttcccacctgtcatactggtaactgtaacaagaaaaacgacatcactta

SEQ ID NO: 39750 - DNA, 1378 bp, Homo sapiens
ttagagtttaatcttggaaagactacaaaccactgtaataacctaagcattatttgattccccaaggaccaattttcacccctttgggggccatattaattttttatggctgctataccaaagtactatgaattttatggctgaaaacagcacgaacttattcccttgtagttctagaggccggaaatgcagttcactgggggtaatgtcaaggtgtagggccatacccccaggaaggctctggggaagcgtacatttcctcttccagcttccatctttttctggcttccagacttgcattctgtgtgttcactgactcatgtctgcttcctccatctttcaaagccagcagccgtgtagcatcttgtttcaatgtcacgttgcctttttcttctgtcaagtctccctctgcctgcctctcatgaggacagtgtgattacacttagggtctaccttgctaattccggataatctctgcatctcaaaatccttaatttaatcgtatctgcaaagcttgtgttaccatataaggtaagagtcacaggttcccaggattaggaactggatatctttggggaccaatactcagccacagaggtgataccactccccaccccttaaaaatgcatgttctacaccagtaaggaagaaagaaaataagaaagaagagtaaaagataataaatatgtaactttggctacaaatgaattctttattatatctcattctatttggggcacttgctattagaacaaagagagaagatatatttaaaattaataggattcagaagagtagagttgatgatgttcacctcattgcgatgtactcacccattcatttattttgcattacccttcctgcctggggccagtcagcagaggagggcagtgagtcactccaaggtcagacagtattattaccctcttattgtgatgggcaaatccaccattaagcttcagattgagagaaacaccattgagttggcaaatgctttcgatgtgtacgtgcagaaagtcatatgtatctacaattttccagacagcggcaaagagaaatggaaactctgtgctgtattttaattggctgcaaaatgtttccttcagaaattaccattccattaagcacctactctgtgcaaacgctttgcaaacactgctgggaatagctgcatgtataagggcatgcctacctttattagactgttcaggggaataaaatgaagttacaatttattctaatactagaatgcagttctctccccatggactgcacctttcaggatagtggcctgaatcagagcagaaaacacctgctggatatcctccaagtacacagtctgattagtgccctctgggaaacatggaggcagatacta

SEQ ID NO: 39751 - DNA, 474 bp, Homo sapiens
acctctccctgtggtgtttggaaggacagagtcccaggaccggggcaggaacagacctgggctgcagctaggagctcaatggagttcaatggaccggagcctggcaggtccacgcccaaaggcaaatggaaaatgtctcactggattaatacagcatctggtggtggcaggtgggagatatgtcctttcttttttatagttttctgtatcgatctggaattttgtataagcaagctttccatttacaattagacaaaataatcagattatactccaggggtcaagggggtagagatcccacccacacgtggccaaggtagggcccttcacccaccagcagctgcctttgtgggcgggtctctggtctcaccacaccagagcccctcggaacgctcttttcctgagatgacttccattctccagttctctcagctcagcctccctcttggcagtcacggctgccctccctcatcc

SEQ ID NO: 39752 - DNA, 526 bp, Homo sapiens
acaacataaaaagagttaaaatccatgatcctgaacatcagatatttgtgggttagaatccgaaactgatcacttattacatttgtgttattgtgtaaattactgaatttcttcatacctcagagtcttcatatgtaaaatgtagactataatatttatatcataaatttggagaatactgtagagaatttggcttcacagtttgttttccttcatttctctcccttcatatccaaataagcccagtatagcaatattcctttctatttatattaacttatataaatgtgcatgagaaaactgattggattcaataagatggtagaaaaagctatcaagcttctatattttgccaggcaactttctaatggctttatgtgtctaaacccactttaatactcagaaaaacactatgattacaatccttctattagcattctcatgttgtagatacagaaattgagggacaggcaggctaacttggctcaagacacacaagtaaaaatattcagagcagagattaaac

SEQ ID NO: 39753 - DNA, 389 bp, Homo sapiens
taagagatgggggtctcatcatgttgcccaggctggccttgaacgcctgggctcaagcaatcttctcacctcagcctccagctgggatacaggcgtgtgccactgcacctggctaacttatctatctttatatttaaagtgagtttcttatacacagtcactaggttgagttttcctttttttttttttttttttttttgagatggattcttgctctgtcacgcaggctggagtgcagtggtgcaatctccacttgctgcaacctccacctcccaagttctcctacctcagcctcctgagtagctgggtttataggcacacaccaccacacccagctaatttttgtatttttagtagagacagggtttcaccatgttggtcaggctggt

SEQ ID NO: 39754 - DNA, 742 bp, Homo sapiens
gggtcaaggcagaaggagaagctgttgaaatgagggccgtgaaatcagtttctgttggtttgcggttgtgtttggttttgtttgtttctttataaaaaattcaatcgggcagctcccttttccacaagcctctttgtgactgtagaactattgtagaaaaaaaaagttcttttctatattataaaagaaattatccaacacagtaatattggtacctgtcattttttcacttctgtttaaaaaaaatgtatttttagcaagataacttgggtaatcttctaaaaaagaaatttaaaaactcactgttagtgactttgatgccttttaaaataagagctttttcatttcattccatctttaaaattttttatctttgttgtagaatattaaaaactattttaagaaagataaattctctttaaagagatctctagcgtgtgtgaatagagctccagatgcctctaaaagccgcatgtacaaaggaagccacgtctatcctgtctgtttatatttgcttttcctgttttgtaacctctttgtactttgttcatggtgacttgtaagctaaggggaaggggtgcctagatgcctttgtatctctccatgtcacgcgctcctgggccagccggcctcccttcctctccttgtatgtaatacctttttttcccctttctagcaagtactttcaaaagaactctgtacattttaacataaaaaataaattatgttgagccattttgga

SEQ ID NO: 39755 - DNA, 608 bp, Homo sapiens
gatttctggctaatttgcttttaccgttaattcagaatgcttgtgatccacaggctatagtgagtgagttgtccctggcatcccttttccttacatacgtgttccactagaagcaagaaaaaccacatacagctgctcagtctgcaatacgccaacagcacacgcacacaggagtcctgtttagctcacttccatttcctacgtgcactgctgcacacttgacctacacacttgacatacgaaagtgtctctgatcatttaaacaactctacaagtgtgtattattacccccattttatacaggaggaaactgaggttccgtgtggttaggtaacttgcttgggtttccatagaggcagaggtagaatttgaacccagtactgtttagctcatgccctttctggaacactctcttgcctctctatcttttctttttgctgcactccagcctgggcaacagagcaagactctgtctcaaaaaaaaaaaaaaaaaagaaatataatctgcccaacccaacagtcaaatgttagccaccaatgtccttgtgttaccctgctttctgagggccagaagagattttcaaagattatgagcactaaaataacag

SEQ ID NO: 39756 - DNA, 293 bp, Homo sapiens
attttattctgaatcatcaagttcattattttctattatttcattgagacatttctgagaaattttattttacaaatttgagcggaaagttcctctcacaggggtcttcaggattgcaggaagctcagcatggcacccacgtgaaccaggcacctggatgtgtcctgctcttcagggcccttcgagggtcagagacctggcctagattctgagctttgcctttgctttcacacccaggctcagtaatattttcaatttcaaaaggaaatgagatcatggtctagagtctagga

SEQ ID NO: 39757 - DNA, 440 bp, Homo sapiens
actcatcattgcacttaatcctgcagcagtctgcagcagacttcacattccataggatcttctaaatgattccatctaccaaatcagatttaataaggctggcaaaatgtggtgctgtgtggggtcaatggggtgccactgtggccttttgtggtttctttctctttaagggtggccacagcctgataaggcatttatagcattgatgtccattctaggtccctgctcaagggacacaaagccatgacctggaaagttctggacattttgggaagagttttcaataagcttcattggagatttggcacccactttaatgagctccagaagacctttgagatgatcttagaattggccattatgtcagttgggagcatgtggtctcagtgagttctctttgaaaatttgctatttgactctagctttgattaaggacttta

SEQ ID NO: 39758 - DNA, 629 bp, Homo sapiens
tcctgcagtctaatagtataataagaacaagtctgtgtgttttctggctcaatcaaccttgagtgagtggaattaacttaagtaactacagaaatattgggagctgtttgtacaattttagttgacttctttatatcacaaggcctttgcaattttgtttgcagtttggatactaaaacaaaatgaaagctatttaagctgactctgttaccattcttgacaggctctgaactctaataagcctctatagtgtaggctattttaattgacattaactgtttacattcctatacatcctgcaaataatataaattctaattagggagcacttttgttttatttattgttgtatcttaagagcctagtatcatcctcaataggtgtaaataaaagaacaaatgtggttctcagatatatatggaactggcttgcagtcaaagaaaccaaagtcttcaaaattatatagttgtatatttcaataagatagtaagtaaaaggcacatagaataagatagttgtaatagaaaatttaagagattgttcagaaaaagacaagtcattctataaatagtgcatgcagtataaaaaggcaaggtaccatgaaatatgtgaatgggaaaatactttgg

SEQ ID NO: 39759 - DNA, 859 bp, Homo sapiens
  misc_feature (12)..(12): n is a, c, g, or t
  misc_feature (16)..(16): n is a, c, g, or t
ccactccagagnatcnccttaatccgtaccatcagtgtgcatttaaggtttctccatgtctttttgtaattggagaagctcattttttaaaaattttattcttttagattgttgaacagataaatacgaaactgccatcatcatttgcagaaaaactgtttataccatcatctaaaactactattcttgcgttatcataaagaaaaagaggttgttgctgtagcccatgctgtttatcaagcagtgctcagcttgaagaatattcctgttttggagactgcctataagttaatattgggagaaatgacttgtgccctaaacaacctcctacacagtctacaacttcctgaggcctgttctgaaataaaacatgaggcttttaagaatcatgtgttcaatgtagacaatgcaaaatttgtagttatatttgacctcagtgccctgactacaattggaaatgccaaaaactcactaataggggtgagtctttaattgtaatgactttgttttatccacagttaagccttttctcattacatatttatgtatttcactgtcatgtcaagatgtctgcagaatcactgtgtgtaacaaacagccatatttaagacatgcctggataaataaaattggtaggaatgttttcttggcattatatttaacttttcttcttctttttccttgacaaatcttgataagtttttttatattagttttattttctagaaaatgtcttatgaatttctcctatttgctctagcatgcttatagaaaatgtcagtggtttcttacagctcaaatttggtggtagttggtttaaaatgcggtctctttcttcttcccctggtacttttttctt

SEQ ID NO: 39760 - DNA, 1166 bp, Homo sapiens
  misc_feature (139)..(139): n is a, c, g, or t
agggctgacgttccagctggactgccgccatggaactcagcgccgaatacctgcgcgagaagctgcagcggtacctgtaggcggagcatgtggaggtggaggacacgaccctcaaccgtgctcctgtagcttccgagtnctggtggtgtcggccaagttcgaggggaaaccgctgcttcagagacacaggttctgtacagagtaatgagatgtgtgacggctgcaaaccaggtgtttttttctgaggctgtgttgacagctgctaatgagtgtgttggtgttttgctcggcagcttggatcctagcatgactatacattgtgacatggtcattacatatggattagaccaactggagaattgccagacttgtggtaccgattatatcatctcagtcttgaatttactcacgctgattgttgaacagataaatacgaaactgccatcatcatttgcagaaaaactgtttataccatcatctaaaactactattcttgcgttatcataaagaaaaagaggttgttgctgtagcccatgctgtttatcaagcagtgctcagcttgaagaatattcctgttttggagactgcctataagttaatattgggagaaatgacttgtgccctaaacaacctcctacacagtctacaacttcctgaggcctgttctgaaataaaacatgaggcttttaagaatcatgtgttcaatgtagacaatgcaaaatttgtagttatatttgacctcagtgccctgactacaattggaaatgccaaaaactcactaataggggtgagtctttaattgtaatgactttgttttatccacagttaagccttttctcattacatatttatgtatttcactgtcatgtcaagatgtctgcagaatcactgtgtgtaacaaacagccatatttaagacatgcctggataaataaaattggtaggaatgttttcttggcattatatttaacttttcttcttctttttccttgacaaatcttgataagtttttttatattagttttattttctagaaaatgtcttatgaatttctcctatttgctctagcatgcttatagaaaatgtcagtggtttcttacagctcaaatttggtggtagttggtttaaaatgcggtctctttcttcttcccctggtacttttttctt

SEQ ID NO: 39761 - DNA, 1264 bp, Homo sapiens
  misc_feature (139)..(139): n is a, c, g, or t
agggctgacgttccagctggactgccgccatggaactcagcgccgaatacctgcgcgagaagctgcagcggtacctgtaggcggagcatgtggaggtggaggacacgaccctcaaccgtgctcctgtagcttccgagtnctggtggtgtcggccaagttcgaggggaaaccgctgcttcagagacacaggctggagtgcaatggcacgatctcggctcaccacaacctccgcctcctgggttcaagcgattctcttgtctcagcctcccaagtagctgggattacaggttctgtacagagtaatgagatgtgtgacggctgcaaaccaggtgtttttttctgaggctgtgttgacagctgctaatgagtgtgttggtgttttgctcggcagcttggatcctagcatgactatacattgtgacatggtcattacatatggattagaccaactggagaattgccagacttgtggtaccgattatatcatctcagtcttgaatttactcacgctgattgttgaacagataaatacgaaactgccatcatcatttgcagaaaaactgtttataccatcatctaaaactactattcttgcgttatcataaagaaaaagaggttgttgctgtagcccatgctgtttatcaagcagtgctcagcttgaagaatattcctgttttggagactgcctataagttaatattgggagaaatgacttgtgccctaaacaacctcctacacagtctacaacttcctgaggcctgttctgaaataaaacatgaggcttttaagaatcatgtgttcaatgtagacaatgcaaaatttgtagttatatttgacctcagtgccctgactacaattggaaatgccaaaaactcactaataggggtgagtctttaattgtaatgactttgttttatccacagttaagccttttctcattacatatttatgtatttcactgtcatgtcaagatgtctgcagaatcactgtgtgtaacaaacagccatatttaagacatgcctggataaataaaattggtaggaatgttttcttggcattatatttaacttttcttcttctttttccttgacaaatcttgataagtttttttatattagttttattttctagaaaatgtcttatgaatttctcctatttgctctagcatgcttatagaaaatgtcagtggtttcttacagctcaaatttggtggtagttggtttaaaatgcggtctctttcttcttcccctggtacttttttctt

SEQ ID NO: 39762 - DNA, 366 bp, Homo sapiens
atataatcaattttcacaatatccaatgcatccaaaattaatttttctttatatttttatgggttaccttgagttcccatgtacttgttataatgtattgaagtttataattaatctttcgaatgtaaacttaggataattagaatgttgaagatatgatgactatattatagaaatactcattgggctatgcagttaatatgcttcagacgtggtatgtaaatgttgatggaaacaatatttcatgtcggttcagattcagtgttttattttttgaaacattgcagtggaatttttatgtttaattctgttagctggtaacagaacttctggggcaattttgtttcagtttgttgtaactcagaa

SEQ ID NO: 39763 - DNA, 475 bp, Homo sapiens
ggtgggggaggttttgaactgggcaccttagtgctttgtcttctggacctgctgttattctggagttttctccaaactagttcaccaaaaagtaacataagacatttgcatcatcttgctgctgtagctaaaagatgttctctcttacttttgaaagaaattctttctctttgttcagctcccctttcttccccctcctagttttgaactgagattatcacaaggatcagtgagatagaagaaataaataataaagacactaacactgaatgcttattatgtgccaggcactgttctaatcttcatagcaatcccatgaaataggctctcttgttggctacattttatagagcaggaaactgaagcctggagaagttagattagttgcccaaggtcacatagtaagtggtggggctgggattcacaaccaggcaattcagttcctgagcccagtcttcgccactgtgttttcctc

SEQ ID NO: 39764 - DNA, 278 bp, Homo sapiens
ccctgcttcctctcctgcctggggaaggatgtgcacacaccaggaagccaccaagaggggctcagatcccagcaggtttgcccttggcctgggccccagacccccctgtggtcctaggtctgaggacctgcctggggacagggctgggccgctggtcccagggccttgcagccccaaggggagggctgtgttgggcatccttgaaactggtgccccacccagcaccctgacgtactcccctgggggtcagctctccacagcagctgaggttggagggc

SEQ ID NO: 39765 - DNA, 279 bp, Homo sapiens
gaccaaagtcctctccttagtgcgcctacttcctgtgggcatcatgccacttggaacttattggaactggcccgggagactctgcagtctgcgccgtttgaaaaccctgagaaagagatgccacctcaacttgaatcatgacagcccatcgctcagtctcaccctaaactcatggagcttgtttcagctcctcacttcttgactgtatttgtactatgttgaaaaaatatcctgtccacaaagacataagcctaacaacctagaaaaacaacagggtac

SEQ ID NO: 39766 - DNA, 366 bp, Homo sapiens
tctcagcctgtgttttagaaaagtacctcttcattcctttgaattgaataaaacataaaagttattaggaaaaactgagactttctctaactttttcatgttgttgacattacacctgtcaacatagattacttcctgttagatttcctgttatacttccatgcatatataaaaatatatataaagtatagccattaaaataatgtttgtgagaaatttataacatagttgtgctcgttatctactgctatataacaaatgaccccaaagtgtagtagcctaaaacaatgcacatttattactgaacccaatttctgtgggctagaaacctgagagcaacttagctgggtggttcaggctcagggt

SEQ ID NO: 39767 - DNA, 439 bp, Homo sapiens
taaacacgcacacattctccaagcagtgcctgacagccttctttgcatcaaggagcacttacaaatgatccagagaccgaggagaatactgtctaggcacacctgctggagactcctccccgaaactctccaacatccctcttgccagatacaatcaacatgtgaagataatgaagaccaagaaaaaagcctcctagggcataggatacagctgatcctcctccctacattcagcgattggcctgctctgctctcgctcctccgacagcttcacctgctcctcttcatgttcctgtgcctgggtccagggctcatcctgttgtggtcgtggtgggcggcttcagccctttaggagcttcccttgggctctctcctcagggacagcttaaggagcaccagtgtgggagttcaccctttcagttcaaatgcagatcagtcc

SEQ ID NO: 39768 - DNA, 360 bp, Homo sapiens
gataagacaaataattggtgttatcatgccttctatccaagttttgtaagcaagaatttcatagcatgttttaacacaaatggcaaaaaaaataagcccacagcagcttgaagcattatatgtgaaatttactaaactagaaataagaagaagaagtgaaaacagtaccccaagaaagtcccagaagactgataacaccaaatgcaggggcccttgctctacctcaactccagcccaaatccaccatgaagactccctcagttgtcctgaaacacatgccctgaagcataatgtggtattataaaataaatttcctgaaaaatgacaagataagcttctaatgaactgtggctaaaatct

SEQ ID NO: 39769 - DNA, 575 bp, Homo sapiens
agaaaaactctaaatgtgacacaagggacacctgaaaaaactaaaaaagaatttgtctaaacttagttgcacctcttgttttatgctcagaaacatgggaatgctatctttataaatctgtaaaagtaattgattttaggggccgtcaaatggctggggagatcatgccaaggacagcgtgcactggtattagacaccactccaaatatgaaaataacacagatttgtgagaaaattagggaggaaaaatatttaacccaggtgattagaaaaagtgttgccagccaggcgtggtggctcacgcctgtaatctcagcactttgggagactgaggtgggcagatcatgacatcaggagttcaagaccagtctcggccaacatagtgaaagcccatctctactaaaaatacaaaaactagctgggtgtggtggcacgcatctgtaatcccagctactcaggaggctgaggtgggagaatcacttgaatccaagaggcagaggttgcaatgagccaaaattgtgctactgcactctggcctgggtgacagaccgagacacagtctcaaaaaaaaaaaa

SEQ ID NO: 39770 - DNA, 304 bp, Homo sapiens
gctggtctcaaaactcctgacctcaagtgatccacctgcctcagtctcccaaagtgctgggattacaggtgtgagctactgcagccagcctagaaagcttacagatcagaaaagctcaggtcagtcctgataaatattttaaaataaatacctcttaaatagataggacatctcattcctaactctatgttatcacagaaaatattgtgcccctcaggcaagaaaaagtttagtctgtggaaatcaaatttcaaagagacttatacagaatcatacatgtgctttttcctggttgttagaataa

SEQ ID NO: 39771 - DNA, 305 bp, Homo sapiens
tttctagatgagaaaacagacccaaaaaggccatgtgggtaccacatatgaaactcatttttggggaactaaaggctaataatatcaacaagatctagaagacatgataaattcctgctacaaatagctaaaagctattaagtagaagctggatattccaggcacattgctaatctttaaggatgatgtaagggagatttacttccgatttctttttgtgtgtgaaatacctcctttgagttatcatagtaaaataagactgtagggacaacattacagtacctggtatagactccctattgcct

SEQ ID NO: 39772 - DNA, 720 bp, Homo sapiens
ctcactcactgtcttaacccagcggtatatgctcccaactcccttgcagattgttctgttctatgcccctgcttggaactggcctctcttctgccttctattaggccatttctgactcagtccatagggattatggcacctataaattgcacacaagcatatgcaaaacatgcaaaaactcatatattgtgtctttgtaattgctgaaaagctgctaaagagcggagatcaactgcagtttcctttagtgtcgtgcatgttgttgagttttcccaggactccagatttgtgggcagtgattcattaagggaaatggctagcatttattgaatgcccgctatgcacaccaggtacaatagctaccattatatccatttcataggtccttggagaagtaatttgctccaggcccacagagtaagtgacagaaatcagactctgaagtcagtctctgatctgaaatccagattctttaaaccatttcagcactgtcccttagttttgcaaaatgtggcaatgcctagtgttaaactttaaggagcaaaaaccctcctggatgcattaattaatagactaatgatcaagagacgtaagttaatatacttgtttagagaaaaaccaaaacagtaaaatatggatgctttaatgttctaaatgtaactatcacccaacccaacaaaatttcacatgcttaataaaactctaaagagtcttgtgata

SEQ ID NO: 39773 - DNA, 773 bp, Homo sapiens
ctcactcactgtcttaacccagcggtatatgctcccaactcccttgcagattgttctgttctatgcccctgcttggaactggcctctcttctgccttctattaggccatttctgactcagtccatagggattatggcacctataaattgcactagcacttgctatctacataccttacttggcacctatttactacataattttcacaagcatatgcaaaacatgcaaaaactcatatattgtgtctttgtaattgctgaaaagctgctaaagagcggagatcaactgcagtttcctttagtgtcgtgcatgttgttgagttttcccaggactccagatttgtgggcagtgattcattaagggaaatggctagcatttattgaatgcccgctatgcacaccaggtacaatagctaccattatatccatttcataggtccttggagaagtaatttgctccaggcccacagagtaagtgacagaaatcagactctgaagtcagtctctgatctgaaatccagattctttaaaccatttcagcactgtcccttagttttgcaaaatgtggcaatgcctagtgttaaactttaaggagcaaaaaccctcctggatgcattaattaatagactaatgatcaagagacgtaagttaatatacttgtttagagaaaaaccaaaacagtaaaatatggatgctttaatgttctaaatgtaactatcacccaacccaacaaaatttcacatgcttaataaaactctaaagagtcttgtgata

SEQ ID NO: 39774 - DNA, 413 bp, Homo sapiens
aggaaggtggtctgattgagcaactttactctccacatggatgtctaacggctatttaatcttcctagagatgcttccagttttccaaattagtttagattacatgaatctctaattagtggaatttactgtaacaagataaaatggaaaaaaaggtgatgagagatattttggggcaagtactctcactgattctgactttttttcagattctccccctagggattaataatctaggattattctgggatttttataactttttggggtcttttaaagatccctccctgcttctttttttcccacaactaccgccataagcctgggttgagaaggggggctatctgaggtgagcacagccataggcgccagggcttacagagtggggcccttcattgactttcccgatttgc

SEQ ID NO: 39775 - DNA, 360 bp, Homo sapiens
aaaatgccaatattacatgcaatgtatgaaaaaccatgttgaaccattgtgcaggcgccaagaaatcccttgttaacacatgatgacaggcacatcatggcatctggacccctacaagacagatcgacttgctccctgtggggagcagcctacccttttcctttcacggtgctgacctcccttctgcacaaacggaaacaaacttttttttttttttctctttaatactgtgtctggtaatctcacttgatttctatcttaggagactacaacaagccaggatgatggtaacatctctgtcaagatgacatagatttatttttcctggctcctctctgctaaaaaccctggaataacata

SEQ ID NO: 39776 - DNA, 296 bp, Homo sapiens
cagggagcagtgctgtacttagttttaccttacttttgccagattctactaaaaattttacgtgagtttagccctgtttattcaactaaataagatacttgggaatttatatctaaaggaagaatctcagtcattgtaaataaatgacctaaagtcattattgtggaaatcaatcagagaaatccctttctggagttttacatcctttttggaactcttttggtatgacagctatatgactttaacacttcggaagtaattggatttggtgtttatatatcaacttcatagttaaa

SEQ ID NO: 39777 - DNA, 238 bp, Homo sapiens
ttaaacgagtctcagagatgcctttcccagtagaatcaggatgaatgagaaggtcttggtcacgatcaagaagactgtttactcatcctttgcacttctaagacatggtgagatagtacaggtgaaaaagacgtggcctggagttaataatgatggtagaagttaagttgaaggggggcagcactgtgcccattggcgactttccttctacgcaccagtgtagatatccatacacaaa

SEQ ID NO: 39778 - DNA, 370 bp, Homo sapiens
ctcgctgccatcaccaggaattttagttgaccattctttctgtttccttttggcccattgccctggaatcgcccaggggtactgctgccctggcccgtgccctcccaattcacaactaggactataactgaccagatttgatgccacaagctttcctcacccaacctgtgccactgcaggggaacaggacacctaaaacatcctcagcgggccagtttcaggacctttgtccagaaccaggtgacacttaatcccaaggacagatcctggaaagaatatcctggggtggacagggttgtgagtaaagcccactccgtcagaccaggatcactcccaccccaaaaccagagcagccaacctcggggagagc

SEQ ID NO: 39779 - DNA, 331 bp, Homo sapiens
tattcaccatagtgagaacagcgcaggaaagacccaaccccataattcaatcacctcccactgggttcctttcacaacacttgggaattcaagatgagatttgggtggggacacggccaaaccatatcatatggcaacattactacgtacctcactaatatgtacaattagtatgtgtcaatttaaaaatattttaacataaataaataagtacattaattaataaagacttccatggagttctcaggcctttgtcttctcacttgagctacatgccctccctctggctctccaacccctgcaatgaatgaccatcacagaatctcagttg

SEQ ID NO: 39780 - DNA, 290 bp, Homo sapiens
gcgtcgacacccgatgaggcaaccagccagaacgcctgaacgcaggcacatacttcctattctacaccctagaaagctcttccactctcaccacttcaacttctacctcaaggccaatgacccctgaatgaatacatctactgcaggccagctccctcgagcctcagatccctatggatgggatatctctacctggtgtcccatatgctcctcacgcctagagtgcccaaagctaaatatgaccccaaccccccgcctgcttttcttcctgtgttccttccaagtcgacg

SEQ ID NO: 39781 - DNA, 898 bp, Homo sapiens
cacgacgtggtgaacttttaaaaacggattcagtagtaccaaaatactcataatgtgcagacagacaaaagaactggaaggagtcgtgttttcagacacaggaagcttttcacgtgctccacctggacctcatctctcagcctcacactccgatcttcagcagcccccgctatgcgcccgagtcttgggacgtcatcccggagctcctagcctgcccgggaggcagagccatcagttgtctatcttttagattctcctcttggccccttatcccaactaaacacatcaccactgaggacctgtccaggggtttagctcctgatgaagagacagagaaaaggtcagagaaaggaagggtgacgctccatccaagatgactacagcgctatgatttccagatggggaaggtcacggatgctggacgcaacagaatctcaacagggacccgagagagagaggctcctctctccctacactaatatcccacgatccctgtgtcactttccagaacacactgtcagttccatggacctaggattataaaatcctgtaagatttatacagaaaatataaaaatctggggagggggaactgtgaaacaatgtgaaaaaaactatttgtcaaatggacagtggggaataacttctcctcccgcacctcctccaagcttctaacaacactcatggcacacaatacagaggagactgccataaaaatgacttaaaatgtgcccttttgaggtaaagtaactatgggacaagtgactataaaaatgacacagctggggagatccaaatctattcctgctcagcaagtttccagattaaaatgtgtctgcttacctaaatcgaaacatcttaaataataacatttttttaattggccttgttggccctca

SEQ ID NO: 39782 - DNA, 460 bp, Homo sapiens
agacaatttccaggtcataccgctgtgctgtcattgtgcttccagctgttgtccctgattctgtgcttgtggaggactgagagatgccagacacaggccagcttgaggactctagcatagaacctggctttgtttagtcctgtactattcttgcaccatcacagcccacccagggatggaaaaagacacacactagcaaccaaaatccaaatagaaggcaggatttacctgcaattcccaaactccccatccagttttaatgcttctatattgcatatatgcctgtattatgcaatccttattctgtttttaagttatattttctgatatcataagaaggaaaaatcataattttaagtagctgcctattataagtttccctcatcatgatataaaggctttgtcttggccttatttttgtagctaggaaaagatggaggatattcccattttatagatg

SEQ ID NO: 39783 - DNA, 1305 bp, Homo sapiens
cattatggggccctgcctacataagattgtattgttctcttaatcaccaaagcaaaatcttgtagctccattgtaagagaaaaggacagttcttagagctttgggcttagtaggtgatatgatttgaatatatggccccaccaaatctcatgttgaattgtaatccccagtgttggaggtggggcctggtgggaggtgtttggggcggtggggggggcagatccctcatgggtttgtgctacctttgcaatagagagtgagtttttctgagatctggtcatttaaaagtgtgtggtgcctccaccgctccatcttgctcctgctctggccatgtgacttgtttgctcccccttcaccttcctgaagcctccccagaagccaagcagataccagcaccatgcttcctataaagcctgcagaactgtgagccaattaaacctcttttctttatacattacctggtctcaagtatgtatagcaatgcaagaatggcctaatatcataggctatagaattttgcatatgtaatttcatctactatgtatattctgactcaaaaaccaagaatagaaaagcagttcaagtaaaaccacagctgcatttttgcctgcctctaggtatgtgagcttcaaagttggaagaaattaagcaacatgctttggaatctatggtgatctatagaaaggcaaagtttctggactcaccctgactgatggaaagacagactgcctgccaggacactaccctgctgtacccagtcttaagtataataaagatctcattttttactgtcaatgcaagccacattttcctattaggaaaatgtgaatgaaacaaagtgctcttcaagagcaaaccctgaattatactttgggttattctctgttcctcaaaaggattttgcatctaactgatagtctccaaattgtaatgacagtatatagatagcttggtgtagacatacaggtcaatacaaatggagaaaaggcaatttgccattgaagaatatgtttgctttaagtaaagatcaatatactaagaaagctatacatatctagacttccaaaaacagatgggaataaactactcagcaatcagaatattcgaagatggcactctgttcacttccagagaaaatagttcaaaactgtatctcaaagtggatataagctattgtactagaattagtccctgtgtgagcatttggcattataaaataagatgttcccaattaaaagatcactggtatgtagataataaaacgtgaaaataaaaatttaaaaataaaacaaaaattatgtgata

SEQ ID NO: 39784 - DNA, 1251 bp, Homo sapiens
cattatggggccctgcctacataagattgtattgttctcttaatcaccaaagcaaaatcttgtagctccattgtaagagaaaaggacagttcttagagctttgggcttagtaggtgatatgatttgaatatatggccccaccaaatctcatgttgaattgtaatccccagtgttggaggtggggcctggtgggaggtgtttggggcggtggggggggcagatccctcatgggtttgtgctacctttgcaatagagagtgagtttttctgagatctggtcatttaaaagtgtgtggtgcctccaccgctccatcttgctcctgctctggccatgtgacttgtttgctcccccttcaccttcctgaagcctccccagaagccaagcagataccagcaccatgcttcctataaagcctgcagaactgtgagccaattaaacctcttttctttatacattacctggtctcaagtatgtatagcaatgcaagaatggcctaatatcataggctatagaattttgcatatgtaatttcatctactatgtatattctgactcaaaaaccaagaatagaaaagcagttcaagtaaaaccacagctgcatttttgcctgcctctaggtatgtgagcttcaaagttggaagaaattaagcaacatgctttggaatctatggtgatctatagaaaggcaaagtttctggactcaccctgactgatggaaagacagactgcctgccaggacactaccctgctgtacccagtcttaagtataataaagatctcattttttactgtcaatgcaagccacattttcctattaggaaaatgtgaatgaaacaaagtgctcttcaagagcaaaccctgaattatactttgggttattctctgttcctctagcttggtgtagacatacaggtcaatacaaatggagaaaaggcaatttgccattgaagaatatgtttgctttaagtaaagatcaatatactaagaaagctatacatatctagacttccaaaaacagatgggaataaactactcagcaatcagaatattcgaagatggcactctgttcacttccagagaaaatagttcaaaactgtatctcaaagtggatataagctattgtactagaattagtccctgtgtgagcatttggcattataaaataagatgttcccaattaaaagatcactggtatgtagataataaaacgtgaaaataaaaatttaaaaataaaacaaaaattatgtgata

SEQ ID NO: 39785 - DNA, 437 bp, Homo sapiens
atgtgcttgggaaaaactctgacatcttaagaaatgatgttactcatggctgacgcatggctggcatatgaatccatatgaatatgatatatgaatccatgtcacaggccctccctctttccataatagaacacttccaaaatggcttcccatctcttgttaagccatcgttagctccctgataatattaacccatgaataatggcctctagaatacattttttattatgatgaaaggtaaaatttcctttgctaaaaactataaaattttcctttgctaaaattataaaaaaaaacttgtaagcaaagatatctagatgctcctgatatcacaaaaatataaatagttactctaaaacttccccctcactgcacaggagggattaacaaatcacaggacattttccctattccctgaacaaagattatagacccag

SEQ ID NO: 39786 - DNA, 441 bp, Homo sapiens
ccttcttccactccccgcggcgcgagcggctgactgcccgtagaggaaacgacattcggagctgcgctcccgcccaggccggccctgacgcgggcctcgtcagccagtaacagggagcagaggtgggagttagcgaggcgaccacgaaaacggtgaaggtcggaaccgacagcctcctccgagaagggcaggagctgggaggaggcggcagcggcggcggcagaaacagcagcggcggcggcggcggcagctgggaggaggtggtgacggtggcaacggcagcgtcggggacgatggcgcgactcgtggcagtgtgcagggacggggaggaggagttccccttcgagaggaggcagattcccctctacatagacgacaccctgacggtgagcgggccgggccgggctgggcccgccgctcccctggcagctgtttcccctc

SEQ ID NO: 39787 - DNA, 1213 bp, Homo sapiens
gctgcttctatagttatttaagaagcttgctaaaagttaaatgaattgcactttggtcctggagccagtttcattatgttacctgaggtcactcttatttgtaagagaagaataagattattttctacttactatcttgtatagatatatggtatatatggagtactattacaaccttgggagaaggatggtctataaatccttttagttatgaattttcattatatggtattacccaattacctataaagtatgttatgacacctggcatggtgcaaagcaggacttccagtgcgatgtgaggtggcaggctaaggaggaaacgatgtgtcgatgttgccttctgttcctttgatgggaattaaaagggaatcatgagaactctcattctgcagtgcctcttcctgtccagggtcctgctatgaggtgtcatcctcttgggcagaggaaaaaagcgccttttggataagggagaatttaattgtctaaatcaatagttactaactggccatctatggtttaggtgtagcctgccaacgtgttttattgggaccccacagttaaaaatatatagtactggtatttaaaaataaccatattttggcttcttttgaaaaattggaagatctggctaccccaggcccatcatcctagtggcaacatgtggcttggcgctgacggcccacctaaaggagcatgccctctccagagggtcgcagtcacttctctccagtgctttacacctggcccactgcacatggtcacctgaagttgggaaagtttcttgtcacggtcactctacagcttccttatagaactgtccatcttcagcttgaaaagttctcaaattattattggaattctacaacttgttttctgttgactgagaatttttcatttttagaggtgtttagaaatcaaaaagtgagactggtcattaagtattagatttttatatactggactcatgaacacaaacagcggtgcacaggaatatgttacccttggcatttatggattcattattctcgcagtttaatttagctcgatattatgtgttctgtgttatggggttttgtttgttttgttttgctggctgccagagctcatctctaataacttttctctggtttttaatatttactgagggagtagtctcatgtcacctttgcttcctcttgaaacttagagctgagcagctagtttgtatggt

SEQ ID NO: 39788 - DNA, 91 bp, Homo sapiens
aggatgcagcattcgagaccatctcagaagcacagagaccaggccccaacctgccagtgccaggatctgggacttcccagcctctaaaact

SEQ ID NO: 39789 - DNA, 447 bp, Homo sapiens
gctggtttaatcttccatatggaccactaaaactttcttcatattagcaacaagattgtttcatgttcactgacatagtgcttttaattttattcaagaatttttcatttacattcacaattggctgagtggtacaagaggtctagccttaggcctttctcactttttgatatgccttccccactaagattaatcatttgtagcttttcagttaaagtgagaggcacatgacttttcctttccctgaattgtttgaggccattgtaggattagggttaactaattggcctaatttcaatatggttgtgtgttggggaaacgggaggtctgaaaagagggagaaagagagatagggaatggctaattggtggagcagtcagaacacacattatatgttagccatcttatgtgggcgtggttcatggtgttccaaaacaattacaatag

SEQ ID NO: 39790 - DNA, 3345 bp, Homo sapiens
aggccctttccctctataaacctgccgttttctgtctcccaagtcatcccagtttagaactgctccaggaaataatgaatgaacagagagagcctagtttgtttatttatttacaatccactagtctaatctagtttagatccagcggcaatttttggggtgccaaggaggaaagaaggagatggcagtgcggggacagggcagagcctgggccaaaggaagccacacccagttcttgccctgccctgcccgacacaggcaacgtgaccccaagcgacagccagctgatgcttgcttctccgagcccggcggtcagcagccggaagtagcccgcccgggggcggggaaaggtgccttaaggaggagctaggggcgtgcggccaattgcaagcgactgtcctagcgaagagggcggaagaggagagatccagttccggacgcggccgccgccgtcgccgccatctgtcacctccactccggcatcagcagccagtcgcccgtgtcccgcctgtctcctcggcggagcctgctgcccgtcctgccacctctctgctctgttcttgtctctgccttcattcccgaatggatctggtaggagtggcatcgcctgagcccgggacggcagcggcctggggacccagcaagtgtccatgggctattcctcaaaatacaatatcttgttctttggctgatgtaatgagtgaacagctggccaaagaattgcagttagaagaagaagctgccgtttttcctgaagttgctgttgctgaaggaccatttattactggagaaaacattgatacttccagtgaccttatgctggctcagatgctacagatggaatatgacagagaatatgatgcacagcttaggcgtgaagaaaaaaaattcaatggagatagcaaagtttccatttcctttgaaaattatcgaaaagtgcatccttatgaagacagcgatagctctgaagatgaggttgactggcaggatactcgtgatgatccctacagaccagcaaaaccggttcccactcctaaaaagggctttattggaaaaggaaaagatatcaccaccaaacatgatgaagtagtatgtgggagaaagaacacagcaagaatggaaaattttgcacctgagtttcaggtaggagatggaattggaatggatttaaaactatcaaaccatgttttcaatgctttaaaacaacatgcctactcagaagaacgtcgaagtgcccgcctacatgagaaaaaggagcattctacagcagaaaaagcagttgatcctaagacacgtttacttatgtataaaatggtcaactctggaatgttggagacaatcactggctgtattagtacaggaaaggagtctgttgtctttcatgcatatggagggagcatggaggatgaaaaggaagatagtaaagttatacctacagaatgtgccatcaaggtatttaaaacaacccttaatgaatttaagaatcgtgacaaatatattaaagatgatttcaggtttaaagatcgcttcagtaaactaaatccacgtaagatcatccgcatgtgggcagaaaaagaaatgcacaatctcgcaagaatgcagagagctggaattccttgtccaacagttgtactactgaagaaacacattttagttatgtcttttattggccatgatcaagttccagcccctaaattaaaagaagtaaagctcaatagtgaagaaatgaaagaagcctactatcaaactcttcatttgatgcggcagttatatcatgaatgtacgcttgtccatgctgacctcagtgagtataacatgctgtggcatgctggaaaggtctggttgatcgatgtcagtcagtcagtagaacctacccaccctcacggcctggagttcttgttccgggactgcaggaatgtctcgcagtttttccagaaaggaggagtcaaggaagcccttagtgaacgagaactcttcaatgctgtttcaggcttaaacatcacagcagataatgaagctgattttttagctgagatagaagctttggagaaaatgaatgaagatcacgttcagaagaatggaaggaaagctgcttcatttttgaaagatgatggagacccaccactactatatgatgaatagcactaatacccactgcttcagtgttaacacagcagtgattgtcagctgccaatagcaaatgaagttatgggtgacttgaaataccaaaacctgaggagtgggcaatggtgcttctgtgcttttcccccttgtaacccatgtgccagatgtgtggaatttttagctcagcattgagagaataaaatgtcactacctctcatcttatgaacaggataatataattctttaacagctataggttatctggctgaagtagacctaattttatgtgacttgtggtgtaaaatgtcttgatgataatttttaaaacttgggtaacacttccaaatatgggaggaaaggacagatgtgtttacaagggaggattttacaacatacttgctttattcacctccctgttttgtgttgcgtctttccttgaatattttattggcccagagttagcctttctcaattatgtttccagactgtggccgtgattctaaaggaaaatgtgtgctctttagtgggtagaacaaatggaaatttggtttcagaatggctgacagaaatcgacataagtcatgtaatttttgttgatatatcatgaaaatgaacagaattctttttccatacttatatctaagaaaaggcatcataggtttctgaaagagataactatataacagctttttaactatccagtcaactttcagcttttctacatttaggtaaaatggttaggatataactcatggtgtggctaatctacatttatcaataaaatgtaaattatctgaaaggacagaatataagatttaaccatgtttgacatattttaatttagttaatgaagcaaaattcagtttatatttcactagaactgtgtacttgattgattttcagagaaatatcacaaattagaaatattaaatctaaggatgaaaggtatatataaaacaatttgggggccaggcacgatggctcaaacctgtaatcccagcactttgggagaccaaggcgggtggatcacttgaggtcaggagttcaagaccagcctgggcaacatggcgaaaccctgtctctactaaaaatacaaaaattagccgggtgtggtggcacttctctgtaatctcagcttctcaggaggctgagacaggagaatcgcttgaacccgggaggcagaggttgcagtgagctgagatcatgcgcggccgcgaattc

SEQ ID NO: 39791 - DNA, 1636 bp, Homo sapiens
  misc_feature (215)..(215): n is a, c, g, or t
  misc_feature (1239)..(1239): n is a, c, g, or t
caaacaaaaaaaaagcattctaaatccttcataaatattgtggttaatataatatattaaacatttagattttaaagcacaaatgcttgttaagtaaacatattcaattatatcatttctagaaatattccagatctaattctagaagagttctgtccaatagaactttctgtggtaatggaaatgttctgtatgtgtgctgttcaatatggtanccacatttgctgttgagcacttgaaatttgggtggtataatagaggaactgaatttttaatttaattttaattaacttaaatatccaagtgtggctagtggctacctaactgaattgcacagttctagaacataattgtcatggtgtgaacatagtctgctataacaacccactctccacaaataattacaaaattgtatttctttggtaagatttggtgtagccttcacagttcaatattgtgtcctttggctaaaagcaaggtacaatgcacatgccgaaagaccttagttttggatgtgatgaaatgttttctatgcctggaataaatgccttcctttgggttgtaatttcttaaatagtattgctcctctttctgtgagttatttaatttttttctctgtagtagctatgatttctggttttctagtgtgatcatctattgagtaagaaagactaatctcatttggttgtttttgtttttgtttttaactgtccctattttaaaatatttagatgctaattcttccttttggcagtttgcacctgagtttcaggtaggagatggaattggaatggatttaaaactatcaaaccatgttttcaatgctttaaaacaacatgcctactcagaagaacgtcgaagtgcccgcctacatgagaaaaaggagcattctacagcagtaaggatttatagatttttttttttcttttttactagaaagattcatattagaaaactttgggtaaagaaaaaaaaacttcatgtttgatattttttcatgagattggctttttaaatcaaagatgtaaataaatccagccactgtggtgcccgcctgtaatcccactactttgggatagcagatggagacaggaggattacttgagcctaggagtgcaagaacagcccaggcaacataatgatccccagctcacaaaaaaaattagctgggcatcatggcacacacctgtggtcccagctacccggggggctgaggtgggaggattggttgagcccaanaagttgaggctgcagtgaaccatgattgtgccactgtactgcagcctgggtgacagattgagaccctgccttaaaaaaaaaaaaaaaaaaaaaaatgtaaataagccaggtgaggtggctcccagcaccttgggaagccaaggtagaaggatcgcttgagcccaggagttcaagaccagcctgggcaacatagggagaccctgggagaccctgtctcagcaaaagttttaaaaaattagccgggcatgttggtgtgcacctttagtcccagctgctcaggaggctgaggtgggaggatcacttgaacccaggaatttgaagctgtagtgagccataatcatgtcactgcattccatcctggacaacagagtgagaccctgtctctctctctgtctct

SEQ ID NO: 39792 - DNA, 457 bp, Homo sapiens
gcttatttcaattgcctttagcaaaaccggttcccactcctaaaaagggctttattggaaaaggaaaagatatcaccaccaaacatgatgaagtagtatgtgggagaaagaacacagcaagaatggaaaatgtaagttacagaaagtatctatctctgaatttagagttttgtttgaatacctttcaaaaacaggattctaaatataataccttagatttctaaaaatgtctttctttctaaagatgtttttagataacaatatggcaatatcatggaaactgagacattaatgaaaatataaagtacctcagaataaatgttaatttcataataactatttattaattttagaatcaatgtgagtcaaaatagtttttcaacactgttatggaattttattctgaggtactttatattttcattaatgtctcagtttccatgatatttgccgtcga

SEQ ID NO: 39793 - DNA, 286 bp, Homo sapiens
cttaaagaagccaggcatgttggctcacacttgtaatctagaactttgggaggctcaagtgatcctcttgcctcagcatcccaaagtgctgggattactggtgtgagccaccacacccagccattgaatgttacagctttaacagtgaaagaagtaaagctcaatagtgaagaaatgaaagaagcctactatcaaactcttcatgtaagttgtgcttttaaaagaattcacacactacctttaaaaaatatttcctctaaactttaaaaaaatttccttaaagaag

SEQ ID NO: 39794 - DNA, 3437 bp, Homo sapiens
aggccctttccctctataaacctgccgttttctgtctcccaagtcatcccagtttagaactgctccaggaaataatgaatgaacagagagagcctagtttgtttatttatttacaatccactagtctaatctagtttagatccagcggcaatttttggggtgccaaggaggaaagaaggagatggcagtgcggggacagggcagagcctgggccaaaggaagccacacccagttcttgccctgccctgcccgacacaggcaacgtgaccccaagcgacagccagctgatgcttgcttctccgagcccggcggtcagcagccggaagtagcccgcccgggggcggggaaaggtgccttaaggaggagctaggggcgtgcggccaattgcaagcgactgtcctagcgaagagggcggaagaggagagatccagttccggacgcggccgccgccgtcgccgccatctgtcacctccactccggcatcagcagccagtcgcccgtgtcccgcctgtctcctcggcggagcctgctgcccgtcctgccacctctctgctctgttcttgtctctgccttcattcccgaatggatctggtaggagtggcatcgcctgagcccgggacggcagcggcctggggacccagcaagtgtccatgggctattcctcaaaatacaatatcttgttctttggctgatgtaatgagtgaacagctggccaaagaattgcagttagaagaagaagctgccgtttttcctgaagttgctgttgctgaaggaccatttattactggagaaaacattgatacttccagtgaccttatgctggctcagatgctacagatggaatatgacagagaatatgatgcacagcttaggcgtgaagaaaaaaaattcaatggagatagcaaagtttccatttcctttgaaaattatcgaaaagtgcatccttatgaagacagcgatagctctgaagatgaggttgactggcaggatactcgtgatgatccctacagaccagcaaaaccggttcccactcctaaaaagggctttattggaaaaggaaaagatatcaccaccaaacatgatgaagtagtatgtgggagaaagaacacagcaagaatggaaaattttgcacctgagtttcaggtaggagatggaattggaatggatttaaaactatcaaaccatgttttcaatgctttaaaacaacatgcctactcagaagaacgtcgaagtgcccgcctacatgagaaaaaggagcattctacagcagaaaaagcagttgatcctaagacacgtttacttatgtataaaatggtcaactctggaatgttggagacaatcactggctgtattagtacaggaaaggagtctgttgtctttcatgcatatggagggagcatggaggatgaaaaggaagatagtaaagttatacctacagaatgtgccatcaaggtatttaaaacaacccttaatgaatttaagaatcgtgacaaatatattaaagatgatttcaggtttaaagatcgcttcagtaaactaaatccacgtaagatcatccgcatgtgggcagaaaaagaaatgcacaatctcgcaagaatgcagagagctggaattccttgtccaacagttgtactactgaagaaacacattttagttatgtcttttattggccatgatcaagttccagcccctaaattaaaagaagtaaagctcaatagtgaagaaatgaaagaagcctactatcaaactcttcatttgatgcggcagttatatcatgaatgtacgcttgtccatgctgacctcagtgagtataacatgctgtggcatgctggaaaggtgaggagcacattttgttaacattcagatttaattactgtaagtaaaatttaaaatgtaaatacatcagttcatgttctgtattgaaataggtctggttgatcgatgtcagtcagtcagtagaacctacccaccctcacggcctggagttcttgttccgggactgcaggaatgtctcgcagtttttccagaaaggaggagtcaaggaagcccttagtgaacgagaactcttcaatgctgtttcaggcttaaacatcacagcagataatgaagctgattttttagctgagatagaagctttggagaaaatgaatgaagatcacgttcagaagaatggaaggaaagctgcttcatttttgaaagatgatggagacccaccactactatatgatgaatagcactaatacccactgcttcagtgttaacacagcagtgattgtcagctgccaatagcaaatgaagttatgggtgacttgaaataccaaaacctgaggagtgggcaatggtgcttctgtgcttttcccccttgtaacccatgtgccagatgtgtggaatttttagctcagcattgagagaataaaatgtcactacctctcatcttatgaacaggataatataattctttaacagctataggttatctggctgaagtagacctaattttatgtgacttgtggtgtaaaatgtcttgatgataatttttaaaacttgggtaacacttccaaatatgggaggaaaggacagatgtgtttacaagggaggattttacaacatacttgctttattcacctccctgttttgtgttgcgtctttccttgaatattttattggcccagagttagcctttctcaattatgtttccagactgtggccgtgattctaaaggaaaatgtgtgctctttagtgggtagaacaaatggaaatttggtttcagaatggctgacagaaatcgacataagtcatgtaatttttgttgatatatcatgaaaatgaacagaattctttttccatacttatatctaagaaaaggcatcataggtttctgaaagagataactatataacagctttttaactatccagtcaactttcagcttttctacatttaggtaaaatggttaggatataactcatggtgtggctaatctacatttatcaataaaatgtaaattatctgaaaggacagaatataagatttaaccatgtttgacatattttaatttagttaatgaagcaaaattcagtttatatttcactagaactgtgtacttgattgattttcagagaaatatcacaaattagaaatattaaatctaaggatgaaaggtatatataaaacaatttgggggccaggcacgatggctcaaacctgtaatcccagcactttgggagaccaaggcgggtggatcacttgaggtcaggagttcaagaccagcctgggcaacatggcgaaaccctgtctctactaaaaatacaaaaattagccgggtgtggtggcacttctctgtaatctcagcttctcaggaggctgagacaggagaatcgcttgaacccgggaggcagaggttgcagtgagctgagatcatgcgcggccgcgaattc

SEQ ID NO: 39795 - DNA, 1448 bp, Homo sapiens
aggccctttccctctataaacctgccgttttctgtctcccaagtcatcccagtttagaactgctccaggaaataatgaatgaacagagagagcctagtttgtttatttatttacaatccactagtctaatctagtttagatccagcggcaatttttggggtgccaaggaggaaagaaggagatggcagtgcggggacagggcagagcctgggccaaaggaagccacacccagttcttgccctgccctgcccgacacaggcaacgtgaccccaagcgacagccagctgatgcttgcttctccgagcccggcggtcagcagccggaagtagcccgcccgggggcggggaaaggtgccttaaggaggagctaggggcgtgcggccaattgcaagcgactgtcctagcgaagagggcggaagaggagagatccagttccggacgcggccgccgccgtcgccgccatctgtcacctccactccggcatcagcagccagtcgcccgtgtcccgcctgtctcctcggcggagcctgctgcccgtcctgccacctctctgctctgttcttgtctctgccttcattcccgaatggatctggtaggagtggcatcgcctgagcccgggacggcagcggcctggggacccagcaagtgtccatgggctattcctcaaaatacaatatcttgttctttggctgatgtaatgagtgaacagctggccaaagaattgcagttagaagaagaagctgccgtttttcctgaagttgctgttgctgaaggaccatttattactggagaaaacattgatacttccagtgaccttatgctggctcagatgctacagatggaatatgacagagaatatgatgcacagcttaggcgtgaagaaaaaaaattcaatggagatagcaaagtttccatttcctttgaaaattatcgaaaagtgcatccttatgaagacagcgatagctctgaagatgaggttgactggcaggatactcgtgatgatccctacagaccagcaaaaccggttcccactcctaaaaagggctttattggaaaaggaaaagatatcaccaccaaacatgatgaagtagtatgtgggagaaagaacacagcaagaatggaaaattttgcacctgagtttcaggtaggagatggaattggaatggatttaaaactatcaaaccatgttttcaatgctttaaaacaacatgcctactcagaagaacgtcgaagtgcccgcctacatgagaaaaaggagcattctacagcagaaaaagcagttgatcctaagacacgtttacttatgtataaaatggtcaactctggaatgttggagacaatcactggctgtattagtacaggaaaggagtctgttgtctttcatgcatatggagggaggtaaatgagcaaaatatgataccatgatatgaaaacttagtctcttctccc

SEQ ID NO: 39796 - DNA, 3438 bp, Homo sapiens
aggccctttccctctataaacctgccgttttctgtctcccaagtcatcccagtttagaactgctccaggaaataatgaatgaacagagagagcctagtttgtttatttatttacaatccactagtctaatctagtttagatccagcggcaatttttggggtgccaaggaggaaagaaggagatggcagtgcggggacagggcagagcctgggccaaaggaagccacacccagttcttgccctgccctgcccgacacaggcaacgtgaccccaagcgacagccagctgatgcttgcttctccgagcccggcggtcagcagccggaagtagcccgcccgggggcggggaaaggtgccttaaggaggagctaggggcgtgcggccaattgcaagcgactgtcctagcgaagagggcggaagaggagagatccagttccggacgcggccgccgccgtcgccgccatctgtcacctccactccggcatcagcagccagtcgcccgtgtcccgcctgtctcctcggcggagcctgctgcccgtcctgccacctctctgctctgttcttgtctctgccttcattcccgaatggatctggtaggagtggcatcgcctgagcccgggacggcagcggcctggggacccagcaagtgtccatgggctattcctcaaaatacaatatcttgttctttggctgatgtaatgagtgaacagctggccaaagaattgcagttagaagaagaagctgccgtttttcctgaagttgctgttgctgaaggaccatttattactggagaaaacattgatacttccagtgaccttatgctggctcagatgctacagatggaatatgacagagaatatgatgcacagcttaggcgtgaagaaaaaaaattcaatggagatagcaaaggtattataaccttattgtgacaacttcattgagtggtagaaaacactcataatgtgctcctaagtaaatcttcaactatttttgcttcttaagtttccatttcctttgaaaattatcgaaaagtgcatccttatgaagacagcgatagctctgaagatgaggttgactggcaggatactcgtgatgatccctacagaccagcaaaaccggttcccactcctaaaaagggctttattggaaaaggaaaagatatcaccaccaaacatgatgaagtagtatgtgggagaaagaacacagcaagaatggaaaattttgcacctgagtttcaggtaggagatggaattggaatggatttaaaactatcaaaccatgttttcaatgctttaaaacaacatgcctactcagaagaacgtcgaagtgcccgcctacatgagaaaaaggagcattctacagcagaaaaagcagttgatcctaagacacgtttacttatgtataaaatggtcaactctggaatgttggagacaatcactggctgtattagtacaggaaaggagtctgttgtctttcatgcatatggagggagcatggaggatgaaaaggaagatagtaaagttatacctacagaatgtgccatcaaggtatttaaaacaacccttaatgaatttaagaatcgtgacaaatatattaaagatgatttcaggtttaaagatcgcttcagtaaactaaatccacgtaagatcatccgcatgtgggcagaaaaagaaatgcacaatctcgcaagaatgcagagagctggaattccttgtccaacagttgtactactgaagaaacacattttagttatgtcttttattggccatgatcaagttccagcccctaaattaaaagaagtaaagctcaatagtgaagaaatgaaagaagcctactatcaaactcttcatttgatgcggcagttatatcatgaatgtacgcttgtccatgctgacctcagtgagtataacatgctgtggcatgctggaaaggtctggttgatcgatgtcagtcagtcagtagaacctacccaccctcacggcctggagttcttgttccgggactgcaggaatgtctcgcagtttttccagaaaggaggagtcaaggaagcccttagtgaacgagaactcttcaatgctgtttcaggcttaaacatcacagcagataatgaagctgattttttagctgagatagaagctttggagaaaatgaatgaagatcacgttcagaagaatggaaggaaagctgcttcatttttgaaagatgatggagacccaccactactatatgatgaatagcactaatacccactgcttcagtgttaacacagcagtgattgtcagctgccaatagcaaatgaagttatgggtgacttgaaataccaaaacctgaggagtgggcaatggtgcttctgtgcttttcccccttgtaacccatgtgccagatgtgtggaatttttagctcagcattgagagaataaaatgtcactacctctcatcttatgaacaggataatataattctttaacagctataggttatctggctgaagtagacctaattttatgtgacttgtggtgtaaaatgtcttgatgataatttttaaaacttgggtaacacttccaaatatgggaggaaaggacagatgtgtttacaagggaggattttacaacatacttgctttattcacctccctgttttgtgttgcgtctttccttgaatattttattggcccagagttagcctttctcaattatgtttccagactgtggccgtgattctaaaggaaaatgtgtgctctttagtgggtagaacaaatggaaatttggtttcagaatggctgacagaaatcgacataagtcatgtaatttttgttgatatatcatgaaaatgaacagaattctttttccatacttatatctaagaaaaggcatcataggtttctgaaagagataactatataacagctttttaactatccagtcaactttcagcttttctacatttaggtaaaatggttaggatataactcatggtgtggctaatctacatttatcaataaaatgtaaattatctgaaaggacagaatataagatttaaccatgtttgacatattttaatttagttaatgaagcaaaattcagtttatatttcactagaactgtgtacttgattgattttcagagaaatatcacaaattagaaatattaaatctaaggatgaaaggtatatataaaacaatttgggggccaggcacgatggctcaaacctgtaatcccagcactttgggagaccaaggcgggtggatcacttgaggtcaggagttcaagaccagcctgggcaacatggcgaaaccctgtctctactaaaaatacaaaaattagccgggtgtggtggcacttctctgtaatctcagcttctcaggaggctgagacaggagaatcgcttgaacccgggaggcagaggttgcagtgagctgagatcatgcgcggccgcgaattc

SEQ ID NO: 39797 - DNA, 3297 bp, Homo sapiens
aggccctttccctctataaacctgccgttttctgtctcccaagtcatcccagtttagaactgctccaggaaataatgaatgaacagagagagcctagtttgtttatttatttacaatccactagtctaatctagtttagatccagcggcaatttttggggtgccaaggaggaaagaaggagatggcagtgcggggacagggcagagcctgggccaaaggaagccacacccagttcttgccctgccctgcccgacacaggcaacgtgaccccaagcgacagccagctgatgcttgcttctccgagcccggcggtcagcagccggaagtagcccgcccgggggcggggaaaggtgccttaaggaggagctaggggcgtgcggccaattgcaagcgactgtcctagcgaagagggcggaagaggagagatccagttccggacgcggccgccgccgtcgccgccatctgtcacctccactccggcatcagcagccagtcgcccgtgtcccgcctgtctcctcggcggagcctgctgcccgtcctgccacctctctgctctgttcttgtctctgccttcattcccgaatggatctggtaggagtggcatcgcctgagcccgggacggcagcggcctggggacccagcaagtgtccatgggctattcctcaaaatacaatatcttgttctttggctgatgtaatgagtgaacagctggccaaagaattgcagttagaagaagaagctgccgtttttcctgaagttgctgaccttatgctggctcagatgctacagatggaatatgacagagaatatgatgcacagcttaggcgtgaagaaaaaaaattcaatggagatagcaaagtttccatttcctttgaaaattatcgaaaagtgcatccttatgaagacagcgatagctctgaagatgaggttgactggcaggatactcgtgatgatccctacagaccagcaaaaccggttcccactcctaaaaagggctttattggaaaaggaaaagatatcaccaccaaacatgatgaagtagtatgtgggagaaagaacacagcaagaatggaaaattttgcacctgagtttcaggtaggagatggaattggaatggatttaaaactatcaaaccatgttttcaatgctttaaaacaacatgcctactcagaagaacgtcgaagtgcccgcctacatgagaaaaaggagcattctacagcagaaaaagcagttgatcctaagacacgtttacttatgtataaaatggtcaactctggaatgttggagacaatcactggctgtattagtacaggaaaggagtctgttgtctttcatgcatatggagggagcatggaggatgaaaaggaagatagtaaagttatacctacagaatgtgccatcaaggtatttaaaacaacccttaatgaatttaagaatcgtgacaaatatattaaagatgatttcaggtttaaagatcgcttcagtaaactaaatccacgtaagatcatccgcatgtgggcagaaaaagaaatgcacaatctcgcaagaatgcagagagctggaattccttgtccaacagttgtactactgaagaaacacattttagttatgtcttttattggccatgatcaagttccagcccctaaattaaaagaagtaaagctcaatagtgaagaaatgaaagaagcctactatcaaactcttcatttgatgcggcagttatatcatgaatgtacgcttgtccatgctgacctcagtgagtataacatgctgtggcatgctggaaaggtctggttgatcgatgtcagtcagtcagtagaacctacccaccctcacggcctggagttcttgttccgggactgcaggaatgtctcgcagtttttccagaaaggaggagtcaaggaagcccttagtgaacgagaactcttcaatgctgtttcaggcttaaacatcacagcagataatgaagctgattttttagctgagatagaagctttggagaaaatgaatgaagatcacgttcagaagaatggaaggaaagctgcttcatttttgaaagatgatggagacccaccactactatatgatgaatagcactaatacccactgcttcagtgttaacacagcagtgattgtcagctgccaatagcaaatgaagttatgggtgacttgaaataccaaaacctgaggagtgggcaatggtgcttctgtgcttttcccccttgtaacccatgtgccagatgtgtggaatttttagctcagcattgagagaataaaatgtcactacctctcatcttatgaacaggataatataattctttaacagctataggttatctggctgaagtagacctaattttatgtgacttgtggtgtaaaatgtcttgatgataatttttaaaacttgggtaacacttccaaatatgggaggaaaggacagatgtgtttacaagggaggattttacaacatacttgctttattcacctccctgttttgtgttgcgtctttccttgaatattttattggcccagagttagcctttctcaattatgtttccagactgtggccgtgattctaaaggaaaatgtgtgctctttagtgggtagaacaaatggaaatttggtttcagaatggctgacagaaatcgacataagtcatgtaatttttgttgatatatcatgaaaatgaacagaattctttttccatacttatatctaagaaaaggcatcataggtttctgaaagagataactatataacagctttttaactatccagtcaactttcagcttttctacatttaggtaaaatggttaggatataactcatggtgtggctaatctacatttatcaataaaatgtaaattatctgaaaggacagaatataagatttaaccatgtttgacatattttaatttagttaatgaagcaaaattcagtttatatttcactagaactgtgtacttgattgattttcagagaaatatcacaaattagaaatattaaatctaaggatgaaaggtatatataaaacaatttgggggccaggcacgatggctcaaacctgtaatcccagcactttgggagaccaaggcgggtggatcacttgaggtcaggagttcaagaccagcctgggcaacatggcgaaaccctgtctctactaaaaatacaaaaattagccgggtgtggtggcacttctctgtaatctcagcttctcaggaggctgagacaggagaatcgcttgaacccgggaggcagaggttgcagtgagctgagatcatgcgcggccgcgaattc

SEQ ID NO: 39798 - DNA, 2589 bp, Homo sapiens
ctaccatgttggtagaggggaaatttatagcactaaatgcccacaagagaaaacaggagagatctaaaatcaacaccttaacatcacaattaaaagaactagagaagcaagagcaaacaaattcaaaagctagcagaaggcaagaaataactaagatcagagcagaaatgaaggagatagagacacaaaaatcccttcaaaaattcaatgaatctcagaagctgatttttcgaaaagagcaacgaaatagacagactgctagcaagattaataaagaataaaagggagaaggatcaaatagacacaataaaaaatgataaaggggatatcaccaccaaacatgatgaagtagtatgtgggagaaagaacacagcaagaatggaaaatgtaggagatggaattggaatggatttaaaactatcaaaccatgttttcaatgctttaaaacaacatgcctactcagaagaacgtcgaagtgcccgcctacatgagaaaaaggagcattctacagcagaaaaagcagttgatcctaagacacgtttacttatgtataaaatggtcaactctggaatgttggagacaatcactggctgtattagtacaggaaaggagtctgttgtctttcatgcatatggagggagcatggaggatgaaaaggaagatagtaaagttatacctacagaatgtgccatcaaggtatttaaaacaacccttaatgaatttaagaatcgtgacaaatatattaaagatgatttcaggtttaaagatcgcttcagtaaactaaatccacgtaagatcatccgcatgtgggcagaaaaagaaatgcacaatctcgcaagaatgcagagagctggaattccttgtccaacagttgtactactgaagaaacacattttagttatgtcttttattggccatgatcaagttccagcccctaaattaaaagaagtaaagctcaatagtgaagaaatgaaagaagcctactatcaaactcttcatttgatgcggcagttatatcatgaatgtacgcttgtccatgctgacctcagtgagtataacatgctgtggcatgctggaaaggtctggttgatcgatgtcagtcagtcagtagaacctacccaccctcacggcctggagttcttgttccgggactgcaggaatgtctcgcagtttttccagaaaggaggagtcaaggaagcccttagtgaacgagaactcttcaatgctgtttcaggcttaaacatcacagcagataatgaagctgattttttagctgagatagaagctttggagaaaatgaatgaagatcacgttcagaagaatggaaggaaagctgcttcatttttgaaagatgatggagacccaccactactatatgatgaatagcactaatacccactgcttcagtgttaacacagcagtgattgtcagctgccaatagcaaatgaagttatgggtgacttgaaataccaaaacctgaggagtgggcaatggtgcttctgtgcttttcccccttgtaacccatgtgccagatgtgtggaatttttagctcagcattgagagaataaaatgtcactacctctcatcttatgaacaggataatataattctttaacagctataggttatctggctgaagtagacctaattttatgtgacttgtggtgtaaaatgtcttgatgataatttttaaaacttgggtaacacttccaaatatgggaggaaaggacagatgtgtttacaagggaggattttacaacatacttgctttattcacctccctgttttgtgttgcgtctttccttgaatattttattggcccagagttagcctttctcaattatgtttccagactgtggccgtgattctaaaggaaaatgtgtgctctttagtgggtagaacaaatggaaatttggtttcagaatggctgacagaaatcgacataagtcatgtaatttttgttgatatatcatgaaaatgaacagaattctttttccatacttatatctaagaaaaggcatcataggtttctgaaagagataactatataacagctttttaactatccagtcaactttcagcttttctacatttaggtaaaatggttaggatataactcatggtgtggctaatctacatttatcaataaaatgtaaattatctgaaaggacagaatataagatttaaccatgtttgacatattttaatttagttaatgaagcaaaattcagtttatatttcactagaactgtgtacttgattgattttcagagaaatatcacaaattagaaatattaaatctaaggatgaaaggtatatataaaacaatttgggggccaggcacgatggctcaaacctgtaatcccagcactttgggagaccaaggcgggtggatcacttgaggtcaggagttcaagaccagcctgggcaacatggcgaaaccctgtctctactaaaaatacaaaaattagccgggtgtggtggcacttctctgtaatctcagcttctcaggaggctgagacaggagaatcgcttgaacccgggaggcagaggttgcagtgagctgagatcatgcgcggccgcgaattc

SEQ ID NO: 39799 - DNA, 386 bp, Homo sapiens
aaatatattaaagatgatttcaggtttaaagatcgcttcagtaaactaaatccacgtaagatcatccgcatgtgggcagaaaaagaaatgcacaatctcgcaaggtaaagaaaatattgtgctagacgtaatcttgggtaaatacctttttgcattaggataaaaaaatccatgctttcttttacattcatttatagaaataatgaaaggccaggtgtataacctcgattcatacttttaggatgaaaaagccattttcttttttctttcctcaatgaagcttgagggaaatctgggcattttctgccttagacactttatcatatatctaaatgccatttttaaattgcttttatcacgaagtaaaacttccagcatccaattag

SEQ ID NO: 39800 - DNA, 1092 bp, Homo sapiens
aggccctttccctctataaacctgccgttttctgtctcccaagtcatcccagtttagaactgctccaggaaataatgaatgaacagagagagcctagtttgtttatttatttacaatccactagtctaatctagtttagatccagcggcaatttttggggtgccaaggaggaaagaaggagatggcagtgcggggacagggcagagcctgggccaaaggaagccacacccagttcttgccctgccctgcccgacacaggcaacgtgaccccaagcgacagccagctgatgcttgcttctccgagcccggcggtcagcagccggaagtagcccgcccgggggcggggaaaggtgccttaaggaggagctaggggcgtgcggccaattgcaagcgactgtcctagcgaagagggcggaagaggagagatccagttccggacgcggccgccgccgtcgccgccatctgtcacctccactccggcatcagcagccagtcgcccgtgtcccgcctgtctcctcggcggagcctgctgcccgtcctgccacctctctgctctgttcttgtctctgccttcattcccgaatggatctggtaggagtggcatcgcctgagcccgggacggcagcggcctggggacccagcaagtgtccatgggctattcctcaaaatacaatatcttgttctttggctgatgtaatgagtgaacagctggccaaagaattgcagttagaagaagaagctgccgtttttcctgaagttgctgttgctgaaggaccatttattactggagaaaacattgatacttccagtgaccttatgctggctcagatgctacagatggaatatgacagagaatatgatgcacagcttaggcgtgaagaaaaaaaattcaatggagatagcaaagtttccatttcctttgaaaattatcgaaaagtgcatccttatgaagacagcgatagctctgaagatgaggttgactggcaggatactcgtgatgatccctacagaccagctaaaccggttcccactcctaaaaggctttcattggataaggacaccggaataagggagatcctgtagacgacccca

SEQ ID NO: 39801 - DNA, 500 bp, Homo sapiens
aaccacagggcacaaagacaggacgctgcatttgccggaaatggaatccaggtctcccgtgtgggaggcgagaattctgccactgtaccgccaatgcctcctgacccccgagctctgcagccttggaaacagttaagacacagacttggggaaaggagtcaagattttcaccatgttctctttggaagatgtgactaacaaaaaagacacccagagcaaaggctcacagtggagatttgcatcaggcaacaccacaaaattatggcttcacattaaaagggttgacttgaaaaagccttattctgagtaggctgtgtgcaactggataaaaaacctctgtaggaaaacatcagaaattcacccagctttttgtctctggtcttgtatccagtgtcagcctgtggaaagttcttgcctcgcttgttgatgtcttctctttgcctccccattgcctggtacctcccaaaccctttcctcccaaccttgacgcaaacatcagc

SEQ ID NO: 39802 - DNA, 356 bp, Homo sapiens
tgtcaataaaaatgtctgtgcatgttcaatacagacacaattcatttttgaatatttttgatcctcggttgaatctgcagatacagagagatgactacatacacacacacacacacacacacacacacacacacacatacacacacacatgtaattttaaagagtactgtgaatataaatctttaagggtttaaaaatttattttgaattaagttattggaattatcaacagtacccacttgatgaaaacaatataaataaaaagtgacgcgtgatgatctttcaaaatgaaaagaatttgatattgaaaatgcatctctccaacagctgaatggtgagcatcgtggaattttgct

SEQ ID NO: 39803 - DNA, 187 bp, Homo sapiens
  misc_feature (107)..(107): n is a, c, g, or t
  misc_feature (137)..(137): n is a, c, g, or t
gaagcaagatcatcggctaagagagaaaagaaggaaggaggtgttgaagtttggggagggaggaacgaacatgacaacagggagaatgagaagacgaatgcagtggnggagaatcttctgagcagcgcctcagtggnggagaatcttctgagcagcgccttccccagggcagctggaagcatttgag

SEQ ID NO: 39804 - DNA, 440 bp, Homo sapiens
ataaatctaaagcacttagaacagaatctgagcacataaaaagtgctctataagtattacccactgttatttttttcctggtgctatgaggcccgaatgtggttactttcgttaaccaccaagcgtagttcctagtatccaacaaatgttagtgcccatccctctgcagagcataagtagcattctgggggtagcgtttgacactgaaggatgtatttcgcaatcttataggcaatcttgagtttcaacagcttaaattttctttccttgctatttttccaatgtttaaagaataccttcttggccaggcactgtggctcatgcctgtaatcccagcacctgacaggctgaggcaggcagattgcctgagctcaggagttcacaaccagcctgggaaacacagtgagaccccgtctctactaaaatacaaaaaaattagc

SEQ ID NO: 39805 - DNA, 360 bp, Homo sapiens
ggcagccctatggttaaacctttgtctctgccacaacccgttgtctcggcgtattgacctgctgcatacattgggcaatggacctgtcatggttccacgaagattcaaggatgaacggagtaggcatgcttcctaagcccatggagctcacattctagtttggggagatagacaattaaaaatggtaacaagatcaacaagataattttagattacatcaagtgcagtaaaaacaaatgtatcatgtagtacaatgactaggagagggtatttttagatagggtgtccaggaagagtctttctcaggaggcaacatttgaactgggatctgaatgacaaggagccagccttgcaaaaaaa

SEQ ID NO: 39806 - DNA, 1093 bp, Homo sapiens
ggaacgtagaatctacgtctgcctctgaatggacttcccacctcctctctcttgctctgatgcttgcctctgggcctctccatgcccaaggtggtctttcatccttgacaggctggtaatgtgctggccacctccagctcctgcatcgagtctgtaaaccagagctggttctcatggccttcgtcacgataccaggatacggaggggagcccagggccatccatacccaccccagggtaacggggctggcctggcattagtcattatttagtttccaggccaaccatccagatagagattccctctttcctttgagcagtgctctcaagagctccgtgcctgtccacaatgacctagagtgcatcctgctcattgtcagtgtagcccctcgcccctatattcatccaggatacttggaagtgctaaaataggaagggattcggctttcaactttgctaccatcttccctgaagcaggaaaatgaacatggacttaaatgttctttgaaaaaaccaaagttttaagatttgctgtgtgatgaagtgacagggagggccggagtcagcaggtgccagactttctgttctgtctgccatgggtttgtccagctcaggtagctctaggagcaccatcctgccctagcagagcccaggccttgccctcatgaagcatcattgaaatagcaggagcatgttgatttcttggttaggttgcattataataacaagagtcagaacattaattcgaaacaacttgcagtatgcatttcttcacaccagtacattcttaagtgtacttgtttataaggaataacataaactaatctggtcctttatatatatgtgtgtgtacatatatacatatataaactgtatagtgtacatggtaatgatttattgctatgccccagatccttaatgtagttctcatcctccgcatgccctcagcacaagcgggtgactgactgttccctgatgatttggccacctcctgtgttggacctctagggaggaggggtttgggctactctccttatcctcgtgcccgaaatgctcagggtcccatgtgcctgttgttcgcctctctctgttcc

SEQ ID NO: 39807 - DNA, 710 bp, Homo sapiens
  misc_feature (702)..(702): n is a, c, g, or t
  misc_feature (704)..(710): n is a, c, g, or t
ctcttttgatactttgggatagaatttgtattaacagaagttttgaagtcattcagaatgccacatgaccaacgtggggtcaccaattggaacagggaagagatgtgcacaatggccctctctccagcttgtgtgagccggctccaacacacatcctgtggagcgagagtttggttgaaatttttaaaaaatgaaatagaaccacaaagaaaatatcagaacacattgcacttagtaaagaacaagggggagtctccctgcacaagctctctctctttgcctgctgtcacccacctaagatgtaacttgctcctccttgccttccaccatgattgtgaggcttccccagccacgtggaactaatgaggcagaagttacactgtgccagtttgggcccagctcttcacaggcctggcagcttccacttttgctctcttaaaatccagctttcctgctgaagaggctgcgtggggaagaatcctggaaaatgacaggacaccttgaacattcaagccctaggtgagcagtcagctgagtgcaacaaacatgaaggatcatagctgacaccacctagcgctgagaagaactggccctgctgagccctgaccaaattgtagaattatgagcaaacacatggtggctttaagccacaaagtttgagggtggtttcttttctaataataaacatttgctctactatanannnnnnn

SEQ ID NO: 39808 - DNA, 987 bp, Homo sapiens
gagccacagtggagcaggcgtggagtccgtggcaccatggcagggggtctctgtccagggcctgggtactcggtgacactgggagagaatgcagcctgcagcgtggcctcggaaactggaataagagagctgacctatgaaggaggcacgggaagctgggtgcagagatgaccgagaaactggcaaacattttggtaaaccagagcaccatgctgcgtgagtgaggagtaaccaaggtggaagtgttaaggatgaggtggaacgaatattcataccatacagtaactaacactgaacacagtcacctggaagagaagactggggagaatcgggacattaaggctcctgggcacttgcggtttttactccgggtcagcgctgtccaacagggatatagtttgaaccacgtctataattaaacgctttctggtagccatattaaaaaagaaacaggtgaaattggtttaataacatattttatttagggcaatatatgcaaaatactatcatttccacatataatcatttataaatattatttattgaaacattttgtattcctttttttataccaactctttcaaatccggtgcatattttacatttatagcatattccaatttggatactaaatttctgctgcaaatattttatctgtatttagagtttacaaaatttagagttaaaaaaagattttcaagttgttctaaacatgcgtttttagtaattggattgtgtatcaatttctaaattaagattaaataaaattgaacatttaagtgctcggttgatctaatttcaaatgtgattagtggccctactgtattggatagtgcagtggtaggcatttaaaagtaaagtattcatgttaaaaatgttaagaataacaagcaaagaatagaagtagaatatataacttctaaaccagtagagggggctgcatacaaaaaaaatcccgatcaattcaacagaaggggaagtgagaaa

SEQ ID NO: 39809 - DNA, 259 bp, Homo sapiens
ccagcagtacacgagagtgcctttttctctacctgcactaacactgtgaaagaaatatttatttatttatttattgagcacctattatatctattatgttcacagtactggggatcagagtaaacaaaataaaggtccccagaccaggcatggtgtcttatgtctgtaatcccagcactttgggactttgggaggctgaggcaggaggatcgcttgaggccaggagttccagaccagcctgggtaccatagcaagactc

SEQ ID NO: 39810 - DNA, 607 bp, Homo sapiens
gctggtctcgaactcttgacctcaagtgatccacttgccttggcttcccaaattgaggggattacaggcacaagccaccacaccatcccgctagctggttttgttgttgctgtttcagatccatggtctcacaatgtcctcaggagctgaatgtgacctataggtgggtggggattggcccacagatagatagttttaaaaatacaaatcttgaatttaatgccaacattggagaactggttaattacacataaaaagcaggatttccattttcacttgagttaaacaacacacctggacacactggtgatcgtgtccatcggtagcatcagctggagtggatgtgctgggcctcagcattggcagcgtgcctgggcctttgaaacagttgctcttagctctgcctcgttggccataggatttgaggttgtggcctaaccatgtcatttcagttttgttactagctaataaatcccttgaagtcagagattgtctaataattttcttcattctcccactgcctggcgtagtaccggacacatagtagttgctcagtaaattaatttgttcaaatacttccgttgtgtgcagctgagcatatactgag

SEQ ID NO: 39811 - DNA, 584 bp, Homo sapiens
ctaataatatttctgaatatggaagtaatgataccattccaactataaccagacattttattcccagtgggaaaatgtgtacatgagtttcaaatcggtgggggcagaaacacagctcccaccatgctcacacactgcctcacacagcaaatcgggacctgggcctggtagacaggatgagaagatttttgagcctgagatcctccttttctacactttcaacatgtcctgaattgatagaaaaatggggactattttgggctctgtatccactcgtttcgtcatttattttttctttttctttcttccccctcttccttcctttcttccttcctttcttccttcattctttcttcctttcaatcttctttttcaacaatattctccataccaacttaaagagatttatgtgcaagtagggaagggaattagggatgctttgttttagagatgcttgcaagccattactaagttaagagttcagattcatggcctgcctcttaattttcctaaataacccctagatcagagtgcctgatttcaagtctggtaatgaacataaggattatccaaaattcatgcaa

SEQ ID NO: 39812 - DNA, 611 bp, Homo sapiens
accctattcttcctccacgtaaagataaccaagtattcttatttttccagacaccatctgtgggaagggaaatttgccagtaatcaaaaaggcgtagtgtgttatctctcttaggaatatttttggcgtgagccaccacacccggccactatttttttttttttaaaggaagcaatacagccatgagatggctatcatttatgacttggcaccttataaaggtaaaggtggcctgttttacctttgttatgtggtctattggctgaacattaaccacatatttacgcatctttctgttggcatgtaggaatgattgcatttctgtagtgggaggagcctggtaaatgatttttttggcatatgcagattagacagaaagacaggtatgacttagtaaataagtgttccattcttcaagagtagagtagacagtaacattcctcaattattgagtggcaaaaaaaaaaaatcccctttttctaaaataccaagattgtactcaataaagaggaaatggaaatgcaagcaccataatcacatgcaaaactaatttatgattttggtttaaggagcttatattaggctgttcttgcattgctataaagaagtac

SEQ ID NO: 39813 - DNA, 346 bp, Homo sapiens
tagtaaatgcagatatgcagatttcaatgcttacatgaactattttattggatttggataatacctttaaaattgacattcattctttcaaaatatttggttttaaaactgatgcacaaatcaataaaatgatggttattacatgactgttaatgaaaataattttgccatacagaggaagggcatgtgcctgtagttccagcttctcaggaggctgaggcaggagggttgcttgagttcaggagttgtaggctacagtgagctacggctgggccagtgcactccagtgtgtgtaacagagaccctgtctcaatagatagattagatagatagataaatcgtggat

SEQ ID NO: 39814 - DNA, 714 bp, Homo sapiens
tgtttactccaacccagccccagagctgaaaatttcctgtggctgccagccgtctacttcaggaaagttcccatcaagggagccaggcctctcccattttggctgcaaccccagtgtccctggtttcttgagagacatttggcctcttgggataaccagggccttctcctatgctcttcatagtgtggaactctcccccatcacagataagcctattttgtgactccacctgggtgtacttgggagcaacaaaatcaaacctcctgtaagaatatttttgtctgccaagacccgcagaggctagctaggatggagagggagacagggaagcatagccacggccctagtgccctcctttccccagatcctccacctcaaccctgctcccacattccttctcctggaaatccatcctttcagcactactgacaggacaggtccctccagcctccaacttcagggaagtgtcctgacatagcagccctccctttgaagctaggcagtcttgcagtttgatcccgactctgctatctgtttgctgagtgttccctgctttaaatatcaggcatcttatttgtgaaatgtggctcaaatctacatctcaggattctgatgaagatgaaatgggataccaatgcctgacatgtagtagacatgcaatacatttgttaactcatgtattctcatgtatttacagagcaagacactgttctg

SEQ ID NO: 39815 - DNA, 149 bp, Homo sapiens
tcaccaacatggaccatatgctgggccataaaatacacattaaataatataaatcatacaatgtctgctctcaaaaaacaatagaattaagctaaaaatcaataattgaaatgtagctgaacatgtatagcattaaaagcatatattag

SEQ ID NO: 39816 - DNA, 390 bp, Homo sapiens
gcctcccagcttcaagcaattctcctgcctcagcctcccaagtagctgggattacaggcatgtgcaaccatgcccggccaattgttttgtatttttagtagagacggagtttcaccatgttgaccaggctggtcttgaactcctgacctcaagtgatctgatctgcccacttcagcctcccaaagtgctgggattacaggcatgagtcaccgtgcctggagacaaacatgactttttggtctgctgagctccagctctaccctgcttccaaagggtcatctagaatgactgagcagcatggtgtgacccctgttgtggccagaaggttagttttttctttttcttttttccttttttttttgagacagggtctcactctattgcccaggc

SEQ ID NO: 39817 - DNA, 375 bp, Homo sapiens
gtctttagaggtgaccatagtgtcacatcctagttcttgcttggggaatttaattttggaaacagggaagagtccgtgggagtaaaatgtggtgaatgacaggaatattcaaccaggggcagtgcgtggatgtgaaagcaaggcaatccaaataagtttctctaaatataatcttggaaatgtgctcctcagcaacaacaggtttattttaaaactttaataactgctaacacgaggagccatgggagagagattaaagcaaacagttgttgaatgaatgtataaaaaacatgtgtgcctgagtgagaggggcttctggctgggtagaaatgtggaaagtaaaccagatctgaaagacatttctgtgaaggactt

SEQ ID NO: 39818 - DNA, 429 bp, Homo sapiens
ataagaaaaaaacctattgtcattttttcttatttaatttttttgtttgtttgagacagagtcttgctctgttgcccaggctggagtgcagtggcgtgatcttggctcattgtaacctctgcctcctgggtttaagccattctcatgcttcaggagcccgagtagccaggattacaggtgcatgccaccatgcacagctaatttttgtatttttagtagagacagggtttcaccattttggccaggctggtcttgagctcctgaccaagtgatccgcccaccccgggctcccaaagtgttgggattataggcgtgagccatcctgcccttctgttttatttaattttgtattgtgacaatagcttcttcaaatacaaaaggaggaattttgtaatcctgttgtttaaaaagtttgttccactagttact

SEQ ID NO: 39819 - DNA, 309 bp, Homo sapiens
aaatacgtcttccccagactcattacaggatcaaatgctgtcagtcttgtgagctttttgcttcttatgtatttataaagactgatgatacccctgatttcagtcatgataaatgaataaattgtttaatattcattaagaagtaatttacacagagtttaactttttcatcttgtcctaatgcagaattcctatgaatttctacttttatacttcatcagataattttcataataatgggttattgaactttaaaacaagattgtgttttctcttatggatattccttgctttcattaaatgtcatct

SEQ ID NO: 39820 - DNA, 325 bp, Homo sapiens
gggagccaggattgcaccactgcactccagcctgggtgacagagcgagactccatctcaaaaaaaaaaaaaaaaaaaaaagatggcatgaggttcctttcccttggtttctcctacctcctccttcgcttcccatgcctgtgtgttaggtgtgatgggaaaatacctttgccccacagtagacagaggtcatggcttagaaaaagggaattcatggccaggcacagtggctcatgcctataatcccagcactttgggaggccaaggtgggcagatcaggaggtcaggagatcgagaccatcccggccaacatggtgaaaccccgt

SEQ ID NO: 39821 - DNA, 131 bp, Homo sapiens
tcacaaagatgccatcagcctcaagtgggaaaatgcacattataagcccttcgtagtttgaagcaccttttattcagcaatgccactaacatgggttctggggacaccatggtgagtaacttaacaagcac

SEQ ID NO: 39822 - DNA, 1381 bp, Homo sapiens
cgccgagggacgcagagccacccacccccgggctcctacgcgcacgcgtgaaaaaagccaggtggaggggaacgggggagcttcgggcgtagagtgtggggagtgggggatctggtgcaaattagggtgcgtgaaagaagtcacaaaaagcgcagaggccaggcttcccgccctaatccggcctttgtctccgcccctctgcctttgtttcggcccaagcgtcttatggtcagacatcttcagccccagtggtccaagagccaaaggacggggtctgccccaagctgtgcctgcttccggagccgcaataagaacggtcaattgagatgcggctttcaggcatttgtttaggacatgcccatggcggggcttctaaaggggcttgtacggcaactggagcagttcagagttcaacaacaagcttccaagatgccgcccaaaggaaaaagtggttctggaaaagcggggaaagggggagcagcctctgggagtgacagtgctgacaagaaggctcaaggtcccaaaggtggtggcaatgcagtaaaggtcagacacattctatgtgaaaaacatggcaaaatcatggaagccatggaaaagttaaagtctgggatgagattcaatgaagtggccgcacagtatagtgaagataaagccaggcaagggggtgacttgggttggatgaccagagggtccatggtgggaccatttcaagaagcagcatttgccttgcctgtaagtgggatggataagcctgtgtttacagacccaccggttaagacaaaatttggatatcatattattatggtcgaaggaagaaaataaaatcatatgaaagactgaataagttttatacattttgtttctttaaaaggtattacatattcttttgagctggagctgcaaggaaatacaaaaatttttaaaaagaaaagatattggatgctccttgtattctgtgaaagctctaagtatgggtttgtaggtgtaagagagggtggggctaagtgaatgtcaactgtagtaggtattcagtcagtctttctcaaagagaagtcaagcagactccctttaacctgtattctctttcctcccagaactatatctgactctcagtctgtcccataaattaattcagaaaccatcttcaggggaagcagatatcaactcacactattcacacaactgaaaatattgggcatcaaatagattagtgtgtgagaatcataaaataagttcctagacaacatttgttttacatgttagtcaactctgatcttccaggacaggtggtattagctccactgtcttaacatagtacgtggcacgttatgcctttcagtgttaactcctttctttttaaataaatgtttattggagg

SEQ ID NO: 39823 - DNA, 455 bp, Homo sapiens
aggagaacttaggccttagtacgaggcctggttcgaatcggccgagggcgcaaaggaaaaagtggttctggaaaagcggggaaagggggagcagcctctgggagtgacagtgctgacaagaaggctcaaggtcccaaaggtggtggcaatgcagtaaaggtcagacacattctatgtgaaaaacatggcaaaatcatggaagccatggaaaagttaaagtctgggatgagattcaatgaagtggccgcacagtatagtgaagataaagccaggcaagggggtgacttgggttggatgaccagagggtccatggtgggaccatttcaagaagcagcatttgccttgcctgtaagtgggatggataagcctgtgtttacagacccaccggttaagacaaaatttggatatcatattattatggtcgaaggaagaaaataaaatcatatgaaagactg

SEQ ID NO: 39824 - DNA, 1521 bp, Homo sapiens
cgccgagggacgcagagccacccacccccgggctcctacgcgcacgcgtgaaaaaagccaggtggaggggaacgggggagcttcgggcgtagagtgtggggagtgggggatctggtgcaaattagggtgcgtgaaagaagtcacaaaaagcgcagaggccaggcttcccgccctaatccggcctttgtctccgcccctctgcctttgtttcggcccaagcgtcttatggtcagacatcttcagccccagtggtccaagagccaaaggacggggtctgccccaagctgtgcctgcttccggagccgcaataagaacggtcaattgagatgcggctttcaggcatttgtttaggacatgcccatggcggggcttctaaaggggcttgtacggcaactggagcagttcagagttcaacaacaagcttccaagatgccgcccaaaggaaaaagtggttctggaaaagcggggaaagggggagcagcctctgggagtgacagtgctgacaagaaggctcaaggtcccaaaggtggtggcaatgcagtaaaggtcagacacattctatgtgaaaaacatggcaaaatcatggaagccatggaaaagttaaagtctgggatgagattcaatgaagtggccgcacagtatagtgaagataaagccaggcaagggggtgacttgggttggatgaccagagggtccatggtgggaccatttcaagaagcagcatttgccttgcctgtaagtgggatggataagcctgtgtttacagacccaccggttaagacaaaatttggatatcatattattatggtcgaaggaagaaaataaaatcatatgaaagactgaaaaaaaaacaaaaaaaaaaagggggggaggcaccgcacgggcaaacgggggggagcccaacacatacacgggaacacagggcgcgccatcaaacccctgtgtgtaacgcccaaaagtgagaagaagaaaacacaaaagacaccagggcaccagaagacgagaatgcaaaataaggataacggggaaacccagaggcttgacacaagggccgaaaaaaacaagagacagaacatgaaatgcccaaaactgcgccacgacaccaacaaaaagacaacgacagtgtacgccaagagaacggagaaaatcgggccacaccgacagcgaaacaaaagcgagcacctgtcacaacccaacggcggaagagcaagggtcacccaaaacagcgaaaaacagtgggaacaaaggccaacggtggcatcagagaacgaaccccacacccggatcgacagaacaacaacgagcgagagaccgaggcagaaatagatgggtccaaacgcgcacgcgccacacacacacacacaccagcgcgccgcaaaactacagggagcaaacgcaacacgagaagccagcggcaaaaaagcgcacgccagcagcagaaaaatgcagaccggagcgcagacaccaaccatctatgaaaggtagtgaatacaaaaatgcccgcacgaaaacaagaacacc

SEQ ID NO: 39825 - DNA, 627 bp, Homo sapiens
catggtggcattgagaggcggggccttttagcaagtaatgtcatgagggatcctacttcatgaataaattagtgccttatgaaagggctggagggagctagtttaggccctttttgctcttctgctttcctaccatgtaaggacacactattccttcccctccagaggatgcagcaacaaggcaccatcttggaagcagagagcagccctcaccagataccaatcctgctggcaccttcatcttggactcttcagcctccagaaccataataaatacatttctattgtttataaattatgagtttgatggccaggtgaggaggctcacgcctgtaatcccgccctttgggaggctgaggcgggcagatcatctgaggtcgggagttcgagaccagcctgacggagaaaccctgtctctactaaaaatgcaaaattagccgggcatggtggcacatgcctgtaatcccagctacttgggaggctgaggcaggagaatcacttgaacctgggaggcggaggttgtggtgagccaagatcacgccattggcactccagcctgggcaacaagagcgaaactccgtctcaaaaaaaaaaaatatgagtttgagtctatggcattttattata

SEQ ID NO: 39826 - DNA, 1749 bp, Homo sapiens
cgccgagggacgcagagccacccacccccgggctcctacgcgcacgcgtgaaaaaagccaggtggaggggaacgggggagcttcgggcgtagagtgtggggagtgggggatctggtgcaaattagggtgcgtgaaagaagtcacaaaaagcgcagaggccaggcttcccgccctaatccggcctttgtctccgcccctctgcctttgtttcggcccaagcgtcttatggtcagacatcttcagccccagtggtccaagagccaaaggacggggtctgccccaagctgtgcctgcttccggagccgcaataagaacggtcaattgagatgcggctttcaggcatttgtttaggacatgcccatggcggggcttctaaaggggcttgtacggcaactggagcagttcagagttcaacaacaagcttccaagatgccgcccaaaggaaaaagtggttctggaaaagcggggaaagggggagcagcctctgggagtgacagtgctgacaagaaggctcaaggtcccaaaggtggtggcaatgcagtaaaggtcagacacattctatgtgaaaaacatggcaaaatcatggaagccatggaaaagttaaagtctgggatgagattcaatgaagtggccgcacagtatagtgaagataaagccaggcaagggggtgacttgggttggatgaccagagggtccatggtgggaccatttcaagaagcagcatttgccttgcctgtaagtgggatggataagcctgtgtttacagacccaccggttaagacaaaatttggatatcatattattatggtcgaaggaagaaaataaaatcatatgaaagactgaataagttttatacattttgtttctttaaaaggtattacatattcttttgagctggagctgcaaggaaatacaaaaatttttaaaaagaaaagatattggatgctccttgtattctgtgaaagctctaagtatgggtttgtaggtgtaagagagggtggggctaagtgaatgtcaactgtagtaggtattcagtcagtctttctcaaagagaagtcaagcagactccctttaacctgtattctctttcctcccagaactatatctgactctcagtctgtcccataaattaattcagaaaccatcttcaggggaagcagatatcaactcacactattcacacaactgaaaatattgggcatcaaatagattagtgtgtgagaatcataaaataagttcctagacaacatttgttttacatgttagtcaactctgatcttccaggacaggtggtattagctccactgtcttaacatagtacgtggcacgttatgcctttcagtgttaactcctttctttttaaataaatgtttattggaggaaaaaagcactcagttgttccatgagttgttttgtactagactaaccgagtgctggttaaagggagggatgtcagcataaaaatgtcattccctcatcttcagtgtatgggttacattaagactgtcctttccagggccaatgttctgtgcatctaaatttttaaaatttaaaatgccatatttatgacatataaaaaagtataaagattactaatataaatactatactgcttcaaaaataaaactttgccaacacagctatgtgattcttaacagattattttaacacactgccttctctccctcagctgcatttgatattatacccacttatataatgggaactttacctagatacctgactttc

SEQ ID NO: 39827 - DNA, 1898 bp, Homo sapiens
cggacgcgtgggtcgacccacgcgtcgcaaaggaaaaagtggttctggaaaagcggggaaaggtagagcggcagagcgatcaaggagaatgggggcgggtgaggagcgaagggagggaacagacagtccatctccggagtccgggacggacgcagcagggggagcagcctctgggagtgacagtgctgacaagaaggctcaaggtcccaaaggtggtggcaatgcagtaaaggtcagacacattctatgtgaaaaacatggcaaaatcatggaagccatggaaaagttaaagtctgggatgagattcaatgaagtggccgcacagtatagtgaagataaagccaggcaaggggtatgttgctcttattatttataattttctctcaaggtaagaaagcaaagtaaaaatgacaaataataaaataagataaaaattctccatcctccacagaagaaacacagaagtagggatcattcctttgttcaaccattggttgtagcgatattttggtttaaagatctcaaaagcagaaatgtccaacttgtaaatagtagaataagggtcatctatgtcaaaacctatgcatgaccaaacttgcacggctaacttcaaagtccagcagtgttgagagtacttatgtgttcagtctagttagacttcttctacctatttgtccttattgagcctattcctgtattgctcttaggaatatacctcgtaaccttagcaaaatgttgggaaattctctcaagctacagtagaactgttccctcttctgggccacttgatatcacttatcttttgggtttttcagggtgacttgggttggatgaccagagggtccatggtgggaccatttcaagaagcagcatttgccttgcctgtaagtgggatggataagcctgtgtttacagacccaccggttaagacaaaatttggatatcatattattatggtcgaaggaagaaaataaaatcatatgaaagactgaataagttttatacattttgtttctttaaaaggtattacatattcttttgagctggagctgcaaggaaatacaaaaatttttaaaaagaaaagatattggatgctccttgtattctgtgaaagctctaagtatgggtttgtaggtgtaagagagggtggggctaagtgaatgtcaactgtagtaggtattcagtcagtctttctcaaagagaagtcaagcagactccctttaacctgtattctctttcctcccagaactatatctgactctcagtctgtcccataaattaattcagaaaccatcttcaggggaagcagatatcaactcacactattcacacaactgaaaatattgggcatcaaatagattagtgtgtgagaatcataaaataagttcctagacaacatttgttttacatgttagtcaactctgatcttccaggacaggtggtattagctccactgtcttaacatagtacgtggcacgttatgcctttcagtgttaactcctttctttttaaataaatgtttattggaggaaaaaagcactcagttgttccatgagttgttttgtactagactaaccgagtgctggttaaagggagggatgtcagcataaaaatgtcattccctcatcttcagtgtatgggttacattaagactgtcctttccagggccaatgttctgtgcatctaaatttttaaaatttaaaatgccatatttatgacatataaaaaagtataaagattactaatataaatactatactgcttcaaaaataaaactttgccaacacagctatgtgattcttaacagattattttaacacactgccttctctccctcagctgcatttgatattatacccacttatataatgggaactttacctagatacctgactttc

SEQ ID NO: 39828 - DNA, 2160 bp, Homo sapiens
cgccgagggacgcagagccacccacccccgggctcctacgcgcacgcgtgaaaaaagccaggtggaggggaacgggggagcttcgggcgtagagtgtggggagtgggggatctggtgcaaattagggtgcgtgaaagaagtcacaaaaagcgcagaggccaggcttcccgccctaatccggcctttgtctccgcccctctgcctttgtttcggcccaagcgtcttatggtcagacatcttcagccccagtggtccaagagccaaaggacggggtctgccccaagctgtgcctgcttccggagccgcaataagaacggtcaattgagatgcggctttcaggcatttgtttaggacatgcccatggcggggcttctaaaggggcttgtacggcaactggagcagttcagagttcaacaacaagcttccaagatgccgcccaaaggaaaaagtggttctggaaaagcggggaaagggggagcagcctctgggagtgacagtgctgacaagaaggctcaaggtcccaaaggtggtggcaatgcagtaaaggtcagacacattctatgtgaaaaacatggcaaaatcatggaagccatggaaaagttaaagtctgggatgagattcaatgaagtggccgcacagtatagtgaagataaagccaggcaaggggtatgttgctcttattatttataattttctctcaaggtaagaaagcaaagtaaaaatgacaaataataaaataagataaaaattctccatcctccacagaagaaacacagaagtagggatcattcctttgttcaaccattggttgtagcgatattttggtttaaagatctcaaaagcagaaatgtccaacttgtaaatagtagaataagggtcatctattgttgagagtacttatgtgttcagtctagttagacttcttctacctatttgtccttattgagcctattcctgtattgctcttaggaatatacctcgtaaccttagcaaaatgttgggaaattctctcaagctacagtagaactgttccctcttctgggccacttgatatcacttatcttttgggtttttcagggtgacttgggttggatgaccagagggtccatggtgggaccatttcaagaagcagcatttgccttgcctgtaagtgggatggataagcctgtgtttacagacccaccggttaagacaaaatttggatatcatattattatggtcgaaggaagaaaataaaatcatatgaaagactgaataagttttatacattttgtttctttaaaaggtattacatattcttttgagctggagctgcaaggaaatacaaaaatttttaaaaagaaaagatattggatgctccttgtattctgtgaaagctctaagtatgggtttgtaggtgtaagagagggtggggctaagtgaatgtcaactgtagtaggtattcagtcagtctttctcaaagagaagtcaagcagactccctttaacctgtattctctttcctcccagaactatatctgactctcagtctgtcccataaattaattcagaaaccatcttcaggggaagcagatatcaactcacactattcacacaactgaaaatattgggcatcaaatagattagtgtgtgagaatcataaaataagttcctagacaacatttgttttacatgttagtcaactctgatcttccaggacaggtggtattagctccactgtcttaacatagtacgtggcacgttatgcctttcagtgttaactcctttctttttaaataaatgtttattggaggaaaaaagcactcagttgttccatgagttgttttgtactagactaaccgagtgctggttaaagggagggatgtcagcataaaaatgtcattccctcatcttcagtgtatgggttacattaagactgtcctttccagggccaatgttctgtgcatctaaatttttaaaatttaaaatgccatatttatgacatataaaaaagtataaagattactaatataaatactatactgcttcaaaaataaaactttgccaacacagctatgtgattcttaacagattattttaacacactgccttctctccctcagctgcatttgatattatacccacttatataatgggaactttacctagatacctgactttc

SEQ ID NO: 39829 - DNA, 1400 bp, Homo sapiens
ctgtataaccctgaggggggtgggtggccagcttgtatacctgtccctgaactgagctgtttacaggactggggaggctccacccagaaggctttcatttgtactctgctgggagtgactgggaaaaactccttccctgctgctgagtggagagaggcctcatccggctttgacccacaatcgatcacaataccatagtcagacacattctatgtgaaaaacatggcaaaatcatggaagccatggaaaagttaaagtctgggatgagattcaatgaagtggccgcacagtatagtgaagataaagccaggcaagggggtgacttgggttggatgaccagagggtccatggtgggaccatttcaagaagcagcatttgccttgcctgtaagtgggatggataagcctgtgtttacagacccaccggttaagacaaaatttggatatcatattattatggtcgaaggaagaaaataaaatcatatgaaagactgaataagttttatacattttgtttctttaaaaggtattacatattcttttgagctggagctgcaaggaaatacaaaaatttttaaaaagaaaagatattggatgctccttgtattctgtgaaagctctaagtatgggtttgtaggtgtaagagagggtggggctaagtgaatgtcaactgtagtaggtattcagtcagtctttctcaaagagaagtcaagcagactccctttaacctgtattctctttcctcccagaactatatctgactctcagtctgtcccataaattaattcagaaaccatcttcaggggaagcagatatcaactcacactattcacacaactgaaaatattgggcatcaaatagattagtgtgtgagaatcataaaataagttcctagacaacatttgttttacatgttagtcaactctgatcttccaggacaggtggtattagctccactgtcttaacatagtacgtggcacgttatgcctttcagtgttaactcctttctttttaaataaatgtttattggaggaaaaaagcactcagttgttccatgagttgttttgtactagactaaccgagtgctggttaaagggagggatgtcagcataaaaatgtcattccctcatcttcagtgtatgggttacattaagactgtcctttccagggccaatgttctgtgcatctaaatttttaaaatttaaaatgccatatttatgacatataaaaaagtataaagattactaatataaatactatactgcttcaaaaataaaactttgccaacacagctatgtgattcttaacagattattttaacacactgccttctctccctcagctgcatttgatattatacccacttatataatgggaactttacctagatacctgactttc

SEQ ID NO: 39830 - DNA, 1305 bp, Homo sapiens
cgccgagggacgcagagccacccacccccgggctcctacgcgcacgcgtgaaaaaagccaggtggaggggaacgggggagcttcgggcgtagagtgtggggagtgggggatctggtgcaaattagggtgcgtgaaagaagtcacaaaaagcgcagaggccaggcttcccgccctaatccggcctttgtctccgcccctctgcctttgtttcggcccaagcgtcttatggtcagacatcttcagccccagtggtccaagagccaaaggacggggtctgccccaagctgtgcctgcttccggagccgcaataagaacggtcaattgagatgcggctttcaggcatttgtttaggacatgcccatggcggggcttctaaaggggcttgtacggcaactggagcagttcagagttcaacaacaagcttccaagatgccgcccaaaggaaaaagtggttctggaaaagcggggaaagggggagcagcctctgggagtgacagtgctgacaagaaggctcaaggtcccaaaggtggtggcaatgcagtaaaggtcagacacattctatgtgaaaaacatggcaaaatcatggaagccatggaaaagttaaagtctgggatgagattcaatgaagtggccgcacagtatagtgaagataaagccaggcaaggggtatgttgctcttattatttataattttctctcaaggtaagaaagcaaagtaaaaatgacaaataataaaataagataaaaattctccatcctccacagaagaaacacagaagtagggatcattcctttgttcaaccattggttgtagcgatattttggtttaaagatctcaaaagcagaaatgtccaacttgtaaatagtagaataagggtcatctatgtcaaaacctatgcatgaccaaacttgcacggctaacttcaaagtccagcagtgttgagagtacttatgtgttcagtctagttagacttcttctacctatttgtccttattgagcctattcctgtattgctcttaggaatatacctcgtaaccttagcaaaatgttgggaaattctctcaagctacagtagaactgttccctcttctgggccacttgatatcacttatcttttgggtttttcagggtgacttgggttggatgaccagagggtccatggtgggaccatttcaagaagcagcatttgccttgcctgtaagtgggatggataagcctgtgtttacagacccaccggttaagacaaaatttggatatcatattattatggtcgaaggaagaaaataaaatcatatgaaagactg

SEQ ID NO: 39831 - DNA, 1437 bp, Homo sapiens
cgccgagggacgcagagccacccacccccgggctcctacgcgcacgcgtgaaaaaagccaggtggaggggaacgggggagcttcgggcgtagagtgtggggagtgggggatctggtgcaaattagggtgcgtgaaagaagtcacaaaaagcgcagaggccaggcttcccgccctaatccggcctttgtctccgcccctctgcctttgtttcggcccaagcgtcttatggtcagacatcttcagccccagtggtccaagagccaaaggacggggtctgccccaagctgtgcctgcttccggagccgcaataagaacggtcaattgagatgcggctttcaggcatttgtttaggacatgcccatggcggggcttctaaaggggcttgtacggcaactggagcagttcagagttcaacaacaagcttccaagatgccgcccaaaggaaaaagtggttctggaaaagcggggaaagggggagcagcctctgggagtgacagtgctgacaagaaggctcaaggtcccaaaggtggtggcaatgcagtaaaggtcagacacattctatgtgaaaaacatggcaaaatcatggaagccatggaaaagttaaagtctgggatgagattcaatgaagtggccgcacagtatagtgaagataaagccaggcaagggggtgacttgggttggatgaccagagggtccatggtgggaccatttcaagaagcagcatttgccttgcctgtaagtgggatggataagcctgtgtttacagacccaccggttaagacaaaatttggatatcatattattatggtcgaaggaagaaaataaaatcatatgaaagactgctcaaaagaaaacaagaaaaaaaaaagaaaaacaaaacactggtgtgcgcgggcgcgccccgaggcccccggaaaaaagctttttagagaaccacttgcgcggtggggcgcgcgcggggggccccagttgcggtaaagggagacacagtgggccaacaaagcggtgttccccaagagggaaaaccccggggggccaaaggacaaagcggggcgggcggacttcctcccacaagtataaaaacacgcgccgggggggggacccccgggggcggttctgagagcacaaaaaatccccacaaatgggggatgctccagggaggggggccatatacagggggagagctcatatatacacagggggaggggtcccacaagcggagaaagcctcccagatattctcaaaaatttaagccccggcagcgaccgggggggggggcgcccacaccacagtcgttagcacagagcaccgaggtcactccacactgcgataacacgcgcgaccgacacaccacagcagagacgatgctaaacatcagtgagcagaaaacaccgacgaccactcatcgccgtaagcgtgaccgacaaacgaggacac

SEQ ID NO: 39832 - DNA, 1128 bp, Homo sapiens
cgccgagggacgcagagccacccacccccgggctcctacgcgcacgcgtgaaaaaagccaggtggaggggaacgggggagcttcgggcgtagagtgtggggagtgggggatctggtgcaaattagggtgcgtgaaagaagtcacaaaaagcgcagaggccaggcttcccgccctaatccggcctttgtctccgcccctctgcctttgtttcggcccaagcgtcttatggtcagacatcttcagccccagtggtccaagagccaaaggacggggtctgccccaagctgtgcctgcttccggagccgcaataagaacggtcaattgagatgcggctttcaggcatttgtttaggacatgcccatggcggggcttctaaaggggcttgtacggcaactggagcagttcagagttcaacaacaagcttccaagatgccgcccaaaggaaaaagtggttctggaaaagcggggaaagggggagcagcctctgggagtgacagtgctgacaagaaggctcaaggtcccaaaggtggtggcaatgcagtaaaggtcagacacattctatgtgaaaaacatggcaaaatcatggaagccatggaaaagttaaagtctgggatgagattcaatgaagtggccgcacagtatagtgaagataaagccaggcaagggaggatgcagcaacaaggcaccatcttggaagcagagagcagccctcaccagataccaatcctgctggcaccttcatcttggactcttcagcctccagaaccataataaatacatttctattgtttataaattatgagtttgatggccaggtgaggaggctcacgcctgtaatcccgccctttgggaggctgaggcgggcagatcatctgaggtcgggagttcgagaccagcctgacggagaaaccctgtctctactaaaaatgcaaaattagccgggcatggtggcacatgcctgtaatcccagctacttgggaggctgaggcaggagaatcacttgaacctgggaggcggaggttgtggtgagccaagatcacgccattggcactccagcctgggcaacaagagcgaaactccgtctcaaaaaaaaaaaatatgagtttgagtctatggcattttattata

SEQ ID NO: 39833 - DNA, 842 bp, Homo sapiens
cgccgagggacgcagagccacccacccccgggctcctacgcgcacgcgtgaaaaaagccaggtggaggggaacgggggagcttcgggcgtagagtgtggggagtgggggatctggtgcaaattagggtgcgtgaaagaagtcacaaaaagcgcagaggccaggcttcccgccctaatccggcctttgtctccgcccctctgcctttgtttcggcccaagcgtcttatggtcagacatcttcagccccagtggtccaagagccaaaggacggggtctgccccaagctgtgcctgcttccggagccgcaataagaacggtcaattgagatgcggctttcaggcatttgtttaggacatgcccatggcggggcttctaaaggggcttgtacggcaactggagcagttcagagttcaacaacaagcttccaagatgccgcccaaaggaaaaagtggttctggaaaagcggggaaagggggagcagcctctgggagtgacagtgctgacaagaaggctcaaggtcccaaaggtggtggcaatgcagtaaaggtcagacacattctatgtgaaaaacatggcaaaatcatggaagccatggaaaagttaaagtctgggatgagattcaatgaagtggccgcacagtatagtgaagataaagccaggcaagggggtgacttgggttggatgaccagagggtccatggtgggaccatttcaagaagcagcatttgccttgcctgtaagtgggatggataagcctgtgtttacagacccaccggttaagacaaaatttggatatcatattattatggtcgaaggaagaaaataaaatcatatgaaagactg

SEQ ID NO: 39834 - DNA, 2212 bp, Homo sapiens
cgccgagggacgcagagccacccacccccgggctcctacgcgcacgcgtgaaaaaagccaggtggaggggaacgggggagcttcgggcgtagagtgtggggagtgggggatctggtgcaaattagggtgcgtgaaagaagtcacaaaaagcgcagaggccaggcttcccgccctaatccggcctttgtctccgcccctctgcctttgtttcggcccaagcgtcttatggtcagacatcttcagccccagtggtccaagagccaaaggacggggtctgccccaagctgtgcctgcttccggagccgcaataagaacggtcaattgagatgcggctttcaggcatttgtttaggacatgcccatggcggggcttctaaaggggcttgtacggcaactggagcagttcagagttcaacaacaagcttccaagatgccgcccaaaggaaaaagtggttctggaaaagcggggaaagggggagcagcctctgggagtgacagtgctgacaagaaggctcaaggtcccaaaggtggtggcaatgcagtaaaggtcagacacattctatgtgaaaaacatggcaaaatcatggaagccatggaaaagttaaagtctgggatgagattcaatgaagtggccgcacagtatagtgaagataaagccaggcaaggggtatgttgctcttattatttataattttctctcaaggtaagaaagcaaagtaaaaatgacaaataataaaataagataaaaattctccatcctccacagaagaaacacagaagtagggatcattcctttgttcaaccattggttgtagcgatattttggtttaaagatctcaaaagcagaaatgtccaacttgtaaatagtagaataagggtcatctatgtcaaaacctatgcatgaccaaacttgcacggctaacttcaaagtccagcagtgttgagagtacttatgtgttcagtctagttagacttcttctacctatttgtccttattgagcctattcctgtattgctcttaggaatatacctcgtaaccttagcaaaatgttgggaaattctctcaagctacagtagaactgttccctcttctgggccacttgatatcacttatcttttgggtttttcagggtgacttgggttggatgaccagagggtccatggtgggaccatttcaagaagcagcatttgccttgcctgtaagtgggatggataagcctgtgtttacagacccaccggttaagacaaaatttggatatcatattattatggtcgaaggaagaaaataaaatcatatgaaagactgaataagttttatacattttgtttctttaaaaggtattacatattcttttgagctggagctgcaaggaaatacaaaaatttttaaaaagaaaagatattggatgctccttgtattctgtgaaagctctaagtatgggtttgtaggtgtaagagagggtggggctaagtgaatgtcaactgtagtaggtattcagtcagtctttctcaaagagaagtcaagcagactccctttaacctgtattctctttcctcccagaactatatctgactctcagtctgtcccataaattaattcagaaaccatcttcaggggaagcagatatcaactcacactattcacacaactgaaaatattgggcatcaaatagattagtgtgtgagaatcataaaataagttcctagacaacatttgttttacatgttagtcaactctgatcttccaggacaggtggtattagctccactgtcttaacatagtacgtggcacgttatgcctttcagtgttaactcctttctttttaaataaatgtttattggaggaaaaaagcactcagttgttccatgagttgttttgtactagactaaccgagtgctggttaaagggagggatgtcagcataaaaatgtcattccctcatcttcagtgtatgggttacattaagactgtcctttccagggccaatgttctgtgcatctaaatttttaaaatttaaaatgccatatttatgacatataaaaaagtataaagattactaatataaatactatactgcttcaaaaataaaactttgccaacacagctatgtgattcttaacagattattttaacacactgccttctctccctcagctgcatttgatattatacccacttatataatgggaactttacctagatacctgactttc

SEQ ID NO: 39835 - DNA, 2439 bp, Homo sapiens
cgccgagggacgcagagccacccacccccgggctcctacgcgcacgcgtgaaaaaagccaggtggaggggaacgggggagcttcgggcgtagagtgtggggagtgggggatctggtgcaaattagggtgcgtgaaagaagtcacaaaaagcgcagaggccaggcttcccgccctaatccggcctttgtctccgcccctctgcctttgtttcggcccaagcgtcttatggtcagacatcttcagccccagtggtccaagagccaaaggacggggtctgccccaagctgtgcctgcttccggagccgcaataagaacggtcaattgagatgcggctttcaggcatttgtttaggacatgcccatggcggggcttctaaaggggcttgtacggcaactggagcagttcagagttcaacaacaagcttccaagatgccgcccaaaggaaaaagtggttctggaaaagcggggaaagcttgtcaactatcattagtgttagcgtattttgtgtggcccaagataattcttccattgtggcccagggaagctgaaaggttggatacccttgttgtaaagtgtctggccgagttcccttttgaagtgtggcgttatgatggaaatatccactccggttgtgtgttggacctttctgtaaacatggaggtgcagtttaaatgagtacctgtcatctcttctctaaagggggagcagcctctgggagtgacagtgctgacaagaaggctcaaggtcccaaaggtggtggcaatgcagtaaaggtcagacacattctatgtgaaaaacatggcaaaatcatggaagccatggaaaagttaaagtctgggatgagattcaatgaagtggccgcacagtatagtgaagataaagccaggcaaggggtatgttgctcttattatttataattttctctcaaggtaagaaagcaaagtaaaaatgacaaataataaaataagataaaaattctccatcctccacagaagaaacacagaagtagggatcattcctttgttcaaccattggttgtagcgatattttggtttaaagatctcaaaagcagaaatgtccaacttgtaaatagtagaataagggtcatctatgtcaaaacctatgcatgaccaaacttgcacggctaacttcaaagtccagcagtgttgagagtacttatgtgttcagtctagttagacttcttctacctatttgtccttattgagcctattcctgtattgctcttaggaatatacctcgtaaccttagcaaaatgttgggaaattctctcaagctacagtagaactgttccctcttctgggccacttgatatcacttatcttttgggtttttcagggtgacttgggttggatgaccagagggtccatggtgggaccatttcaagaagcagcatttgccttgcctgtaagtgggatggataagcctgtgtttacagacccaccggttaagacaaaatttggatatcatattattatggtcgaaggaagaaaataaaatcatatgaaagactgaataagttttatacattttgtttctttaaaaggtattacatattcttttgagctggagctgcaaggaaatacaaaaatttttaaaaagaaaagatattggatgctccttgtattctgtgaaagctctaagtatgggtttgtaggtgtaagagagggtggggctaagtgaatgtcaactgtagtaggtattcagtcagtctttctcaaagagaagtcaagcagactccctttaacctgtattctctttcctcccagaactatatctgactctcagtctgtcccataaattaattcagaaaccatcttcaggggaagcagatatcaactcacactattcacacaactgaaaatattgggcatcaaatagattagtgtgtgagaatcataaaataagttcctagacaacatttgttttacatgttagtcaactctgatcttccaggacaggtggtattagctccactgtcttaacatagtacgtggcacgttatgcctttcagtgttaactcctttctttttaaataaatgtttattggaggaaaaaagcactcagttgttccatgagttgttttgtactagactaaccgagtgctggttaaagggagggatgtcagcataaaaatgtcattccctcatcttcagtgtatgggttacattaagactgtcctttccagggccaatgttctgtgcatctaaatttttaaaatttaaaatgccatatttatgacatataaaaaagtataaagattactaatataaatactatactgcttcaaaaataaaactttgccaacacagctatgtgattcttaacagattattttaacacactgccttctctccctcagctgcatttgatattatacccacttatataatgggaactttacctagatacctgactttc

SEQ ID NO: 39836 - DNA, 1675 bp, Homo sapiens
cgccgagggacgcagagccacccacccccgggctcctacgcgcacgcgtgaaaaaagccaggtggaggggaacgggggagcttcgggcgtagagtgtggggagtgggggatctggtgcaaattagggtgcgtgaaagaagtcacaaaaagcgcagaggccaggcttcccgccctaatccggcctttgtctccgcccctctgcctttgtttcggcccaagcgtcttatggtcagacatcttcagccccagtggtccaagagccaaaggacggggtctgccccaagctgtgcctgcttccggagccgcaataagaacggtcaattgagatgcggctttcaggcatttgtttaggacatgcccatggcggggcttctaaaggggcttgtacggcaactggagcagttcagagttcaacaacaagcttccaagatgccgcccaaaggaaaaagtggttctggaaaagcggggaaaggtcagacacattctatgtgaaaaacatggcaaaatcatggaagccatggaaaagttaaagtctgggatgagattcaatgaagtggccgcacagtatagtgaagataaagccaggcaagggggtgacttgggttggatgaccagagggtccatggtgggaccatttcaagaagcagcatttgccttgcctgtaagtgggatggataagcctgtgtttacagacccaccggttaagacaaaatttggatatcatattattatggtcgaaggaagaaaataaaatcatatgaaagactgaataagttttatacattttgtttctttaaaaggtattacatattcttttgagctggagctgcaaggaaatacaaaaatttttaaaaagaaaagatattggatgctccttgtattctgtgaaagctctaagtatgggtttgtaggtgtaagagagggtggggctaagtgaatgtcaactgtagtaggtattcagtcagtctttctcaaagagaagtcaagcagactccctttaacctgtattctctttcctcccagaactatatctgactctcagtctgtcccataaattaattcagaaaccatcttcaggggaagcagatatcaactcacactattcacacaactgaaaatattgggcatcaaatagattagtgtgtgagaatcataaaataagttcctagacaacatttgttttacatgttagtcaactctgatcttccaggacaggtggtattagctccactgtcttaacatagtacgtggcacgttatgcctttcagtgttaactcctttctttttaaataaatgtttattggaggaaaaaagcactcagttgttccatgagttgttttgtactagactaaccgagtgctggttaaagggagggatgtcagcataaaaatgtcattccctcatcttcagtgtatgggttacattaagactgtcctttccagggccaatgttctgtgcatctaaatttttaaaatttaaaatgccatatttatgacatataaaaaagtataaagattactaatataaatactatactgcttcaaaaataaaactttgccaacacagctatgtgattcttaacagattattttaacacactgccttctctccctcagctgcatttgatattatacccacttatataatgggaactttacctagatacctgactttc

SEQ ID NO: 39837 - DNA, 1313 bp, Homo sapiens
cgccgagggacgcagagccacccacccccgggctcctacgcgcacgcgtgaaaaaagccaggtggaggggaacgggggagcttcgggcgtagagtgtggggagtgggggatctggtgcaaattagggtgcgtgaaagaagtcacaaaaagcgcagaggccaggcttcccgccctaatccggcctttgtctccgcccctctgcctttgtttcggcccaagcgtcttatggtcagacatcttcagccccagtggtccaagagccaaaggacggggtctgccccaagctgtgcctgcttccggagccgcaataagaacggtcaattgagatgcggctttcaggcatttgtttaggacatgcccatggcggggcttctaaaggggcttgtacggcaactggagcagttcagagttcaacaacaagcttccaagatgccgcccaaaggaaaaagtggttctggaaaagcggggaaagcttgtcaactatcattagtgttagcgtattttgtgtggcccaagataattcttccattgtggcccagggaagctgaaaggttggatacccttgttgtaaagtgtctggccgagttcccttttgaagtgtggcgttatgatggaaatatccactccggttgtgtgttggacctttctgtaaacatggaggtgcagtttaaatgagtacctgtcatctcttctctaaagggggagcagcctctgggagtgacagtgctgacaagaaggctcaaggtcccaaaggtggtggcaatgcagtaaaggtcagacacattctatgtgaaaaacatggcaaaatcatggaagccatggaaaagttaaagtctgggatgagattcaatgaagtggccgcacagtatagtgaagataaagccaggcaagggattcccagcctgcagcaacatgctggtcaccatagagacctgagaagcaccctcatctcattggtatcatatttacaaaccaccccttaaagtggattattttgcagatggctgatctcatctattcaatgttgattctattagttccaatttcagaaggtgacattttctgactttgtccccttaagcacaaacaaaaactatggatttttgtttttgttttcagaaaagagaaagtacaaggtgtgcttggggaacagcaaggaaaccagacagatgtgggggcgggtttgtaggggaactgctggatgtacctcattaatttgttcatttgttcagcacccacagggtgccagtgaacgggctaggtgctggggatagagtggtgaacaagatgagccttatgcacctcacagtctc

SEQ ID NO: 39838 - DNA, 996 bp, Homo sapiens
gctctgctctcccaggcactactgagcgcgctcgcggtcgccaggagcggattgggcccccgccgcgcgcaagccttggtgacaggggatggcgcggagctgcctctccgggaaagttggatctgtgcgcccagacatggaaaagggattaggacaccggcagatcttgccctcacagagcggaggtgggggccttggaagggcacaccgcccgtaggcgcgaaatccaagaagaaaatgacactcatcagccagcctcgcgcggggagaaagggcggggtgggggtagtggcaccctgcccgtcctctcccacccccacagtccgggcccacagtccaggagtcacaagggatgtgaatccccaggcataatgtgaacccccaacaaacccaaggcctcagaatgcgcctcacctctccctccccaccagcagaaacatcctcccactctcccaacccctgctccagccacgccaaccctttaaccttgtcccagaatgtctaaactgtatctgcctctgtgcctgtgcacatgaagttgccttggcccggcgtttgctccacagccttctgccaaactcctactgcttgatggctggaagccttcgcaccctggcgctctcctcccaggtcagcagtcactggccttcctgtgcatccagcccagctttgaacagtcctgggccccaacccttatctttttccgagtaattacatggttgcatgattggcttcaccgcctctggatcagatgagcgctactaatgaaggatacaagttgtaaaactaggttttatgtgaactccagtcatcacagtttaggtgcggctagcgattttacagatgcggggttagtaactggcccaaatccagggcttccgggatgctgttttccttttttgtttcttagcagggatggcagatgtttgtagaacagatccgtgtaaaagtcagtatcctaagagattaaattgtaaagcaggacaagatagttaa

SEQ ID NO: 39839 - DNA, 984 bp, Homo sapiens
gctctgctctcccaggcactactgagcgcgctcgcggtcgccaggagcggattgggcccccgccgcgcgcaagccttggtgacaggggatggcgcggagctgcctctccgggaaagttggatctgtgcgcccagacatggaaaagggattaggacaccggcagatcttgccctcacagagcggaggtgggggccttggaagggcacaccgcccgtaggcgcgaaatccaagaagaaaatgacactcatcagccagcctcgcgcggggagaaagggcggggtgggggtagtggcaccctgcccgtcctctcccacccccacaagtccaggagtcacaagggatgtgaatccccaggcataatgtgaacccccaacaaacccaaggcctcagaatgcgcctcacctctccctccccaccagcagaaacatcctcccactctcccaacccctgctccagccacgccaaccctttaaccttgtcccagaatgtctaaactgtatctgcctctgtgcctgtgcacatgaagttgccttggcccggcgtttgctccacagccttctgccaaactcctactgcttgatggctggaagccttcgcaccctggcgctctcctcccaggtcagcagtcactggccttcctgtgcatccagcccagctttgaacagtcctgggccccaacccttatctttttccgagtaattacatggttgcatgattggcttcaccgcctctggatcagatgagcgctactaatgaaggatacaagttgtaaaactaggttttatgtgaactccagtcatcacagtttaggtgcggctagcgattttacagatgcggggttagtaactggcccaaatccagggcttccgggatgctgttttccttttttgtttcttagcagggatggcagatgtttgtagaacagatccgtgtaaaagtcagtatcctaagagattaaattgtaaagcaggacaagatagttaa

SEQ ID NO: 39840 - DNA, 470 bp, Homo sapiens
gtgacatcccacaggtgtttcagtgccacaaatttaaaccaccattggttaactgcatgagttctgtgctgagactgtttgaatcttggctgctctgcttaccagctgtgtgaccttgtcctcattttcctcagacttaaaatgggatcacaataatgcctacctcacataagtctgttggacagagtacataagacaacatatgtgaagagcctgacacatattatgttatgtacccactaaatgttatctgttacctacctcacctaaacctgttgtttatcttgtatctgtggatagcatcaccttcacccagacacttaagttggagagttcactataatctttaacaacacattttacctcaagccttaccctgtaccccatccaatcaattatgaactataaattctgtttctttaatagttcagaaatctttactacctaaagtctgatctccaggccaggtg

SEQ ID NO: 39841 - DNA, 413 bp, Homo sapiens
caggttcaagagatgtcatatctgacactacacttgtccatttccttagggacttcaatttagaagcacaaaaaaaggaaaagtacagatagagaaataaccattagtggtaataaggagtacaacttcatattttgatctttaactgctgacagcttttaagcctcactcctctctttctcttctccctgtgtgtgcccatcttaggcaccattgggagatttaagccccacaagccgttacctatccctcaaccccatatctatccacattaaaaaatccaagccagtctcctttctctgatccctcaagcaacttatggagcagcctgggagacctgacattttctttctggaaattctcattaagtaatacacctttgatatcaccttgtgtgtgtcatattcaatctc

SEQ ID NO: 39842 - DNA, 172 bp, Homo sapiens
tttttttagagcagttttaggttcaccgcaaaattgagaggaagatacagagatttcccatctactccatgccttcatacattatctactcctgtattatctactttctctttagttagcagatcaaaagaaataaagatcaagatggtgaaaattattgctttaaatgttg

SEQ ID NO: 39843 - DNA, 330 bp, Homo sapiens
cacacactctgtgttctagcccaacagaattaggcctatttactctgcacagcctgctcttttcaatctctgtggtacctttccctcacaatatatcctccaccctgagttctctttttgactatgactaggattcagtggcacctccatgaagtcttattggatgtgtccatatggaaatgcctctcttagcattccagggtcataattaagctacacttctggtgaagtgctgtggctcactcctataaacccagcactttgggaggccaaggcaggaggattgcttgaggccaggagttcaagaccagcctgggcaaaatagcaaga

SEQ ID NO: 39844 - DNA, 185 bp, Homo sapiens
ttaaatggactatattaaaattaaaaaactctgttcacaagagaaaaataccatcaggagggtaaaataagaccttgtaatgagattttaaaaaactttccaaaacacctcatacccagaatctacaaagtatacttacaatcaattatatttatatatttttaaaagacaccaaaaaaaaaaaa

SEQ ID NO: 39845 - DNA, 1144 bp, Homo sapiens
gcaaccacgggctcccaggcagcctccgccagccggaccccgtcgccctcctgatgctgctcgtggacgctgatcagccggagcccatgcgcagcggggcgcgcgagctcgcgctcttcctgacccccgagcctggggccgaggcgaaggaggtggaggagaccatcgagggcatgctcctcaggctggaagagttttgcagcctggctgacctgatcaggagtgatacttcacagatcctggaggaaaacatcccagtccttaaggccaaactgacagaaatgcgtggcatctatgccaaagtggaccggctagaggccttcgtcaagatggttggacaccacgtcgccttcctggaagcagacgtgcttcaggctgagcgggaccatggggccttccctcaggccctgcggaggtggctgggatccgcagggctcccctccttcaggaacaagtcacctgcaccggtgcccgtgacgtacgagctgcccacactgtataggacggaggactattttcctgtggacgccggggaagcacagcaccacccccgcacctgccctcggcctttgtgagctttgtggtcttcccatcaggaacgctggaaagtgacattgtgtacacactgcagcttgggggttttttctttgtattgctgtttattttatattttaaaaatatttaaaaaaatgtcgagatggggtctcactatgttgtccagactgatctcaaactcctgggctcaagtgatccacccaccttggccttccaaagtggtgggattatgggcaggagcctccgtgcccaggctgctgccattttcaaatttcctccctgcctcatgtgagaccacagggtttggagaagcagttggaacccacgtgtggtgatgcctcccacatcggcctgcttggggttctacaggggttgagggaccaggcctggccggggctgatggacagtggggactttccttctctccatgatggctttgcaggggctccatggtccttctctctgtgatgggtttttgcacggggtgtgctctgccactgtggtgggtgggtggatgctgcttctgttgcctccagacctcggtgcccacagccttgaggatccttccaataaaggtgtcaagagctca

SEQ ID NO: 39846 - DNA, 982 bp, Homo sapiens
tcgaatcgtaaccgttcgtacgagaatcgctgtcctctccttgcggccgccagtgtggtggaattcgcggggcgcgcgagctcgcgctcttcctgacccccgagcctggggccgaggcgaaggaggtggaggagaccatcgagggcatgctcctcaggctggaagagttttgcagcctggctgacctgatcaggagtgatacttcacagatcctggaggaaaacatcccagtccttaaggccaaactgacagaaatgcgtggcatctatgccaaagtggaccggctagagaagtcacctgcaccggtgcccgtgacgtacgagctgcccacactgtataggacggaggactattttcctgtggacgccggggaagcacagcaccacccccgcacctgccctcggcctttgtgagctttgtggtcttcccatcaggaacgctggaaagtgacattgtgtacacactgcagcttgggggttttttctttgtattgctgtttattttatattttaaaaatatttaaaaaaatgtcgagatggggtctcactatgttgtccagactgatctcaaactcctgggctcaagtgatccacccaccttggccttccaaagtggtgggattatgggcaggagcctccgtgcccaggctgctgccattttcaaatttcctccctgcctcatgtgagaccacagggtttggagaagcagttggaacccacgtgtggtgatgcctcccacatcggcctgcttggggttctacaggggttgagggaccaggcctggccggggctgatggacagtggggactttccttctctccatgatggctttgcaggggctccatggtccttctctctgtgatgggtttttgcacggggtgtgctctgccactgtggtgggtgggtggatgctgcttctgttgcctccagacctcggtgcccacagccttgaggatccttccaataaaggtgtcaagagctca

SEQ ID NO: 39847 - DNA, 870 bp, Homo sapiens
tcgaatcgtaaccgttcgtacgagaatcgctgtcctctccttgcggccgccagtgtggtggaattcgcggggcgcgcgagctcgcgctcttcctgacccccgagcctggggccgaggcgaaggaggtggaggagaccatcgagggcatgctcctcaggctggaagagttttgcagcctggctgacctgatcaggagtgatacttcacagatcctggaggaaaacatcccagtccttaaggccaaactgacagaaatgcgtggcatctatgccaaagtggaccggctagaggccttcgtcaagatggttggacaccacgtcgccttcctggaagcagacgtgcttcaggctgagcgggaccatggggccttccctcaggccctgcggaggtggctgggatccgcagggctcccctccttcaggaacaagtcacctgcaccggtgcccgtgacgtacgagctgcccacactgtataggacggaggactattttcctgtggacgccggggaagcacagcaccacccccgcacctgccctcggcctttgtgagctttgtggtcttcccatcaggaacgctggaaagtgacattgtgtacacactgcagcttgggggttttttctttgtattgctgtttattttatattttaaaaatatttaaaaaaatgtcgagatggggtctcactatgttgtccagagtttgagatcagcctgggcaacatggcaagaacctgtcccaaattttaatataatacaacttttcactaacgctttttcacataaacttacgtcaaaatataccggagggccggtccggggaatttactgagcaaccttttttcctacaagaagttttatccgaaaaattctccg

SEQ ID NO: 39848 - DNA, 506 bp, Homo sapiens
tcgaatcgtaaccgttcgtacgagaatcgctgtcctctccttgcggccgccagtgtggtggaattcgcggggcgcgcgagctcgcgctcttcctgacccccgagcctggggccgaggcgaaggaggtggaggagaccatcgagggcatgctcctcaggctggaagagttttgcagcctggctgacctgatcaggagtgatacttcacagatcctggaggaaaacatcccagtccttaaggccaaactgacagaaatgcgtggcatctatgccaaagtggaccggctagaggccttcgtcaagatggttggacaccacgtcgccttcctggaagcagacgtgcttcaggctgagcgggaccatggggccttccctcaggccctgcggaggtggctgggatccgcagggctcccctccttcaggaacaagtcacctgcaccggtgcccgtgacgtacgagctgcccacaagccttgaggatccttccaataaaggtgtcaagagctca

SEQ ID NO: 39849 - DNA, 1241 bp, Homo sapiens
gcaaccacgggctcccaggcagcctccgccagccggaccccgtcgccctcctgatgctgctcgtggacgctgatcagccggagcccatgcgcagcggggcgcgcgagctcgcgctcttcctgacccccgagcctggggccgaggcgaaggaggtggaggagaccatcgagggcatgctcctcaggctggaagagttttgcagcctggctgacctgatcaggagtgatacttcacagatcctggaggaaaacatcccagtccttaaggccaaactgacagaaatgcgtggcatctatgccaaagtggaccggctagaggccttcgtcaagatggttggacaccacgtcgccttcctggaagcagacgtgcttcaggctgagcgggaccatggggccttccctcaggccctgcggaggtggctgggatccgcagggctcccctccttcaggaacgtggagtgcagtggcacaatcccagctcgctgcaacctccgcctcccgggttcaagtgattctcctgcctccgcctcccaagtagctgggattacagaagtcacctgcaccggtgcccgtgacgtacgagctgcccacactgtataggacggaggactattttcctgtggacgccggggaagcacagcaccacccccgcacctgccctcggcctttgtgagctttgtggtcttcccatcaggaacgctggaaagtgacattgtgtacacactgcagcttgggggttttttctttgtattgctgtttattttatattttaaaaatatttaaaaaaatgtcgagatggggtctcactatgttgtccagactgatctcaaactcctgggctcaagtgatccacccaccttggccttccaaagtggtgggattatgggcaggagcctccgtgcccaggctgctgccattttcaaatttcctccctgcctcatgtgagaccacagggtttggagaagcagttggaacccacgtgtggtgatgcctcccacatcggcctgcttggggttctacaggggttgagggaccaggcctggccggggctgatggacagtggggactttccttctctccatgatggctttgcaggggctccatggtccttctctctgtgatgggtttttgcacggggtgtgctctgccactgtggtgggtgggtggatgctgcttctgttgcctccagacctcggtgcccacagccttgaggatccttccaataaaggtgtcaagagctca

SEQ ID NO: 39850 - DNA, 1117 bp, Homo sapiens
tcgaatcgtaaccgttcgtacgagaatcgctgtcctctccttgcggccgccagtgtggtggaattcgcggggcgcgcgagctcgcgctcttcctgacccccgagcctggggccgaggcgaaggaggtggaggagaccatcgagggcatgctcctcaggctggaagagttttgcagcctggctgacctgatcaggagtgatacttcacagatcctggaggaaaacatcccagtccttaaggccaaactgacagaaatgcgtggcatctatgccaaagtggaccggctagaggccttcgtcaagatggttggacaccacgtcgccttcctggaagcagacgtgcttcaggctgagcgggaccatggggccttccctcaggccctgcggaggtggctgggatccgcagggctcccctccttcaggaacaagtcacctgcaccggtgcccgtgacgtacgagctgcccacactgtataggacggaggactattttcctgtggacgccggggaagcacagcaccacccccgcacctgccctcggcctttgtgagctttgtggtcttcccatcaggaacgctggaaagtgacattgtgtacacactgcagcttgggggttttttctttgtattgctgtttattttatattttaaaaatatttaaaaaaatgtcgagatggggtctcactatgttgtccagactgatctcaaactcctgggctcaagtgatccacccaccttggccttccaaagtggtgggattatgggcaggagcctccgtgcccaggctgctgccattttcaaatttcctccctgcctcatgtgagaccacagggtttggagaagcagttggaacccacgtgtggtgatgcctcccacatcggcctgcttggggttctacaggggttgagggaccaggcctggccggggctgatggacagtggggactttccttctctccatgatggctttgcaggggctccatggtccttctctctgtgatgggtttttgcacggggtgtgctctgccactgtggtgggtgggtggatgctgcttctgttgcctccagacctcggtgcccacagccttgaggatccttccaataaaggtgtcaagagctca

SEQ ID NO: 39851 - DNA, 425 bp, Homo sapiens
attaaaaaaaaaaaaaaaaaagtctgaaagaaaagatctggaggcacattagcaggttttgccccacattttgagaaattggtatggttctgtgttaacagcaaggggtggggctggtccacttttcaacctacccttcacctcttagagctttgtgggatgtgatttgagactgcagtatgaatgcttaagaataaagacaatataggctgggcgcggtggctgatgcctgtaattccagcactttgggaagccgaggtgggcgggtcatgaggtcaggagttcgagacaagcctgcccagcatggtgagaccccgtctctactaaaaatacgaaaaaagtactggctgggcatggtggcttgtgcttgtcgtcccagctacttgagagcctgaggcaggagaattgtttgaacctggcaggtg

SEQ ID NO: 39852 - DNA, 372 bp, Homo sapiens
attagtgaaagttgcgacactgaaaacctcaaaaaatactctgccccatataaggaatgaggaaactggcaaagaatcagaagcaactctttcagaactctggaaattagccaaaagtttatagcaattgggtatggtttattaaagaaaaatgactgaatcttgataagaatagcaagctgttattttaacttgccctatacctatcctctcatctccagcacagcagaagccttgaaaaccagcaggcttatagccagtggtgggggcagtaaggggttggagctccttcaaaaacttactatcagacagttgtcattatttgacttctcaggtggttccctggaagaccctacttacaaggctgtttta

SEQ ID NO: 39853 - DNA, 493 bp, Homo sapiens
ttcactaattcattcttgttctagcgaaaaatatttaataacatactataagtaaatttctaatttgactaaatataataattggaataaagcatggcataaacaaatatgaacacccagatatagattgacaggtttctcattacagtgaactattagggactgctattaactaaaactttgactttcttttttattttgaagaaaagctttaccttttcacctgttcagagctcatggctgcttctgcagctgctggctctgggagtttgtaataaggaagatattaattgccttcttaacatctgtttttcaaatgctgccctatatgctagggacagacttaaaaaacagttgtttaagcatgcacttattaatatttaaacatttggctccatatactccttaactcctctaaggaagaagcatattgttgtgctggcaaccctccatgtaactccaaataatgaaatgttctattctcaaaaaaaaa

SEQ ID NO: 39854 - DNA, 596 bp, Homo sapiens
cctctcccactcgctctcttgcacgctctctctccttcccaatgcagggaactcaagctgaacttgatccctttgcagttcaaaggtgagcaaaccaggctcggagcacaggcgacgttagccggcgaaagcgcacggccgggcgtccccaacggcaattaacaaagatgcccaattctgtctggatttccgaagaaaagccaaaggctttcgggcgggggtggagggggaggtggagtcagagacagctgccaagtagcttaaaaaaaaaaatccagtttgccaaggggagaaaaagtgtcagtcggttgtggcctcggaagtgccctggcacggctggtgaattccgcagttgtctcgtcccttttcgcgtctgggagagtctggtgcgggcgctcccgccgcccctcgggctgcagcggctcggagacactgaaccgctagtgggaatctcccgttcgctacccgcgagcaggaaacccgcaagttgcccaaagtggtggttgctgctgggtgctcgctcgctcacggatcaggcttgtccctgacgctgctgctgcagcggcggcggcagtagcagccgagccgccgaaact

SEQ ID NO: 39855 - DNA, 1359 bp, Homo sapiens
  misc_feature (1359)..(1359): n is a, c, g, or t
ggattggtgtgaggaggggccagagcccgcgggcgtcccgggccgaggcgcgggagaggcggtggacaccgagaagcccgccggcggcttgcaattccctcacccggcgcgcgcctttcgcagagggaaggagcaagagggcccctacctcatcgtgcgcgggtggggtcggcgcttgtcgcgtgtggcgcgcagtggggcgggcggcgggaggggggtggcagtggagggagcgagaggtgcaggggtgactttgttggcagcaggactagctggagagctagacctggaagcgcatccggggaggacttgcggggcagaggagggcgtgggcgtgtctggtatgggatgcagtggaaaggagggggccctcctgagtagatctgtgggtgattccttcgaggacgcctcgtcttcccgtctgcccttttatttgtcagcgagggagtccccatggtctctgttcaagttctggaaactttctctttgggtgggcttaatcacctgctactaaatcgtagaactgcccagggccctttctaatattggtcacaaacgtgaggagtatgtcagaaaacagaaaaccgctgctgggctttgtaagcaaactcactagtgggactgcacttgggaactcaggcaagactcactgccccctgtgcttggggcttttcaaagcccccaggctcttgccttgtttgcatacagtttgcaccacgtgtctggagcagctggagcccttctcagtagtggacatccgagggggagactctgacacaagctctgaggggtcaatattccaggaactcaagccacgaagtctgcagtcgcagatcggcatcctttgtcctgtatgtgatgctcaggtggacctgcccatgggtggagtgaaggctttaaccatagaccacctggccgtgaatgatgtgatgctggagagcctacgtggggaaggccagggcctggtgtgtgacctgtgcaacgacagggaagtagagaagaggtgtcagacctgcaaagccaacctctgccacttctgctgccaggctcataggcggcagaagaaaacgacttaccacaccatggtggacctaaaagacttgaaaggctacagccggattgggaagcccatcctgtgtcctgttcaccctgcagaggaactgaggctgttctgtgagttctgtgaccggcccgtgtgccaggattgtgtggtgggggagcatcgggaacacccctgtgacttcaccagcaatgtcatccacaaagcgccggctcgttgggtcaatagtacttgccgcagtactcttaaaactaggcggctatggtataatacgcctcacactcattctcacccctggn

SEQ ID NO: 39856 - DNA, 2432 bp, Homo sapiens
ggattggtgtgaggaggggccagagcccgcgggcgtcccgggccgaggcgcgggagaggcggtggacaccgagaagcccgccggcggcttgcaattccctcacccggcgcgcgcctttcgcagagggaaggagcaagagggcccctacctcatcgtgcgcgggtggggtcggcgcttgtcgcgtgtggcgcgcagtggggcgggcggcgggaggggggtggcagtggagggagcgagaggtgcaggggtgactttgttggcagcaggactagctggagagctagacctggaagcgcatccggggaggacttgcggggcagaggagggcgtgggcgtgtctggtatgggatgcagtggaaaggagggggccctcctgagtagatctgtgggtgattccttcgaggacgcctcgtcttcccgtctgcccttttatttgtcagcgagggagtccccatggtctctgttcaagttctggaaactttctctttgggtgggcttaatcacctgctactaaatcgtagaactgcccagggccctttctaatattggtcacaaacgtgaggagtatgtcagaaaacagaaaaccgctgctgggctttgtaagcaaactcactagtgggactgcacttgggaactcaggcaagactcactgccccctgtgcttggggcttttcaaagcccccaggctcttgccttgtttgcatacagtttgcaccacgtgtctggagcagctggagcccttctcagtagtggacatccgagggggagactctgacacaagctctgaggggtcaatattccaggaactcaagccacgaagtctgcagtcgcagatcggcatcctttgtcctgtatgtgatgctcaggtggacctgcccatgggtggagtgaaggctttaaccatagaccacctggccgtgaatgatgtgatgctggagagcctacgtggggaaggccagggcctggtgtgtgacctgtgcaacgacagggaagtagagaagaggtgtcagacctgcaaagccaacctctgccacttctgctgccaggctcataggcggcagaagaaaacgacttaccacaccatggtggacctaaaagacttgaaaggctacagccggattgggaagcccatcctgtgtcctgttcaccctgcagaggaactgaggctgttctgtgagttctgtgaccggcccgtgtgccaggattgtgtggtgggggagcatcgggaacacccctgtgacttcaccagcaatgtcatccacaagcatggggactctgtgtgggagctcctcaaaggtactcagccccacgtggaggccctggaggaagccctggctcagatccacataataaacagtgccctccagaagcgagtggaggcagtggcagctgatgtccggacattctcggagggctacattaaggccattgaggagcatcgggacaagctgctgaagcagctggaagacatacgggcccagaaggaaaattccctgcagctgcagaaggcccagctggaacagttactggcagacatgcggactggagtggagttcaccgagcacttgctgaccagcggctcagacttggagatcctcatcaccaagagggtggtggtagaacggctcaggaagctgaacaaagttcaatatagcacccgtcctggagtaaatgataagatacgcttctgtcctcaggagaaagcaggccagtgccgtggctatgaaatttatggtacgattaataccaaagaggttgatccagccaaatgtgtcctacaaggagaagacctccacagagcccgggagaaacagacggcctctttcaccctgctttgtaaggatgccgcaggagaaatcatgggcaggggaggagacaacgttcaagttgccgttgtccctaaagataagaaagacagcccagtcagaacaatggtccaggataacaaggatgggacatactacatttcctacacccccaaggaacctggcgtctatactgtgtgggtctgcatcaaagaacagcatgtgcagggctcgccattcactgtgacggtgaggagaaagcaccgcccacactcaggcgtgtttcactgctgcaccttctgctccagcgggggccagaaaaccgctcgctgcgcctgtggaggcaccatgccaggtgggtacctaggctgtggccatggacacaaaggccacccaggtcatccccactggtcatgctgtggaaaatttaatgagaaatctgaatgcacatggacaggtgggcagagcgcaccgaggagtctacttaggactgtggctctctgatgggtttgtgctcagccttttaaagctgcaggcagcaccacttgagatttccagaggacccagaccttcgttcattctaaagagactgatagaattaaaaacaaagtgccttatcttgcactg

SEQ ID NO: 39857 - DNA, 1745 bp, Homo sapiens
ggattggtgtgaggaggggccagagcccgcgggcgtcccgggccgaggcgcgggagaggcggtggacaccgagaagcccgccggcggcttgcaattccctcacccggcgcgcgcctttcgcagagggaaggagcaagagggcccctacctcatcgtgcgcgggtggggtcggcgcttgtcgcgtgtggcgcgcagtggggcgggcggcgggaggggggtggcagtggagggagcgagaggtgcaggggtgactttgttggcagcaggactagctggagagctagacctggaagcgcatccggggaggacttgcggggcagaggagggcgtgggcgtgtctggtatgggatgcagtggaaaggagggggccctcctgagtagatctgtgggtgattccttcgaggacgcctcgtcttcccgtctgcccttttatttgtcagcgagggagtccccatggtctctgttcaagttctggaaactttctctttgggtgggcttaatcacctgctactaaatcgtagaactgcccagggccctttctaatattggtcacaaacgtgaggagtatgtcagaaaacagaaaaccgctgctgggctttgtaagcaaactcactagtgggactgcacttgggaactcaggcaagactcactgccccctgtgcttggggcttttcaaagcccccaggctcttgccttgtttgcatacagtttgcaccacgtgtctggagcagctggagcccttctcagtagtggacatccgagggggagactctgacacaagctctgaggggtcaatattccaggaactcaagccacgaagtctgcagtcgcagatcggcatcctttgtcctgtatgtgatgctcaggtggacctgcccatgggtggagtgaaggctttaaccatagaccacctggccgtgaatgatgtgatgctggagagcctacgtggggaaggccagggcctggtgtgtgacctgtgcaacgacagggaagtagagaagaggtgtcagacctgcaaagccaacctctgccacttctgctgccaggctcataggcggcagaagaaaacgacttaccacaccatggtggacctaaaagacttgaaaggctacagccggattgggaagcccatcctgtgtcctgttcaccctgcagaggaactgaggctgttctgtgagttctgtgaccggcccgtgtgccaggattgtgtggtgggggagcatcgggaacacccctgtgacttcaccagcaatgtcatccacaagcatggggactctgtgtgggagctcctcaaaggtactcagccccacgtggaggccctggaggaagccctggctcagatccacggctcgccattcactgtgacggtgaggagaaagcaccgcccacactcaggcgtgtttcactgctgcaccttctgctccagcgggggccagaaaaccgctcgctgcgcctgtggaggcaccatgccaggtgggtacctaggctgtggccatggacacaaaggccacccaggtcatccccactggtcatgctgtggaaaatttaatgagaaatctgaatgcacatggacaggtgggcagagcgcaccgaggagtctacttaggactgtggctctctgatgggtttgtgctcagccttttaaagctgcaggcagcaccacttgagatttccagaggacccagaccttcgttcattctaaagagactgatagaattaaaaacaaagtgccttatcttgcactg

SEQ ID NO: 39858 - DNA, 727 bp, Homo sapiens
ccactcttctgtgattctggctgagcaagttcatgccggtagaggctcattaagtgaggtcctgggcaccccccaaacaggaagtgttttcaggcccttacatgcttatccttaaggtgagtaggtatctcagcagcacacccgaacagtaaaggtgatcaataatgaaactgtagttttcagattgaagaatgaacctggatcaccaaactagataccgaaagggctcctcatttgtctcttttgtcccattgtgggcatatggtgggctccttgagaggagggagtctcagctggggcctggctgcagagacctgctcttgaatagggctgcctttgggatcagggagccgagcatactgggcaaggctcatcatgttcctttgtggaagtggttacttggtgggggtggggtggggaaggggggtcataggaagccgaagctgagtgcgcactagagctgctagcaggcaggccagagggtcagcttgtgttttattttctgatttctcctgcatgctttctggagatgaggattttttgtcaggtagctaggagagcactgccaccttgtgtccatatagcacaatgtttctctttcctattcacagacaagattcaagaaaccatttttacgtgtgtacattcaaatcttcatgaatggcatcacttgctttagacccattttttttttattggtcagaaataaaatgtgactgcaactgtg

SEQ ID NO: 39859 - DNA, 287 bp, Homo sapiens
atcaagtgctcctacaaaaaaaaactcatctgactaaatcactgactttgctgttttttttttctaactttttcattttcaatcttcacagcaaatgtattttttgtttcagggcctggaagaggtattttttcctcagaaagaagctaacattaatgtgtgttgggcactgtctgatgccttggctctaactccaagtaagctgccctggtcttctaagtactctacagagtgcaaaggcttaccaaatccaaaccaccttgaattaaacaaatcttaatgaggag

SEQ ID NO: 39860 - DNA, 433 bp, Homo sapiens
  misc_feature (404)..(404): n is a, c, g, or t
gatctcgactcactgcagcctccacctcccgggttcaagcgattctcctgcctcagcctctcgagtagctgggattacagtcatgtgccaccacacccagctaattttgtatttttagtagagacagggtttctccatgttggtcgagggtgttctcaaactcccaacctcaggtgatccacctgcctcggcttcccaaagtgctgggattataggggtgagccaccacacctggccccaggtgatccttctagtggccgatacctagagtaggactggaggcacatccacattaggagaaaggctgtgcttttgaaagtgaagaagttgtgaggtgatgatggtatgatcagaggaaaaagaaaaacgaggggattcttgggtacttcgcagagtgctggcancggttccctactgcatttcatgtcgacgc

SEQ ID NO: 39861 - DNA, 412 bp, Homo sapiens
gggagacatgttccattttggtctgtgggatctgcatttcttccttatagttatggctcatagagatgactgctctttcaaaggtggttgtggtctattagagcgtttccaatgtccccatacttctttctcgagtgctagtcaaaagcgacttgcagatggtatggaatgtctttgtgagatagaaagaacacagactaggatcagaaaaatctgcctcccaaccctccatggccatcttctggctgtgtgactttaccgccctaactctttaaaatagccccacacctacctgccaggattgtcttcagaattacataaaataacacataccaaagtctctaggaataggagcatgttcacataataggactcaacaagggtcagcatctcttctttctttttgggatga

SEQ ID NO: 39862 - DNA, 900 bp, Homo sapiens
cagattgagaacctctcttcccatttggcgtgctttcttctgattgatccccacccttcacctattttacacatatcctttcctaattgtttttttacactgttgtacctacctttgagtggtgctgttgttttagccttttttgcatactcacaaaccaatcagcatgcacgccttcattctgagcccataaaagctgtggactcagccgcactgagagagagaccacctgactttgagtgagggaccacccttgcatcctctctctcctgagagctgtttcatagttcaaataaaactcttctccaccctcctcaccctttgattgtcagcgtaacctcattcttggacgctgaagaaaaattcgggacccaccaaacgcagatacaaagaaggctgtacacactgtggccctttgccctctgctggtggagggcaaccgtcccacacaacgcgatgggaagcagcagtggggcagagccagtcctgaagccacgggcctgagtggggcaatgggactgatagagctgttaacatgccactgtccgttggcctgcagacggcagaactaaaagagtgcttagcatactgtaacacctctggggcttcagggtcatgagcacccctgtttgggtgccaccacatttccctcaatgtgacacacctggtccagccacaagccccgcacagagcccactcctgccctgtactcgttcactcacacaccccctcctgccaggggctgaggccatggtggctgcaggattcgtgcctgagcacaagccagacacatcctggtgggccgagtagttggggtgttgctggccggaggtctccagctgtcaaagtggccaagaaaaatcctgcatcaactgtacaaatgtaccctaatttatttaa

SEQ ID NO: 39863 - DNA, 616 bp, Homo sapiens
atattcggaacgagtgattttctataaccttcatacaaagaggagacatgggatcttacccttttctctaatcccagctaaaactgacagtatcctttctattggctgatgtgtggcatgagagtcgttattgcaactgttagttggaccaagatatatgtcacagtcttacctgtgggtagggagcaaacaggagagtcacatcacctgtattctgggccaggaatatgtcacaatcttccctgacacaagggaccaggcagaagagtcacatcacctggggtactcagccagggaatacgttacaacccctgcagggttgcaggctgcagagtcacctcaccttcagtaataagcccagcaatatgtcaaaatgctttctgtgggcaaggcccaattacgagagacacatcgtctgtttgctgatgccagcaatatgtcacaatcttccctgtaagcagggttcagggagaagaagacagccacatctcttaggtgattaatgcagagatatgtcaccagatccactgtggacaggcccccagcggagccttccattttctaggtattgggcccagcaatatgtcacaaaacccaaaacatgtggggaccaggc

SEQ ID NO: 39864 - DNA, 674 bp, Homo sapiens
agaagagaattctaattttccacctatatagcttataaaatctgaaagttgtttatatttggagttgagatgtcaaagaagggaacgaattccattggtatggttggctttttatataatatgtctatttacatggatgtttaagctggttgcttgaataaattcaaatttttagtaatttcaaagagtttaggtgatttaatatagtcatgcgaaagaatctcaagactagagggtcttatcattgggcaaattcatgtgctggaaatggaaggtagagaaataacgtgatttaatgtcatactaattctacattctgggagaatttactttatttaaaatatagtgaagaaccttgaacatagtcatgtgatttgtacgaagatgcctagaacatggaaatatatactctaataaaaaaaattttttaaatctgctaggaagttttaaatgcacgttaacattcagaatgatatatagaatcaaagaaaccatttgcatgatttatacctttaaaataaatctgaatttggctacaattaattgaagagtaatggaataagtatttttttgaattatttgaatttcctaagacaggtcattccttcattgtatgttttacttgggtaggtctgagcacatctcattacttattaaagcttatttgattgtgc

SEQ ID NO: 39865 - DNA, 730 bp, Homo sapiens
gctcactgcaacctccgtctcccaggtttaagcaattctgcctcagcctcccgagtagctgggattacaggcatgcaccactatacccatctaattttgtatgtttagcagagatggggtttctccatgtagatcaggctggtcttgaactcctgaccttgtaatctgcccacctcagcctcccaaagtgctgggattacaggcatgagccaccacgctcagccactagtcctcagatcttaacacacataagataattcatactggaaagaaactccacaaaccagaaagatgcaataatgcttttgacaacacctcaagcttttctaaccataaaaagaatcatattggtgagaaatcctagaaatgtgaagaatgtgacaaagtctttaaatggttgtcatacttgacttttttctttttttgagatgaagtctcactcttgtcccccaggctggtgtgcaatggcatgatgtcggctcactgcaaactccgcctcccaggttcaagtgattctcctacctcagcctcccaagtagctgggattacaggcacctgccaccacgcctggctaatttttgtacttttagtagagatggggtatgaccatcttggccaggctggtctcaaactcctgacctcaggtgatccgcccacctcgggcctcccaaagtgctgggattacaggcatgagccaccactccctgccttacttgattacattcaatat

SEQ ID NO: 39866 - DNA, 1790 bp, Homo sapiens
cgcgcaggctgcggtcgcgcaggcgcagtcggggcgccttcccggtataggcgccttttaccccagcgtgtcctgagtctttggttcgcgaagtgccgttaggccaagcaggtgctaaaagcccggggtcgtggaccccggccaggtcttagcagcatggaggcgcagggtgtagcggagggcgcggggccgggcgccgccagcggcgtgccccaccccgcggccctagccccggctgcggctcccaccttggcgccagcctcggtggcggccgcggcctctcaattcaccctgctagtgatgcaaccctgtgctgggcaggacgaggctgcggcccccgggggcagcgttggggcgggcaagcccgttaggtacctgtgcgaaggggccggggatggcgaagaggaggctggggaggacgaggcggacctgttagacacttcggaccctccggggggaggcgagagcgcggctagtttggaggatctagaggacgaggagactcactcggggggcgagggcagcagcgggggcgcccggaggcggggcagcggtgggggcagcatgagcaagacctgcacctacgaaggctgcagcgagaccacgagccaggtggccaagcagcgcaaaccgtggatgtgcaagaaacaccgcaacaagatgtacaaggacaagtataaaaagaagaagagcgaccaggccctgaactgcggtgggactgcctcgactggcagcgcgggaaacgtcaaactcgaggaaagtgcagataacatactctccattgttaaacaaagaacaggatcttttggggatcgtcctgcaagacctactcttttagaacaagtgttaaatcaaaaatcgttactaagaagtccagaagtagtgcaatttttacagaaacagcaacagctattaaatcagcaagttttggagcaaagacaacagcagtttccaggaacatcaatttaagactgaagctgtcaaagaggaaaactttaaaactttaaaaaggcaaacctaccaataggaataacaaattaaatgtcaagagagtatatccaatattaggatataaatgtatgtgtctcaagtttaactctacaaaaatttgttacttgttttttaaactctatatataaagttcgacttaatcatggctgttctaagaagtacttatggagagcaagaacgtttttgttcatttcttaatgtgtgtgtttttacttgcatatctgttcaaaacacttttaacaaaattaattcattaaagtccagttgttgacctttgaagttagctgatttctttattctgttctttagtttattcttactagatgcagaggaattcatctactgtctgttattaactgttagtttattctcatacttacgatgttgagagtttttttgaagcttaagttaccctttatggtggaaaacattagcttatgcttctttagatggaataatgggaaaggagggaaatgggaaatggatggaaatgggaaaggagggaaaataatagcccagtgagagctgaatgaaaagggactgaatttaaatatttgtaagaactttgtgatgatgagtaattgtcagacgtgggatagataactgagaggctcagaatctttaccaaggatattttttaggataaggtagctgcctgttcatgaatttggataagaatagtaggacaatattcaacacaatttaatttttgtctgccacattagacatttttttaccttataaaatgatcaataaagcaataaggtttattttgggta

SEQ ID NO: 39867 - DNA, 2773 bp, Homo sapiens
cgcgcaggctgcggtcgcgcaggcgcagtcggggcgccttcccggtataggcgccttttaccccagcgtgtcctgagtctttggttcgcgaagtgccgttaggccaagcaggtgctaaaagcccggggtcgtggaccccggccaggtcttagcagcatggaggcgcagggtgtagcggagggcgcggggccgggcgccgccagcggcgtgccccaccccgcggccctagccccggctgcggctcccaccttggcgccagcctcggtggcggccgcggcctctcaattcaccctgctagtgatgcaaccctgtgctgggcaggacgaggctgcggcccccgggggcagcgttggggcgggcaagcccgttaggtacctgtgcgaaggggccggggatggcgaagaggaggctggggaggacgaggcggacctgttagacacttcggaccctccggggggaggcgagagcgcggctagtttggaggatctagaggacgaggagactcactcggggggcgagggcagcagcgggggcgcccggaggcggggcagcggtgggggcagcatgagcaagacctgcacctacgaaggctgcagcgagaccacgagccaggtggccaagcagcgcaaaccgtggatgtgcaagaaacaccgcaacaagatgtacaaggacaagtataaaaagaagaagagcgaccaggccctgaactgcggtgggactgcctcgactggcagcgcgggaaacgtcaaactcgaggaaagtgcagataacatactctccattgttaaacaaagaacaggatcttttggggatcgtcctgcaagacctactcttttagaacaagtgttaaatcaaaaacaacagctattaaatcagcaagttttggagcaaagacaacagcagtttccaggaacatcaatgtgagggaacttaccaagcatctacatggtttttatcttattgtaatagatgagcatatttttttaccagacataaatggggtaataatctatgcctgtagaacataaacattttcctgtaaatgtatgtgtgcatttggggataagtaagtattgcactttgtcatactaatctttcagattactgtgagtttgaagaagtcagcttatctttccaaataacatttaattataatgttttttaaaaaatatattcctcttcagtcattgttactgaaggtaatgaagcagttactttctgtggaagtcataaagttaatagatattaatcttgactcatctagctcagtggttctcatcaagggtcaatttgattgtcatagtgaccttgaaaaccactggcttttagtgagtggccaggaatgctaaatgttctgcagtgtcaggggtagtcccacatactaaagattgtctcacccgcagtgccaataacactcctaagaaatgttgatggctattttgtggtgctaacatgtagttggggcacctacaattgggttctcttaataacctttctttgcagttaagactgaagctgtcaaagaggtaagcacattttatatagacgtaaggaaagtgattattgtttaatatctgtgaatttaggatgtgcatctcttttcagaggtgtgttagtaaaacctgacggattaactaagcacactgggatgtgtctcctacagttggcttctctctttgatgttacctgttagtgctgatctcttaaagcagacatttcttgtttgttgaatttgtgaacagtatagatctcagcccaccaatgccaagacaaaattatttttcttatacttattttttattaaacaaaatgaaaaagatccttttcaaaaaggtgatcctgaaaataaaactaacactccagtattttgtcattgtttttcgcaattgagctatctgaaaactgttattcctaagtaatgttcaaaaatgataagtaatctggatacctttttcttatactttctcctaggaaaactttaaaactttaaaaaggcaaacctaccaataggaataacaaattaaatgtcaagagagtatatccaatattaggatataaatgtatgtgtctcaagtttaactctacaaaaatttgttacttgttttttaaactctatatataaagttcgacttaatcatggctgttctaagaagtacttatggagagcaagaacgtttttgttcatttcttaatgtgtgtgtttttacttgcatatctgttcaaaacacttttaacaaaattaattcattaaagtccagttgttgacctttgaagttagctgatttctttattctgttctttagtttattcttactagatgcagaggaattcatctactgtctgttattaactgttagtttattctcatacttacgatgttgagagtttttttgaagcttaagttaccctttatggtggaaaacattagcttatgcttctttagatggaataatgggaaaggagggaaatgggaaatggatggaaatgggaaaggagggaaaataatagcccagtgagagctgaatgaaaagggactgaatttaaatatttgtaagaactttgtgatgatgagtaattgtcagacgtgggatagataactgagaggctcagaatctttaccaaggatattttttaggataaggtagctgcctgttcatgaatttggataagaatagtaggacaatattcaacacaatttaatttttgtctgccacattagacatttttttaccttataaaatgatcaataaagcaataaggtttattttgggta

SEQ ID NO: 39868 - DNA, 2818 bp, Homo sapiens
cgcgcaggctgcggtcgcgcaggcgcagtcggggcgccttcccggtataggcgccttttaccccagcgtgtcctgagtctttggttcgcgaagtgccgttaggccaagcaggtgctaaaagcccggggtcgtggaccccggccaggtcttagcagcatggaggcgcagggtgtagcggagggcgcggggccgggcgccgccagcggcgtgccccaccccgcggccctagccccggctgcggctcccaccttggcgccagcctcggtggcggccgcggcctctcaattcaccctgctagtgatgcaaccctgtgctgggcaggacgaggctgcggcccccgggggcagcgttggggcgggcaagcccgttaggtacctgtgcgaaggggccggggatggcgaagaggaggctggggaggacgaggcggacctgttagacacttcggaccctccggggggaggcgagagcgcggctagtttggaggatctagaggacgaggagactcactcggggggcgagggcagcagcgggggcgcccggaggcggggcagcggtgggggcagcatgagcaagacctgcacctacgaaggctgcagcgagaccacgagccaggtggccaagcagcgcaaaccgtggatgtgcaagaaacaccgcaacaagatgtacaaggacaagtataaaaagaagaagagcgaccaggccctgaactgcggtgggactgcctcgactggcagcgcgggaaacgtcaaactcgaggaaagtgcagataacatactctccattgttaaacaaagaacaggatcttttggggatcgtcctgcaagacctactcttttagaacaagtgttaaatcaaaaatcgttactaagaagtccagaagtagtgcaatttttacagaaacagcaacagctattaaatcagcaagttttggagcaaagacaacagcagtttccaggaacatcaatgtgagggaacttaccaagcatctacatggtttttatcttattgtaatagatgagcatatttttttaccagacataaatggggtaataatctatgcctgtagaacataaacattttcctgtaaatgtatgtgtgcatttggggataagtaagtattgcactttgtcatactaatctttcagattactgtgagtttgaagaagtcagcttatctttccaaataacatttaattataatgttttttaaaaaatatattcctcttcagtcattgttactgaaggtaatgaagcagttactttctgtggaagtcataaagttaatagatattaatcttgactcatctagctcagtggttctcatcaagggtcaatttgattgtcatagtgaccttgaaaaccactggcttttagtgagtggccaggaatgctaaatgttctgcagtgtcaggggtagtcccacatactaaagattgtctcacccgcagtgccaataacactcctaagaaatgttgatggctattttgtggtgctaacatgtagttggggcacctacaattgggttctcttaataacctttctttgcagttaagactgaagctgtcaaagaggtaagcacattttatatagacgtaaggaaagtgattattgtttaatatctgtgaatttaggatgtgcatctcttttcagaggtgtgttagtaaaacctgacggattaactaagcacactgggatgtgtctcctacagttggcttctctctttgatgttacctgttagtgctgatctcttaaagcagacatttcttgtttgttgaatttgtgaacagtatagatctcagcccaccaatgccaagacaaaattatttttcttatacttattttttattaaacaaaatgaaaaagatccttttcaaaaaggtgatcctgaaaataaaactaacactccagtattttgtcattgtttttcgcaattgagctatctgaaaactgttattcctaagtaatgttcaaaaatgataagtaatctggatacctttttcttatactttctcctaggaaaactttaaaactttaaaaaggcaaacctaccaataggaataacaaattaaatgtcaagagagtatatccaatattaggatataaatgtatgtgtctcaagtttaactctacaaaaatttgttacttgttttttaaactctatatataaagttcgacttaatcatggctgttctaagaagtacttatggagagcaagaacgtttttgttcatttcttaatgtgtgtgtttttacttgcatatctgttcaaaacacttttaacaaaattaattcattaaagtccagttgttgacctttgaagttagctgatttctttattctgttctttagtttattcttactagatgcagaggaattcatctactgtctgttattaactgttagtttattctcatacttacgatgttgagagtttttttgaagcttaagttaccctttatggtggaaaacattagcttatgcttctttagatggaataatgggaaaggagggaaatgggaaatggatggaaatgggaaaggagggaaaataatagcccagtgagagctgaatgaaaagggactgaatttaaatatttgtaagaactttgtgatgatgagtaattgtcagacgtgggatagataactgagaggctcagaatctttaccaaggatattttttaggataaggtagctgcctgttcatgaatttggataagaatagtaggacaatattcaacacaatttaatttttgtctgccacattagacatttttttaccttataaaatgatcaataaagcaataaggtttattttgggta

SEQ ID NO: 39869 - DNA, 1226 bp, Homo sapiens
  misc_feature (1225)..(1226): n is a, c, g, or t
gcgggatagctttacggcttctgggagctgctgcttcgctgtgagaagtatccgcgacgagctatccgggaaagggccgaatgcgatcaaacctaatccgcgagacttgctaaggttctgtgctacaaattgatgtttagataaacttcagtgaaatgactcttcaggaattggtgcataaggctgcctcctgttatatggacagagtagctgtatgttttgatgaatgcaacaaccagcttccagtttactacacctacaagactgtggttaatgctgcttctgaattatcaaattttctgctgttacactgtgactttcaaggaattcgggaaattggtctctactgccaacctgggatagacttaccctcttggattttaggaattctccaagtcccggctgcttatgtacctatcgagccagattcaccaccgtcattatcaactcattttatgaaaaaatgtaatctaaagtatatccttgttgaaaaaaaacaaattaatgtaagtctggatgtttcaattgttttttgcctgtattacatttatttcaattgaaacattccttccttctcccatctggattcctaagtctgctaaatgtggcaaggtttctcagtctttgcactatgacatttttagggttgagtaattgttgtgaggagtgttccgtatattataggatatttagcaatatatttgacctccactcgctagacctcagtagcacctcccagtcataacaaccaaaaatctccagacattgccaattgtcccccagaggggctctccacccctcacactccattgtgagccactattctgtagtatgaacagatctgttagccttataataatatattatgcattgttttgaatttctctttccaaagtatttcctatactgcaaaattttataatacttggaactttcatatttatggcaattacattggtcagcaacactgaagaattataactaagcttgcattttgaaaaagagactggtacttagaggagatctttccagaaaagtaaatttattgtttttttatttttaaatgattgccaaccaaagatataaccaagaaactctgtttttggggcaagaattggtgttatatcttcagcaagatgcagcccatgcttcattgtttatttattatttataaaatattgttttactaaaggggaagaacattataaaaatatattcaatttann

SEQ ID NO: 39870 - DNA, 551 bp, Homo sapiens
gcgggatagctttacggcttctgggagctgctgcttcgctgtgagaagtatccgcgacgagctatccgggaaagggccgaatgcgatcaaacctaatccgcgagacttgctaaaattctccaagtcccggctgcttatgtacctatcgagccagattcaccaccgtcattatcaactcattttatgaaaaaatgtaatctaaagtatatccttgttgaaaaaaaacaaattaataaatttaaatcttttcatgaaacattattgaactatgatacatttacagtggaacataatgacctagtgctcttcagacttcactggaaaaatactgaggtgaacttgatgctaaatgatggaaaagagaaatatgaaaaaaaaaaataaaaagcataagttctgagcatgtcaatgaagaaaaagcagaagaacacatggatctgaggctaaagcattgcttagcctatgttctacatacatcagggactacagggataccgaagattgtcagagtgcctcataagtgtatagtaccaaatatccagcattttcgg

SEQ ID NO: 39871 - DNA, 437 bp, Homo sapiens
gcgggatagctttacggcttctgggagctgctgcttcgctgtgagaagtatccgcgacgagctatccgggaaagggccgaatgcgatcaaacctaatccgcgagacttgctaaggttctgtgctacaaattgatgtttagataaacttcagtgaaatgactcttcaggaattggtgcataaggctgcctcctgttatatggacagagtagctgtatgttttgatgaatgcaacaaccagcttccagtttactacacctacaagactgtggttaatgctgcttctgaattatcaaattttctgctgttacactgtgactttcaaggaattcgggaaattggtctctactgccaacctgggatagacttaccctcttggattttaggaaattctccaagccccgggtggtattgtccttttgagcccgatatcccaacc

SEQ ID NO: 39872 - DNA, 343 bp, Homo sapiens
ctgtgctacaaattgatgtttagataaacttcagtgaaatgactcttcaggaattggtgcataaggctgcctcctgttatatggacagagtagctgtatgttttgatgaatgcaacaaccagcttccagtttactacacctacaagactgtggttaatgctgcttctgaattatcaaattttctgctgttacactgtgactttcaaggaattcgggaaattggtctctactgccaacctgggatagacttaccctcttggattttagggtaatattttttagaactgtaaatttgatgttactccaagctaatgtaaatttttaatagagtatattgcaagtt

SEQ ID NO: 39873 - DNA, 823 bp, Homo sapiens
gcgggatagctttacggcttctgggagctgctgcttcgctgtgagaagtatccgcgacgagctatccgggaaagggccgaatgcgatcaaacctaatccgcgagacttgctaaggttctgtgctacaaattgatgtttagataaacttcagtgaaatgactcttcaggaattggtgcataaggctgcctcctgttatatggacagagtagctgtatgttttgatgaatgcaacaaccagcttccagtttactacacctacaagactgtggttaatgctgcttctgaattatcaaattttctgctgttacactgtgactttcaaggaattcgggaaattggtctctactgccaacctgggatagacttaccctcttggattttaggaattctccaagtcccggctgcttatgtacctatcgagccagattcaccaccgtcattatcaactcattttatgaaaaaatgtaatctaaagtatatccttgttgaaaaaaaacaaattaataaatttaaatcttttcatgaaacattattgaactatgatacatttacagtggaacataatgacctagtgctcttcagacttcactggaaaaatactgaggtgaacttgatgctaaatgatggaaaagagaaatatgaaaaaaaaaaataaaaagcataagttctgagcatgtcaatgaagaaaaagcagaagaacacatggatctgaggctaaagcattgcttagcctatgttctacatacatcagggactacagggataccgaagattgtcagagtgcctcataagtgtatagtaccaaatatccagcattttcgg

SEQ ID NO: 39874 - DNA, 301 bp, Homo sapiens
cagagagagagagagaatgaatgaaactaaaattttgcagcagaagagtacaataactaagttgaaaaaaatcactacactggtccaacagcaggcttgttcaagcagaagaaattatcagtgtaaagacaggttatttgaaattactgaattagaagagtaaaaagaaaaaaagaatataagatgttttatgtaagcctatagtaaccacaaagaaaatacatatagaagatacacaaaagaaaaagggaaagaaattaaaatatatcactacaaaacaatcaatgaaacaaaaaagaaa

SEQ ID NO: 39875 - DNA, 326 bp, Homo sapiens
ctaataaagaaacccataaatgattttatgaccactcaaaatatgtttgatgcctatatttttttaaattttaattaattaattttttttgagacggagtctcactctgttgctcgagctggagtgcagaggttgcagtgagccaagcaagactgagccactgtactccagccagggtgacagagggagactccatctcatctcaaaaaagaaagaaagagagagagagaagggaaagaaagaaaagaaagaaaaagaaagaaagaagaaagaaagaaagaaagaaagaaagaaagaaagaaagaaagaaagaaagaaaaaagaaa

SEQ ID NO: 39876 - DNA, 1478 bp, Homo sapiens
gtgattaagtgaaatgagatatgcaaaaggataaggttggaaataggtaataaatttggatttcaagcctgttttgtaggacagatggatctgtagctcaaaggagaggtaaaacctgaagataattatagatactttattattaaggctatgagaaggaatgacaatatttatggtgaattcagtgggtttcttaagtgagtttattatagtcaagagtgtcaagtgggtggacgtggtggctcacgcctgtaatcccagaactttgggaggctgaggcgggcagatcacctgaggtcgggagttcaaggccagccttaccaacatgacgaaaccccatctctactaaaaatacaaataatagccggacgtggtggcacatgcctataatcccagctattcaggaggctgaggcaggagaattgcttgaacctgggaagtggaggttgtggtgagctgagatcacgccattgcactccagcctgggcaaggagagaaactccgtctcaaaaaaaaaaaattaattaattaaaaaaaagagtgtcaagtgttatgggagattggttaggtaagtactgaaagtggatgattggctttggcggttagtttgtcttgtgtctgagagccatttgtatagtggcaaatgttagatttctggaggctgaggaatggaagttaggaaatgcagacaattaaaattcttacacctttacattttgctattttttcctcagtgttttcttttgtagcacttctgactggtttattatttgctttttccttacaatgacattgttattctatagcattctgttgaagatgtaattacattttctcaatctgtgatgtcaggttgctttttgaagtataaaggtttaagaaatacataattacatatgatttttaagtgatcttctcggtcttcagttgattttttccatatataaatttaaggtagattcattttacatttggtatcatgttaaaatgctcccaaaactacctactgtataataggtattgcaatattgttgatcaccttcaggatattattatcctgaaatgtctcccagtggtccaagctgggacagtttgagcaacaaaataaatatgagaggattggattataacctaaaaaataaagtcaatatctataaatccatgttgatttaaataaatgattgactaaataaatacttggcagaaaagaagcaaatcttccttacagaaaaattccaaataatatatgtagaacacactttcaggaggtggaacttaatttacctcttcttgaatatggactggactgctgacttttaaagaacagagtatgaagagggaaaagcagtaactttacagtgaagaggcctggcagacagcaccttaaccaagttcaaggttaacttcaccaatgataaggcatggtgatatcatgtactctctgatagaatgtgttaaatctaagcagaaaaaaaaaa

SEQ ID NO: 39877 - DNA, 4930 bp, Homo sapiens
tacctccggctctcccgggtgacgacgggtagaaaagcaggaggagcggagaaaggagagggcggggtagggatgcagctgtgctgcattctgggaagggcgttggtccgtcgctcgcgcagcctcctgggagttgtagtcgcgatcctgaggtaacggataagtttataccatggatagcacaaaggagaagtgtgacagttacaaagatgatcttctgcttaggatgggacttaatgataataaagcaggaatggaaggattagataaagagaaaattaacaaaattataatggaagccacgaaggggtccagattttatggaaatgagctcaagaaagaaaagcaagtcaaccaacgaattgaaaatatgatgcaacaaaaagctcaaatcaccagccaacagctaagaaaagcacaattacaggttgacagatttgcaatggaattagaacaaagccgaaatttgagcaataccatagtgcacattgacatggatgctttctatgcagctgtagaaatgagggacaatccagaattgaaggataaacccattgctgtaggatcaatgagtatgctgtctacttcaaattaccatgcaaggagatttggtgttcgtgcagccatgccaggatttattgctaagaggctgtgcccacaacttataatagtgccccccaactttgacaaataccgagctgtgagtaaagaggttaaggaaatacttgctgattatgatcccaattttatggccatgagtcttgatgaagcctacttgaatataacaaagcacttagaagaaagacaaaattggcctgaggataaaagaaggtatttcatcaaaatgggaagctctgtagaaaatgataatccaggaaaggaagttaataaactgagtgagcatgaacgatccatctctccactactttttgaagagagtccttctgatgtgcagcccccaggagatcctttccaagtgaactttgaagaacaaaacaatcctcaaatactccaaaactcagttgtttttggaacatcagcccaggaagtggtaaaggaaattcgtttcagaattgagcagaaaacaacactgacagccagtgcaggcattgccccaaatacaatgttagcaaaagtatgcagtgataagaataaaccaaatggacaataccaaattcttcccaatagacaagctgtgatggacttcatcaaggatttacccattagaaaggtttctggaataggaaaagttacagagaaaatgttaaaggcccttggaattattacatgtacagaactttaccaacagagggcattgctttctctccttttctctgaaacatcttggcattatttccttcatatctccttgggtctaggttcaacacacctgacgagggatggagagaggaaaagtatgagcgttgagaggacattcagtgagataaataaagcggaagagcaatacagcctatgtcaagaactttgcagtgagcttgctcaggatctacagaaagaaagacttaagggtagaactgttaccattaagttgaagaatgtgaattttgaagtaaaaactcgtgcatctacagtttcatctgttgtttctactgcagaagaaatatttgccattgctaaggaattgctaaaaacagaaattgatgctgattttccacatcccttgagattaaggcttatgggtgttcggatatctagttttcccaatgaagaggacaggaaacaccaacaaaggagcattattggctttttacaggctggaaaccaagccctgtcagccactgagtgtacattagagaaaactgacaaagataagtttgtaaaacctctagaaatgtctcataagaagagtttctttgataaaaaacgatcagaaaggaaatggagtcaccaagatacatttaaatgtgaagccgtgaataaacaaagtttccagacatcacaaccattccaagttttaaagaagaagatgaatgagaatttggaaatatcagagaattcagatgactgtcagatacttacctgtcctgtttgctttagggctcaagggtgcatcagtctggaagccttgaataaacatgtagatgaatgtcttgatggaccttcaatcagtgaaaactttaaaatgttctcgtgttcacatgtttctgctaccaaagttaacaagaaagaaaatgttcctgcttcttcactttgtgagaagcaagattatgaagcccatccaaaaattaaagaaatatcttcagtagattgtatagctttagtagatactatagataactcatctaaagcagaaagcatagatgctttaagtaataagcatagcaaggaagaatgttctagtctcccaagcaagtcttttaatattgaacactgtcatcagaattcttcttctactgtttcattggaaaacgaagatgttggatcatttagacaagaataccgccagccttacttatgtgaagtgaaaacaggccaagctctagtttgtcctgtttgtaacgtagaacaaaagacttcagatctaaccctgttcaatgtgcatgtggatgtttgcttaaataaaagttttatccaagaattaagaaaggataaatttaacccagttaatcaacccaaagaaagctccagaagtactggtagctcaagtggagtacagaaggctgtaacaagaacaaaaaggccaggattgatgacaaagtactcaacatcaaagaaaataaaaccaaacaatcccaaacatacccttgatatattttttaagtaaacattgaacattttatcattaatttttaattgaaactagttattttataatcaatgaatttgttctttctgattttaagtttgcagatttatttagtgaaggcaagtgcaataatccttcctcagatgatgtttgcttttctaagatacatatactgattctgtgtatcttttttataaccatgagaattttacttccattatacatcaattggaaatcaatcctgttaagagataattcttaaaagggaaattaggaatgggataagaaggtgatttttttattatttttatactgaatataaaaacatttgtaagggctctcaaagattcacacatgcctatattatcataagaatttttcagcacttaactactttgttggcattgatcctagtgtctttaaatacttcatgagcattcataattaaaatttatcttaagttctatgaagagtattaatgtaactagcataagtggttttcttcaggaaaataaatatcacagtattatctgtgttaaaatggtttttgcctaaaatataatttttaatttggcttttcttatttaaaattccattatcttatgaataagcacttgaatcagtttttaaaatatttagtctaagatgattcaaagtagttttattttaatacaggacttttaaatggcagtatttcatttcttgtcaattatgttggtactttccacaaatctataaagaaggataaattgtaccatcattttattataatcctcaagagaaaatgtgtaattcaaaagattaatgtgtattaaaacacattatgtatcttagttacatttctatcagtacttttattaatatttgtgaaagaagacagcttaatagtagttagcttaagtagtttctccaagtacttttgtgctatcaatgagttcttctcaaaaaataattagttaggccaggcacaatggctcacacctgtaatgccagccctttgggaggccgaatgggcagatcacttgaggtcaggagtttgagaccagcctcgccaacatggtgagaccctgtctctactaaaacgataaaaaaaaaaaaaaaattagccaggcttggtggcacacgcctgtaatcccagctactcagatggctgaggcaggagaactacttgaacctgggaggtcaaagctgcagtcagccaagatcttgccactgtactccagcctgaagagcgagactctgtctcaataatataataatagttattatttaattgcaacatgaagttggaagccattttctgttacttctttaaggagctaaatcttttatatttttgttttctctccccttgcgtttcatattttagcttatgatctaaatatatattttgtatattataatattttaggaatagcttaattaagaactcacagactttgacaaagtggtaactagacttttaattactagattcttcaaattaggcttaatgcctgctagcatgccaatccaatcccatgactgatgttattatacactatggcaaatacaaagttgtagtattatggttcttgatggtgtgatttacttatgtaaattatgtacaaatttaagttcaatgaaacactgatttaatgtactgaaaggtaaatagtaccatagtgaattattttctgtcttgccttaggtttatttttattatcttcaatattagaataaatgctaaattattttcatttaaggatttatgtagttgaatattatcatttagtaatatttaatcatttgaaataaaatttaaagctttaattgatctaatagagatggttttctacttttccactcttcctccctcttatgccttcacttttgttttctgtgcccagaattttcttcacattctttactacctgttttgtctattatatccaacccattttctttttattataattttgatttggggcatttgaagaaaatacagcaaaactacaagaactggtaataagcatgcataatctcacctacttagtgaacctaatataaacctaatataaagaaccaccgtatttgcaatatatataactggtgaaaaactagtgtccagaatatataaatgatccctatgaatcagtaagaaaaagacagtcaatagaaatt

SEQ ID NO: 39878 - DNA, 620 bp, Homo sapiens
  misc_feature (105)..(105): n is a, c, g, or t
cgagctcggtacccgcaagctatccggttcaatgcgcctgacaaactactcttaaatgaaacagaatttacctccctacacagaatataccagacataccacacnaatattaaatagatctttggcacattatttataataaacctgttatattaatggaaataatgttattaataatgtataaaattagatatacaacaggaataaaaatttaatgaaaaaatttagaagcatgtgtccaagaagctatttttctcttttaaaagaagattgttggccaggtacagtgtattgaaccggatagcttgccggcaagctatcctgttcaatgtgcatgtggatgtttgcttaaataaaagttttatccaagaattaagaaaggataaatttaacccagttaatcaacccaaagaaagctccagaagtactggtagctcaagtggagtacagaaggctgtaacaagaacaaaaaggccaggattgatgacaaagtactcaacatcaaagaaaataaaaccaaacaatcccaaacatacccttgatatattttttaagtaaacattgaacattttatcattaatttttaattgaaccggatagctgccgggtcctctagtcac

SEQ ID NO: 39879 - DNA, 636 bp, Homo sapiens
aggagctgagtgatctaatcaaacaaattccttcagagaacatctgtgaaggcacagtggtaaattaactataactgcataactagaaagcctctttaacttattttttggtagtgctgactctacccaaatttcaccaataaaattaagtgtaatgctaataaaattagtaaattacaaagaaattatagtttttggtgtgtttacatatgaactatatagtactaaggaagtttaatcaataagttttaactttttaaatttgtatacaactttttaattatttcatattattcattatggaatttcttgactttctttcctctaaaggtagctcaagtggagtacagaaggctgtaacaagaacaaaaaggtatggctaatttgagctttaataaagctggctacaatatgaaaattcaattattttataaattattaagtaatcaatattaaaaatgaattattttctagaatctcttcctgcattttaattgtgtgttccttttcattctaggccaggattgatgacaaagtactcaacatcaaagaaaataaaaccaaacaatcccaaacatacccttgatatattttttaagtaaacattgaacattttatcattaatttttaattgaa

SEQ ID NO: 39880 - DNA, 536 bp, Homo sapiens
ttaatggtgtttcaatattatgttgtctaaaagtatgttaacttttttaaaaaattaaggttgacagatttgcaatggaattagaacaaagccgaaatttgagcaataccatagtgcacattgacatggatgctttctatgcagctgtagaaatgagggacaatccagaattgaaggataaacccattgctgtaggatcaatgagtatgctgtctacttcaaattaccatgcaaggagatttggtgttcgtgcagccatgccaggatttattgctaagaggctgtgcccacaacttataatagtgccccccaactttgacaaataccgagctgtgagtaaagaggttaaggaaatacttgctgattatgatcccaattttatggccatgagtcttgatgaagcctacttgaatataacaaagcacttagaagaaagacaaaattggcctgaggataaaagaaggtatttcatcaaaatgggaagctctgtagaaaatggtaagcaacttattaagactatcaaaccaagaagcagt

SEQ ID NO: 39881 - DNA, 4661 bp, Homo sapiens
tacctccggctctcccgggtgacgacgggtagaaaagcaggaggagcggagaaaggagagggcggggtagggatgcagctgtgctgcattctgggaagggcgttggtccgtcgctcgcgcagcctcctgggagttgtagtcgcgatcctgaggtaacggataagtttataccatggatagcacaaaggagaagtgtgacagttacaaagatgatcttctgcttaggatgggacttaatgataataaagcaggaatggaaggattagataaagagaaaattaacaaaattataatggaagccacgaaggggtccagattttatggaaatgagctcaagaaagaaaagcaagtcaaccaacgaattgaaaatatgatgcaacaaaaagctcaaatcaccagccaacagctaagaaaagcacaattacaggttgacagatttgcaatggaattagaacaaagccgaaatttgagcaataccatagtgcacattgacatggatgctttctatgcagctgtagaaatgagggacaatccagaattgaaggataaacccattgctgtaggatcaatgagtatgctgtctacttcaaattaccatgcaaggagatttggtgttcgtgcagccatgccaggatttattgctaagaggctgtgcccacaacttataatagtgccccccaactttgacaaataccgagctgtgagtaaagaggttaaggaaatacttgctgattatgatcccaattttatggccatgagtcttgatgaagcctacttgaatataacaaagcacttagaagaaagacaaaattggcctgaggataaaagaaggtatttcatcaaaatgggaagctctgtagaaaatgataatccaggaaaggaagttaataaactgagtgagcatgaacgatccatctctccactactttttgaagagagtccttctgatgtgcagcccccaggagatcctttccaagtgaactttgaagaacaaaacaatcctcaaatactccaaaactcagttgtttttggaacatcagcccaggaagtggtaaaggaaattcgtttcagaattgagcagaaaacaacactgacagccagtgcaggcattgccccaaatacaatgttagcaaaagtatgcagtgataagaataaaccaaatggacaataccaaattcttcccaatagacaagctgtgatggacttcatcaaggatttacccattagaaaggtttctggaataggaaaagttacagagaaaatgttaaaggcccttggaattattacatgtacagaactttaccaacagagggcattgctttctctccttttctctgaaacatcttggcattatttccttcatatctccttgggtctaggttcaacacacctgacgagggatggagagaggaaaagtatgagcgttgagaggtgttcggatatctagttttcccaatgaagaggacaggaaacaccaacaaaggagcattattggctttttacaggctggaaaccaagccctgtcagccactgagtgtacattagagaaaactgacaaagataagtttgtaaaacctctagaaatgtctcataagaagagtttctttgataaaaaacgatcagaaaggaaatggagtcaccaagatacatttaaatgtgaagccgtgaataaacaaagtttccagacatcacaaccattccaagttttaaagaagaagatgaatgagaatttggaaatatcagagaattcagatgactgtcagatacttacctgtcctgtttgctttagggctcaagggtgcatcagtctggaagccttgaataaacatgtagatgaatgtcttgatggaccttcaatcagtgaaaactttaaaatgttctcgtgttcacatgtttctgctaccaaagttaacaagaaagaaaatgttcctgcttcttcactttgtgagaagcaagattatgaagcccatccaaaaattaaagaaatatcttcagtagattgtatagctttagtagatactatagataactcatctaaagcagaaagcatagatgctttaagtaataagcatagcaaggaagaatgttctagtctcccaagcaagtcttttaatattgaacactgtcatcagaattcttcttctactgtttcattggaaaacgaagatgttggatcatttagacaagaataccgccagccttacttatgtgaagtgaaaacaggccaagctctagtttgtcctgtttgtaacgtagaacaaaagacttcagatctaaccctgttcaatgtgcatgtggatgtttgcttaaataaaagttttatccaagaattaagaaaggataaatttaacccagttaatcaacccaaagaaagctccagaagtactggtagctcaagtggagtacagaaggctgtaacaagaacaaaaaggccaggattgatgacaaagtactcaacatcaaagaaaataaaaccaaacaatcccaaacatacccttgatatattttttaagtaaacattgaacattttatcattaatttttaattgaaactagttattttataatcaatgaatttgttctttctgattttaagtttgcagatttatttagtgaaggcaagtgcaataatccttcctcagatgatgtttgcttttctaagatacatatactgattctgtgtatcttttttataaccatgagaattttacttccattatacatcaattggaaatcaatcctgttaagagataattcttaaaagggaaattaggaatgggataagaaggtgatttttttattatttttatactgaatataaaaacatttgtaagggctctcaaagattcacacatgcctatattatcataagaatttttcagcacttaactactttgttggcattgatcctagtgtctttaaatacttcatgagcattcataattaaaatttatcttaagttctatgaagagtattaatgtaactagcataagtggttttcttcaggaaaataaatatcacagtattatctgtgttaaaatggtttttgcctaaaatataatttttaatttggcttttcttatttaaaattccattatcttatgaataagcacttgaatcagtttttaaaatatttagtctaagatgattcaaagtagttttattttaatacaggacttttaaatggcagtatttcatttcttgtcaattatgttggtactttccacaaatctataaagaaggataaattgtaccatcattttattataatcctcaagagaaaatgtgtaattcaaaagattaatgtgtattaaaacacattatgtatcttagttacatttctatcagtacttttattaatatttgtgaaagaagacagcttaatagtagttagcttaagtagtttctccaagtacttttgtgctatcaatgagttcttctcaaaaaataattagttaggccaggcacaatggctcacacctgtaatgccagccctttgggaggccgaatgggcagatcacttgaggtcaggagtttgagaccagcctcgccaacatggtgagaccctgtctctactaaaacgataaaaaaaaaaaaaaaattagccaggcttggtggcacacgcctgtaatcccagctactcagatggctgaggcaggagaactacttgaacctgggaggtcaaagctgcagtcagccaagatcttgccactgtactccagcctgaagagcgagactctgtctcaataatataataatagttattatttaattgcaacatgaagttggaagccattttctgttacttctttaaggagctaaatcttttatatttttgttttctctccccttgcgtttcatattttagcttatgatctaaatatatattttgtatattataatattttaggaatagcttaattaagaactcacagactttgacaaagtggtaactagacttttaattactagattcttcaaattaggcttaatgcctgctagcatgccaatccaatcccatgactgatgttattatacactatggcaaatacaaagttgtagtattatggttcttgatggtgtgatttacttatgtaaattatgtacaaatttaagttcaatgaaacactgatttaatgtactgaaaggtaaatagtaccatagtgaattattttctgtcttgccttaggtttatttttattatcttcaatattagaataaatgctaaattattttcatttaaggatttatgtagttgaatattatcatttagtaatatttaatcatttgaaataaaatttaaagctttaattgatctaatagagatggttttctacttttccactcttcctccctcttatgccttcacttttgttttctgtgcccagaattttcttcacattctttactacctgttttgtctattatatccaacccattttctttttattataattttgatttggggcatttgaagaaaatacagcaaaactacaagaactggtaataagcatgcataatctcacctacttagtgaacctaatataaacctaatataaagaaccaccgtatttgcaatatatataactggtgaaaaactagtgtccagaatatataaatgatccctatgaatcagtaagaaaaagacagtcaatagaaatt

SEQ ID NO: 39882 - DNA, 5067 bp, Homo sapiens
tacctccggctctcccgggtgacgacgggtagaaaagcaggaggagcggagaaaggagagggcggggtagggatgcagctgtgctgcattctgggaagggcgttggtccgtcgctcgcgcagcctcctgggagttgtagtcgcgatcctgaggtaacggatttttcttcatccctttactttgagtctgtggatgtcattgcatgtgatatgggtctcctgaagacagcataccattggattttgcttctttatccaagttatcattctgtcttttaattggggtgtgcattcaagataagtttataccatggatagcacaaaggagaagtgtgacagttacaaagatgatcttctgcttaggatgggacttaatgataataaagcaggaatggaaggattagataaagagaaaattaacaaaattataatggaagccacgaaggggtccagattttatggaaatgagctcaagaaagaaaagcaagtcaaccaacgaattgaaaatatgatgcaacaaaaagctcaaatcaccagccaacagctaagaaaagcacaattacaggttgacagatttgcaatggaattagaacaaagccgaaatttgagcaataccatagtgcacattgacatggatgctttctatgcagctgtagaaatgagggacaatccagaattgaaggataaacccattgctgtaggatcaatgagtatgctgtctacttcaaattaccatgcaaggagatttggtgttcgtgcagccatgccaggatttattgctaagaggctgtgcccacaacttataatagtgccccccaactttgacaaataccgagctgtgagtaaagaggttaaggaaatacttgctgattatgatcccaattttatggccatgagtcttgatgaagcctacttgaatataacaaagcacttagaagaaagacaaaattggcctgaggataaaagaaggtatttcatcaaaatgggaagctctgtagaaaatgataatccaggaaaggaagttaataaactgagtgagcatgaacgatccatctctccactactttttgaagagagtccttctgatgtgcagcccccaggagatcctttccaagtgaactttgaagaacaaaacaatcctcaaatactccaaaactcagttgtttttggaacatcagcccaggaagtggtaaaggaaattcgtttcagaattgagcagaaaacaacactgacagccagtgcaggcattgccccaaatacaatgttagcaaaagtatgcagtgataagaataaaccaaatggacaataccaaattcttcccaatagacaagctgtgatggacttcatcaaggatttacccattagaaaggtttctggaataggaaaagttacagagaaaatgttaaaggcccttggaattattacatgtacagaactttaccaacagagggcattgctttctctccttttctctgaaacatcttggcattatttccttcatatctccttgggtctaggttcaacacacctgacgagggatggagagaggaaaagtatgagcgttgagaggacattcagtgagataaataaagcggaagagcaatacagcctatgtcaagaactttgcagtgagcttgctcaggatctacagaaagaaagacttaagggtagaactgttaccattaagttgaagaatgtgaattttgaagtaaaaactcgtgcatctacagtttcatctgttgtttctactgcagaagaaatatttgccattgctaaggaattgctaaaaacagaaattgatgctgattttccacatcccttgagattaaggcttatgggtgttcggatatctagttttcccaatgaagaggacaggaaacaccaacaaaggagcattattggctttttacaggctggaaaccaagccctgtcagccactgagtgtacattagagaaaactgacaaagataagtttgtaaaacctctagaaatgtctcataagaagagtttctttgataaaaaacgatcagaaaggaaatggagtcaccaagatacatttaaatgtgaagccgtgaataaacaaagtttccagacatcacaaccattccaagttttaaagaagaagatgaatgagaatttggaaatatcagagaattcagatgactgtcagatacttacctgtcctgtttgctttagggctcaagggtgcatcagtctggaagccttgaataaacatgtagatgaatgtcttgatggaccttcaatcagtgaaaactttaaaatgttctcgtgttcacatgtttctgctaccaaagttaacaagaaagaaaatgttcctgcttcttcactttgtgagaagcaagattatgaagcccatccaaaaattaaagaaatatcttcagtagattgtatagctttagtagatactatagataactcatctaaagcagaaagcatagatgctttaagtaataagcatagcaaggaagaatgttctagtctcccaagcaagtcttttaatattgaacactgtcatcagaattcttcttctactgtttcattggaaaacgaagatgttggatcatttagacaagaataccgccagccttacttatgtgaagtgaaaacaggccaagctctagtttgtcctgtttgtaacgtagaacaaaagacttcagatctaaccctgttcaatgtgcatgtggatgtttgcttaaataaaagttttatccaagaattaagaaaggataaatttaacccagttaatcaacccaaagaaagctccagaagtactggtagctcaagtggagtacagaaggctgtaacaagaacaaaaaggccaggattgatgacaaagtactcaacatcaaagaaaataaaaccaaacaatcccaaacatacccttgatatattttttaagtaaacattgaacattttatcattaatttttaattgaaactagttattttataatcaatgaatttgttctttctgattttaagtttgcagatttatttagtgaaggcaagtgcaataatccttcctcagatgatgtttgcttttctaagatacatatactgattctgtgtatcttttttataaccatgagaattttacttccattatacatcaattggaaatcaatcctgttaagagataattcttaaaagggaaattaggaatgggataagaaggtgatttttttattatttttatactgaatataaaaacatttgtaagggctctcaaagattcacacatgcctatattatcataagaatttttcagcacttaactactttgttggcattgatcctagtgtctttaaatacttcatgagcattcataattaaaatttatcttaagttctatgaagagtattaatgtaactagcataagtggttttcttcaggaaaataaatatcacagtattatctgtgttaaaatggtttttgcctaaaatataatttttaatttggcttttcttatttaaaattccattatcttatgaataagcacttgaatcagtttttaaaatatttagtctaagatgattcaaagtagttttattttaatacaggacttttaaatggcagtatttcatttcttgtcaattatgttggtactttccacaaatctataaagaaggataaattgtaccatcattttattataatcctcaagagaaaatgtgtaattcaaaagattaatgtgtattaaaacacattatgtatcttagttacatttctatcagtacttttattaatatttgtgaaagaagacagcttaatagtagttagcttaagtagtttctccaagtacttttgtgctatcaatgagttcttctcaaaaaataattagttaggccaggcacaatggctcacacctgtaatgccagccctttgggaggccgaatgggcagatcacttgaggtcaggagtttgagaccagcctcgccaacatggtgagaccctgtctctactaaaacgataaaaaaaaaaaaaaaattagccaggcttggtggcacacgcctgtaatcccagctactcagatggctgaggcaggagaactacttgaacctgggaggtcaaagctgcagtcagccaagatcttgccactgtactccagcctgaagagcgagactctgtctcaataatataataatagttattatttaattgcaacatgaagttggaagccattttctgttacttctttaaggagctaaatcttttatatttttgttttctctccccttgcgtttcatattttagcttatgatctaaatatatattttgtatattataatattttaggaatagcttaattaagaactcacagactttgacaaagtggtaactagacttttaattactagattcttcaaattaggcttaatgcctgctagcatgccaatccaatcccatgactgatgttattatacactatggcaaatacaaagttgtagtattatggttcttgatggtgtgatttacttatgtaaattatgtacaaatttaagttcaatgaaacactgatttaatgtactgaaaggtaaatagtaccatagtgaattattttctgtcttgccttaggtttatttttattatcttcaatattagaataaatgctaaattattttcatttaaggatttatgtagttgaatattatcatttagtaatatttaatcatttgaaataaaatttaaagctttaattgatctaatagagatggttttctacttttccactcttcctccctcttatgccttcacttttgttttctgtgcccagaattttcttcacattctttactacctgttttgtctattatatccaacccattttctttttattataattttgatttggggcatttgaagaaaatacagcaaaactacaagaactggtaataagcatgcataatctcacctacttagtgaacctaatataaacctaatataaagaaccaccgtatttgcaatatatataactggtgaaaaactagtgtccagaatatataaatgatccctatgaatcagtaagaaaaagacagtcaatagaaatt

SEQ ID NO: 39883 - DNA, 4867 bp, Homo sapiens
tacctccggctctcccgggtgacgacgggtagaaaagcaggaggagcggagaaaggagagggcggggtagggatgcagctgtgctgcattctgggaagggcgttggtccgtcgctcgcgcagcctcctgggagttgtagtcgcgatcctgaggtaacgggggtccagattttatggaaatgagctcaagaaagaaaagcaagtcaaccaacgaattgaaaatatgatgcaacaaaaagctcaaatcaccagccaacagctaagaaaagcacaattacagcaattctacagaggaacatttacattatgctacagtatcttcagttgtaccttcctgttcagcataaacatcatatgccaaagaggttgacagatttgcaatggaattagaacaaagccgaaatttgagcaataccatagtgcacattgacatggatgctttctatgcagctgtagaaatgagggacaatccagaattgaaggataaacccattgctgtaggatcaatgagtatgctgtctacttcaaattaccatgcaaggagatttggtgttcgtgcagccatgccaggatttattgctaagaggctgtgcccacaacttataatagtgccccccaactttgacaaataccgagctgtgagtaaagaggttaaggaaatacttgctgattatgatcccaattttatggccatgagtcttgatgaagcctacttgaatataacaaagcacttagaagaaagacaaaattggcctgaggataaaagaaggtatttcatcaaaatgggaagctctgtagaaaatgataatccaggaaaggaagttaataaactgagtgagcatgaacgatccatctctccactactttttgaagagagtccttctgatgtgcagcccccaggagatcctttccaagtgaactttgaagaacaaaacaatcctcaaatactccaaaactcagttgtttttggaacatcagcccaggaagtggtaaaggaaattcgtttcagaattgagcagaaaacaacactgacagccagtgcaggcattgccccaaatacaatgttagcaaaagtatgcagtgataagaataaaccaaatggacaataccaaattcttcccaatagacaagctgtgatggacttcatcaaggatttacccattagaaaggtttctggaataggaaaagttacagagaaaatgttaaaggcccttggaattattacatgtacagaactttaccaacagagggcattgctttctctccttttctctgaaacatcttggcattatttccttcatatctccttgggtctaggttcaacacacctgacgagggatggagagaggaaaagtatgagcgttgagaggacattcagtgagataaataaagcggaagagcaatacagcctatgtcaagaactttgcagtgagcttgctcaggatctacagaaagaaagacttaagggtagaactgttaccattaagttgaagaatgtgaattttgaagtaaaaactcgtgcatctacagtttcatctgttgtttctactgcagaagaaatatttgccattgctaaggaattgctaaaaacagaaattgatgctgattttccacatcccttgagattaaggcttatgggtgttcggatatctagttttcccaatgaagaggacaggaaacaccaacaaaggagcattattggctttttacaggctggaaaccaagccctgtcagccactgagtgtacattagagaaaactgacaaagataagtttgtaaaacctctagaaatgtctcataagaagagtttctttgataaaaaacgatcagaaaggaaatggagtcaccaagatacatttaaatgtgaagccgtgaataaacaaagtttccagacatcacaaccattccaagttttaaagaagaagatgaatgagaatttggaaatatcagagaattcagatgactgtcagatacttacctgtcctgtttgctttagggctcaagggtgcatcagtctggaagccttgaataaacatgtagatgaatgtcttgatggaccttcaatcagtgaaaactttaaaatgttctcgtgttcacatgtttctgctaccaaagttaacaagaaagaaaatgttcctgcttcttcactttgtgagaagcaagattatgaagcccatccaaaaattaaagaaatatcttcagtagattgtatagctttagtagatactatagataactcatctaaagcagaaagcatagatgctttaagtaataagcatagcaaggaagaatgttctagtctcccaagcaagtcttttaatattgaacactgtcatcagaattcttcttctactgtttcattggaaaacgaagatgttggatcatttagacaagaataccgccagccttacttatgtgaagtgaaaacaggccaagctctagtttgtcctgtttgtaacgtagaacaaaagacttcagatctaaccctgttcaatgtgcatgtggatgtttgcttaaataaaagttttatccaagaattaagaaaggataaatttaacccagttaatcaacccaaagaaagctccagaagtactggtagctcaagtggagtacagaaggctgtaacaagaacaaaaaggccaggattgatgacaaagtactcaacatcaaagaaaataaaaccaaacaatcccaaacatacccttgatatattttttaagtaaacattgaacattttatcattaatttttaattgaaactagttattttataatcaatgaatttgttctttctgattttaagtttgcagatttatttagtgaaggcaagtgcaataatccttcctcagatgatgtttgcttttctaagatacatatactgattctgtgtatcttttttataaccatgagaattttacttccattatacatcaattggaaatcaatcctgttaagagataattcttaaaagggaaattaggaatgggataagaaggtgatttttttattatttttatactgaatataaaaacatttgtaagggctctcaaagattcacacatgcctatattatcataagaatttttcagcacttaactactttgttggcattgatcctagtgtctttaaatacttcatgagcattcataattaaaatttatcttaagttctatgaagagtattaatgtaactagcataagtggttttcttcaggaaaataaatatcacagtattatctgtgttaaaatggtttttgcctaaaatataatttttaatttggcttttcttatttaaaattccattatcttatgaataagcacttgaatcagtttttaaaatatttagtctaagatgattcaaagtagttttattttaatacaggacttttaaatggcagtatttcatttcttgtcaattatgttggtactttccacaaatctataaagaaggataaattgtaccatcattttattataatcctcaagagaaaatgtgtaattcaaaagattaatgtgtattaaaacacattatgtatcttagttacatttctatcagtacttttattaatatttgtgaaagaagacagcttaatagtagttagcttaagtagtttctccaagtacttttgtgctatcaatgagttcttctcaaaaaataattagttaggccaggcacaatggctcacacctgtaatgccagccctttgggaggccgaatgggcagatcacttgaggtcaggagtttgagaccagcctcgccaacatggtgagaccctgtctctactaaaacgataaaaaaaaaaaaaaaattagccaggcttggtggcacacgcctgtaatcccagctactcagatggctgaggcaggagaactacttgaacctgggaggtcaaagctgcagtcagccaagatcttgccactgtactccagcctgaagagcgagactctgtctcaataatataataatagttattatttaattgcaacatgaagttggaagccattttctgttacttctttaaggagctaaatcttttatatttttgttttctctccccttgcgtttcatattttagcttatgatctaaatatatattttgtatattataatattttaggaatagcttaattaagaactcacagactttgacaaagtggtaactagacttttaattactagattcttcaaattaggcttaatgcctgctagcatgccaatccaatcccatgactgatgttattatacactatggcaaatacaaagttgtagtattatggttcttgatggtgtgatttacttatgtaaattatgtacaaatttaagttcaatgaaacactgatttaatgtactgaaaggtaaatagtaccatagtgaattattttctgtcttgccttaggtttatttttattatcttcaatattagaataaatgctaaattattttcatttaaggatttatgtagttgaatattatcatttagtaatatttaatcatttgaaataaaatttaaagctttaattgatctaatagagatggttttctacttttccactcttcctccctcttatgccttcacttttgttttctgtgcccagaattttcttcacattctttactacctgttttgtctattatatccaacccattttctttttattataattttgatttggggcatttgaagaaaatacagcaaaactacaagaactggtaataagcatgcataatctcacctacttagtgaacctaatataaacctaatataaagaaccaccgtatttgcaatatatataactggtgaaaaactagtgtccagaatatataaatgatccctatgaatcagtaagaaaaagacagtcaatagaaatt

SEQ ID NO: 39884 - DNA, 2603 bp, Homo sapiens
aggagctgagtgatctaatcaaacaaattccttcagagaacatctgtgaaggcacagtggtaaattaactataactgcataactagaaagcctctttaacttattttttggtagtgctgactctacccaaatttcaccaataaaattaagtgtaatgctaataaaattagtaaattacaaagaaattatagtttttggtgtgtttacatatgaactatatagtactaaggaagtttaatcaataagttttaactttttaaatttgtatacaactttttaattatttcatattattcattatggaatttcttgactttctttcctctaaaggtagctcaagtggagtacagaaggctgtaacaagaacaaaaaggccaggattgatgacaaagtactcaacatcaaagaaaataaaaccaaacaatcccaaacatacccttgatatattttttaagtaaacattgaacattttatcattaatttttaattgaaactagttattttataatcaatgaatttgttctttctgattttaagtttgcagatttatttagtgaaggcaagtgcaataatccttcctcagatgatgtttgcttttctaagatacatatactgattctgtgtatcttttttataaccatgagaattttacttccattatacatcaattggaaatcaatcctgttaagagataattcttaaaagggaaattaggaatgggataagaaggtgatttttttattatttttatactgaatataaaaacatttgtaagggctctcaaagattcacacatgcctatattatcataagaatttttcagcacttaactactttgttggcattgatcctagtgtctttaaatacttcatgagcattcataattaaaatttatcttaagttctatgaagagtattaatgtaactagcataagtggttttcttcaggaaaataaatatcacagtattatctgtgttaaaatggtttttgcctaaaatataatttttaatttggcttttcttatttaaaattccattatcttatgaataagcacttgaatcagtttttaaaatatttagtctaagatgattcaaagtagttttattttaatacaggacttttaaatggcagtatttcatttcttgtcaattatgttggtactttccacaaatctataaagaaggataaattgtaccatcattttattataatcctcaagagaaaatgtgtaattcaaaagattaatgtgtattaaaacacattatgtatcttagttacatttctatcagtacttttattaatatttgtgaaagaagacagcttaatagtagttagcttaagtagtttctccaagtacttttgtgctatcaatgagttcttctcaaaaaataattagttaggccaggcacaatggctcacacctgtaatgccagccctttgggaggccgaatgggcagatcacttgaggtcaggagtttgagaccagcctcgccaacatggtgagaccctgtctctactaaaacgataaaaaaaaaaaaaaaattagccaggcttggtggcacacgcctgtaatcccagctactcagatggctgaggcaggagaactacttgaacctgggaggtcaaagctgcagtcagccaagatcttgccactgtactccagcctgaagagcgagactctgtctcaataatataataatagttattatttaattgcaacatgaagttggaagccattttctgttacttctttaaggagctaaatcttttatatttttgttttctctccccttgcgtttcatattttagcttatgatctaaatatatattttgtatattataatattttaggaatagcttaattaagaactcacagactttgacaaagtggtaactagacttttaattactagattcttcaaattaggcttaatgcctgctagcatgccaatccaatcccatgactgatgttattatacactatggcaaatacaaagttgtagtattatggttcttgatggtgtgatttacttatgtaaattatgtacaaatttaagttcaatgaaacactgatttaatgtactgaaaggtaaatagtaccatagtgaattattttctgtcttgccttaggtttatttttattatcttcaatattagaataaatgctaaattattttcatttaaggatttatgtagttgaatattatcatttagtaatatttaatcatttgaaataaaatttaaagctttaattgatctaatagagatggttttctacttttccactcttcctccctcttatgccttcacttttgttttctgtgcccagaattttcttcacattctttactacctgttttgtctattatatccaacccattttctttttattataattttgatttggggcatttgaagaaaatacagcaaaactacaagaactggtaataagcatgcataatctcacctacttagtgaacctaatataaacctaatataaagaaccaccgtatttgcaatatatataactggtgaaaaactagtgtccagaatatataaatgatccctatgaatcagtaagaaaaagacagtcaatagaaatt

SEQ ID NO: 39885 - DNA, 2819 bp, Homo sapiens
tacctccggctctcccgggtgacgacgggtagaaaagcaggaggagcggagaaaggagagggcggggtagggatgcagctgtgctgcattctgggaagggcgttggtccgtcgctcgcgcagcctcctgggagttgtagtcgcgatcctgaggtaacggataagtttataccatggatagcacaaaggagaagtgtgacagttacaaagatgatcttctgcttaggatgggacttaatgataataaagcaggaatggaaggattagataaagagaaaattaacaaaattataatggaagccacgaaggggtccagattttatggaaatgagctcaagaaagaaaagcaagtcaaccaacgaattgaaaatatgatgcaacaaaaagctcaaatcaccagccaacagctaagaaaagcacaattacaggttgacagatttgcaatggaattagaacaaagccgaaatttgagcaataccatagtgcacattgacatggatgctttctatgcagctgtagaaatgagggacaatccagaattgaaggataaacccattgctgtaggatcaatgagtatgctgtctacttcaaattaccatgcaaggagatttggtgttcgtgcagccatgccaggatttattgctaagaggctgtgcccacaacttataatagtgccccccaactttgacaaataccgagctgtgagtaaagaggttaaggaaatacttgctgattatgatcccaattttatggccatgagtcttgatgaagcctacttgaatataacaaagcacttagaagaaagacaaaattggcctgaggataaaagaaggtatttcatcaaaatgggaagctctgtagaaaatgataatccaggaaaggaagttaataaactgagtgagcatgaacgatccatctctccactactttttgaagagagtccttctgatgtgcagcccccaggagatcctttccaagtgaactttgaagaacaaaacaatcctcaaatactccaaaactcagttgtttttggaacatcagcccaggaagtggtaaaggaaattcgtttcagaattgagcagaaaacaacactgacagccagtgcaggcattgccccaaatacaatgttagcaaaagtatgcagtgataagaataaaccaaatggacaataccaaattcttcccaatagacaagctgtgatggacttcatcaaggatttacccattagaaaggtttctggaataggaaaagttacagagaaaatgttaaaggcccttggaattattacatgtacagaactttaccaacagagggcattgctttctctccttttctctgaaacatcttggcattatttccttcatatctccttgggtctaggttcaacacacctgacgagggatggagagaggaaaagtatgagcgttgagaggacattcagtgagataaataaagcggaagagcaatacagcctatgtcaagaactttgcagtgagcttgctcaggatctacagaaagaaagacttaagggtagaactgttaccattaagttgaagaatgtgaattttgaagtaaaaactcgtgcatctacagtttcatctgttgtttctactgcagaagaaatatttgccattgctaaggaattgctaaaaacagaaattgatgctgattttccacatcccttgagattaaggcttatgggtgttcggatatctagttttcccaatgaagaggacaggaaacaccaacaaaggagcattattggctttttacaggctggaaaccaagccctgtcagccactgagtgtacattagagaaaactgacaaagataagtttgtaaaacctctagaaatgtctcataagaagagtttctttgataaaaaacgatcagaaaggaaatggagtcaccaagatacatttaaatgtgaagccgtgaataaacaaagtttccagacatcacaaccattccaagttttaaagaagaagatgaatgagaatttggaaatatcagagaattcagatgactgtcagatacttacctgtcctgtttgctttagggctcaagggtgcatcagtctggaagccttgaataaacatgtagatgaatgtcttgatggaccttcaatcagtgaaaactttaaaatgttctcgtgttcacatgtttctgctaccaaagttaacaagaaagaaaatgttcctgcttcttcactttgtgagaagcaagattatgaagcccatccaaaaattaaagaaatatcttcagtagattgtatagctttagtagatactatagataactcatctaaagcagaaagcatagatgctttaagtaataagcatagcaaggaagaatgttctagtctcccaagcaagtcttttaatattgaacactgtcatcagaattcttcttctactgtttcattggaaaacgaagatgttggatcatttagacaagaataccgccagccttacttatgtgaagtgaaaacaggccaagctctagtttgtcctgtttgtaacgtagaacaaaagacttcagatctaaccctgttcaatgtgcatgtggatgtttgcttaaataaaagttttatccaagaattaagaaaggataaatttaacccagttaatcaacccaaagaaagctccagaagtactggtagctcaagtggagtacagaaggctgtaacaagaacaaaaaggccaggattgatgacaaagtactcaacatcaaagaaaataaaaccaaacaatcccaaacatacccttgatatattttttaagtaaacattgaacattttatcattaatttttaattgaa

SEQ ID NO: 39886 - DNA, 2731 bp, Homo sapiens
tacctccggctctcccgggtgacgacgggtagaaaagcaggaggagcggagaaaggagagggcggggtagggatgcagctgtgctgcattctgggaagggcgttggtccgtcgctcgcgcagcctcctgggagttgtagtcgcgatcctgaggtaacggataagtttataccatggatagcacaaaggagaagtgtgacagttacaaagatgatcttctgcttaggatgggacttaatgataataaagcaggaatggaaggattagataaagagaaaattaacaaaattataatggaagccacgaaggggtccagattttatggaaatgagctcaagaaagaaaagcaagtcaaccaacgaattgaaaatatgatgcaacaaaaagctcaaatcaccagccaacagctaagaaaagcacaattacaggttgacagatttgcaatggaattagaacaaagccgaaatttgagcaataccatagtgcacattgacatggatgctttctatgcagctgtagaaatgagggacaatccagaattgaaggataaacccattgctgtaggatcaatgagtatgctgtctacttcaaattaccatgcaaggagatttggtgttcgtgcagccatgccaggatttattgctaagaggctgtgcccacaacttataatagtgccccccaactttgacaaataccgagctgtgagtaaagaggttaaggaaatacttgctgattatgatcccaattttatggccatgagtcttgatgaagcctacttgaatataacaaagcacttagaagaaagacaaaattggcctgaggataaaagaaggtatttcatcaaaatgggaagctctgtagaaaatgataatccaggaaaggaagttaataaactgagtgagcatgaacgatccatctctccactactttttgaagagagtccttctgatgtgcagcccccaggagatcctttccaagtgaactttgaagaacaaaacaatcctcaaatactccaaaactcagttgtttttggaacatcagcccaggaagtggtaaaggaaattcgtttcagaattgagcagaaaacaacactgacagccagtgcaggcattgccccaaatacaatgttagcaaaagtatgcagtgataagaataaaccaaatggacaataccaaattcttcccaatagacaagctgtgatggacttcatcaaggatttacccattagaaaggtttctggaataggaaaagttacagagaaaatgttaaaggcccttggaattattacatgtacagaactttaccaacagagggcattgctttctctccttttctctgaaacatcttggcattatttccttcatatctccttgggtctaggttcaacacacctgacgagggatggagagaggaaaagtatgagcgttgagaggacattcagtgagataaataaagcggaagagcaatacagcctatgtcaagaactttgcagtgagcttgctcaggatctacagaaagaaagacttaagaagaaatatttgccattgctaaggaattgctaaaaacagaaattgatgctgattttccacatcccttgagattaaggcttatgggtgttcggatatctagttttcccaatgaagaggacaggaaacaccaacaaaggagcattattggctttttacaggctggaaaccaagccctgtcagccactgagtgtacattagagaaaactgacaaagataagtttgtaaaacctctagaaatgtctcataagaagagtttctttgataaaaaacgatcagaaaggaaatggagtcaccaagatacatttaaatgtgaagccgtgaataaacaaagtttccagacatcacaaccattccaagttttaaagaagaagatgaatgagaatttggaaatatcagagaattcagatgactgtcagatacttacctgtcctgtttgctttagggctcaagggtgcatcagtctggaagccttgaataaacatgtagatgaatgtcttgatggaccttcaatcagtgaaaactttaaaatgttctcgtgttcacatgtttctgctaccaaagttaacaagaaagaaaatgttcctgcttcttcactttgtgagaagcaagattatgaagcccatccaaaaattaaagaaatatcttcagtagattgtatagctttagtagatactatagataactcatctaaagcagaaagcatagatgctttaagtaataagcatagcaaggaagaatgttctagtctcccaagcaagtcttttaatattgaacactgtcatcagaattcttcttctactgtttcattggaaaacgaagatgttggatcatttagacaagaataccgccagccttacttatgtgaagtgaaaacaggccaagctctagtttgtcctgtttgtaacgtagaacaaaagacttcagatctaaccctgttcaatgtgcatgtggatgtttgcttaaataaaagttttatccaagaattaagaaaggataaatttaacccagttaatcaacccaaagaaagctccagaagtactggtagctcaagtggagtacagaaggctgtaacaagaacaaaaaggccaggattgatgacaaagtactcaacatcaaagaaaataaaaccaaacaatcccaaacatacccttgatatattttttaagtaaacattgaacattttatcattaatttttaattgaa

SEQ ID NO: 39887 - DNA, 2963 bp, Homo sapiens
tacctccggctctcccgggtgacgacgggtagaaaagcaggaggagcggagaaaggagagggcggggtagggatgcagctgtgctgcattctgggaagggcgttggtccgtcgctcgcgcagcctcctgggagttgtagtcgcgatcctgaggtaacggataagtttataccatggatagcacaaaggagaagtgtgacagttacaaagatgatcttctgcttaggatgggacttaatgataataaagcaggaatggaaggattagataaagagaaaattaacaaaattataatggaagccacgaaggggtccagattttatggaaatgagctcaagaaagaaaagcaagtcaaccaacgaattgaaaatatgatgcaacaaaaagctcaaatcaccagccaacagctaagaaaagcacaattacaggttgacagatttgcaatggaattagaacaaagccgaaatttgagcaataccatagtgcacattgacatggatgctttctatgcagctgtagaaatgagggacaatccagaattgaaggataaacccattgctgtaggatcaatgagtatgctgtctacttcaaattaccatgcaaggagatttggtgttcgtgcagccatgccaggatttattgctaagaggctgtgcccacaacttataatagtgccccccaactttgacaaataccgagctgtgagtaaagaggttaaggaaatacttgctgattatgatcccaattttatggccatgagtcttgatgaagcctacttgaatataacaaagcacttagaagaaagacaaaattggcctgaggataaaagaaggtatttcatcaaaatgggaagctctgtagaaaatgataatccaggaaaggaagttaataaactgagtgagcatgaacgatccatctctccactactttttgaagagagtccttctgatgtgcagcccccaggagatcctttccaagtgaactttgaagaacaaaacaatcctcaaatactccaaaactcagttgtttttggaacatcagcccaggaagtggtaaaggaaattcgtttcagaattgagcagaaaacaacactgacagccagtgcaggcattgccccaaatacaatgttagcaaaagtatgcagtgataagaataaaccaaatggacaataccaaattcttcccaatagacaagctgtgatggacttcatcaaggatttacccattagaaaggtttctggaataggaaaagttacagagaaaatgttaaaggcccttggaattattacatgtacagaactttaccaacagagggcattgctttctctccttttctctgaaacatcttggcattatttccttcatatctccttgggtctaggttcaacacacctgacgagggatggagagaggaaaagtatgagcgttgagaggacattcagtgagataaataaagcggaagagcaatacagcctatgtcaagaactttgcagtgagcttgctcaggatctacagaaagaaagacttaagggtagaactgttaccattaagttgaagaatgtgaattttgaagtaaaaactcgtgcatctacagtttcatctgttgtttctactgcagaagaaatatttgccattgctaaggaattgctaaaaacagaaattgatgctgattttccacatcccttgagattaaggcttatgggtgttcggatatctagttttcccaatgaagaggacaggaaacaccaacaaaggagcattattggctttttacaggctggaaaccaagccctgtcagccactgagtgtacattagagaaaactgacaaagataagtttgtaaaacctctagaaatgtctcataagaagagtttctttgataaaaaacgatcagaaaggaaatggagtcaccaagatacatttaaatgtgaagccgtgaataaacaaagtttccagacatcacaaccattccaagttttaaagaagaagatgaatgagaatttggaaatatcagagaattcagatgactgtcagatacttacctgtcctgtttgctttagggctcaagggtgcatcagtctggaagccttgaataaacatgtagatgaatgtcttgatggaccttcaatcagtgaaaactttaaaatgttctcgtgttcacatgtttctgctaccaaagttaacaagaaagaaaatgttcctgcttcttcactttgtgagaagcaagattatgaagcccatccaaaaattaaagaaatatcttcagtagattgtatagctttagtagatactatagataactcatctaaagcagaaagcatagatgctttaagtaataagcatagcaaggaagaatgttctagtctcccaagcaagtcttttaatattgaacactgtcatcagaattcttcttctactgtttcattggaaaacgaagatgttggatcatttagacaagaataccgccagccttacttatgtgaagtgaaaacaggccaagctctagtttgtcctgtttgtaacgtagaacaaaagacttcagatctaaccctgttcaatgtgcatgtggatgtttgcttaaataaaagttttatccaagaattaagaaaggataaatttaacccagttaatcaacccaaagaaagctccagaagtactggtagctcaagtggagtacagaaggctgtaacaagaacaaaaaggtatggctaatttgagctttaataaagctggctacaatatgaaaattcaattattttataaattattaagtaatcaatattaaaaatgaattattttctagaatctcttcctgcattttaattgtgtgttccttttcattctaggccaggattgatgacaaagtactcaacatcaaagaaaataaaaccaaacaatcccaaacatacccttgatatattttttaagtaaacattgaacattttatcattaatttttaattgaa

SEQ ID NO: 39888 - DNA, 1898 bp, Homo sapiens
tacctccggctctcccgggtgacgacgggtagaaaagcaggaggagcggagaaaggagagggcggggtagggatgcagctgtgctgcattctgggaagggcgttggtccgtcgctcgcgcagcctcctgggagttgtagtcgcgatcctgaggtaacggataagtttataccatggatagcacaaaggagaagtgtgacagttacaaagatgatcttctgcttaggatgggacttaatgataataaagcaggaatggaaggattagataaagagaaaattaacaaaattataatggaagccacgaaggggtccagattttatggaaatgagctcaagaaagaaaagcaagtcaaccaacgaattgaaaatatgatgcaacaaaaagctcaaatcaccagccaacagctaagaaaagcacaattacaggttgacagatttgcaatggaattagaacaaagccgaaatttgagcaataccatagtgcacattgacatggatgctttctatgcagctgtagaaatgagggacaatccagaattgaaggataaacccattgctgtaggatcaatgagtatgctgtctacttcaaattaccatgcaaggagatttggtgttcgtgcagccatgccaggatttattgctaagaggctgtgcccacaacttataatagtgccccccaactttgacaaataccgagctgtgagtaaagaggttaaggaaatacttgctgattatgatcccaattttatggccatgagtcttgatgaagcctacttgaatataacaaagcacttagaagaaagacaaaattggcctgaggataaaagaaggtatttcatcaaaatgggaagctctgtagaaaatgataatccaggaaaggaagttaataaactgagtgagcatgaacgatccatctctccactactttttgaagagagtccttctgatgtgcagcccccaggagatcctttccaagtgaactttgaagaacaaaacaatcctcaaatactccaaaactcagttgtttttggaacatcagcccaggaagtggtaaaggaaattcgtttcagaattgagcagaaaacaacactgacagccagtgcaggcattgccccaaatacaatgttagcaaaagtatgcagtgataagaataaaccaaatggacaataccaaattcttcccaatagacaagctgtgatggacttcatcaaggatttacccattagaaaggtttctggaataggaaaagttacagagaaaatgttaaaggcccttggaattattacatgtacagaactttaccaacagagggcattgctttctctccttttctctgaaacatcttggcattatttccttcatatctccttgggtctaggttcaacacacctgacgagggatggagagaggaaaagtatgagcgttgagaggacattcagtgagataaataaagcggaagagcaatacagcctatgtcaagaactttgcagtgagcttgctcaggatctacagaaagaaagacttaagggtagaactgttaccattaagttgaagaatgtgaattttgaagtaaaaactcgtgcatctacagtttcatctgttgtttctactgcagaagaaatatttgccattgctaaggaattgctaaaaacagaaattgatgctgattttccacatcccttgagattaaggcttatgggttcggatatctggtttcccaatgagagggcaggaacccaacaaggggcatattgggttttaaggcggaaacaagccgtagcactggtgtcttaagaaacgggcagatattggtaactctaaaggcctaaaagtccggaaacacgcgagggggtcccaaaacaggaggcgaacaaagaccgagaaacccctaccagac

SEQ ID NO: 39889 - DNA, 371 bp, Homo sapiens
gacattcagtgagataaataaagcggaagagcaatacagcctatgtcaagaactttgcagtgagcttgctcaggatctacagaaagaaagacttaaggtgctttattttgatatggtgtccttagtttttaagttttttaatagtaaaatgctaccttaaaagctagagttagattacacatttcttaaagatgaatacaaattaataaacgtcagaatagtgtattcctatccccaacagtcagatacaaatccaattctgacccatatctggagtctgtgatgaggtgattctatgaagaagcaccttatgagaatagagtggttcagtataattcagaggactttacttctgtacctcaggagtacat

SEQ ID NO: 39890 - DNA, 2606 bp, Homo sapiens
  misc_feature (1455)..(1455): n is a, c, g, or t
  misc_feature (1490)..(1490): n is a, c, g, or t
  misc_feature (1513)..(1513): n is a, c, g, or t
  misc_feature (1544)..(1544): n is a, c, g, or t
  misc_feature (1636)..(1636): n is a, c, g, or t
  misc_feature (2410)..(2410): n is a, c, g, or t
  misc_feature (2442)..(2442): n is a, c, g, or t
tacctccggctctcccgggtgacgacgggtagaaaagcaggaggagcggagaaaggagagggcggggtagggatgcagctgtgctgcattctgggaagggcgttggtccgtcgctcgcgcagcctcctgggagttgtagtcgcgatcctgaggtaacggataagtttataccatggatagcacaaaggagaagtgtgacagttacaaagatgatcttctgcttaggatgggacttaatgataataaagcaggaatggaaggattagataaagagaaaattaacaaaattataatggaagccacgaaggggtccagattttatggaaatgagctcaagaaagaaaagcaagtcaaccaacgaattgaaaatatgatgcaacaaaaagctcaaatcaccagccaacagctaagaaaagcacaattacaggttgacagatttgcaatggaattagaacaaagccgaaatttgagcaataccatagtgcacattgacatggatgctttctatgcagctgtagaaatgagggacaatccagaattgaaggataaacccattgctgtaggatcaatgagtatgctgtctacttcaaattaccatgcaaggagatttggtgttcgtgcagccatgccaggatttattgctaagaggctgtgcccacaacttataatagtgccccccaactttgacaaataccgagctgtgagtaaagaggttaaggaaatacttgctgattatgatcccaattttatggccatgagtcttgatgaagcctacttgaatataacaaagcacttagaagaaagacaaaattggcctgaggataaaagaaggtatttcatcaaaatgggaagctctgtagaaaatgataatccaggaaaggaagttaataaactgagtgagcatgaacgatccatctctccactactttttgaagagagtccttctgatgtgcagcccccaggagatcctttccaagtgaactttgaagaacaaaacaatcctcaaatactccaaaactcagttgtttttggaacatcagcccaggaagtggtaaaggaaattcgtttcagaattgagcagaaaacaacactgacagccagtgcaggtatttaaaagagtattgatggccactgtagttataattttcagactggctaatttaagtgtaatattagtagtttctcattataaagtatatagtaacattttacttacttagtctttcattcaacttctaacaactttacctattcagaatagctgtgaacctagtaagtaaattggaattaagcagactatgagcctgaaggaaaaaaaagattatacgtttctttctttttttttttttttgagatggagtcttgctctgttgcccaggttggagtgcagtggggcgatctcattcagcttactgcaacctctgcctcctgggttcaagcgattctcctgcctcngcctcccaagtaggtgggactacaggcgcatgccnccatgcccagctaattttttgtnttttcagtagtgacggtgtttcaccatgttngccaggatggtctccatatcctgacctcatgatccgcccaccttggcctcccaaagtgctgggattacaggcctgagccaccgcgcccgacncataaatttcatatagctatctttttctagcacaaaatatatttttattggttttgcatgtaataacttgagtattagtttttccttgggagacttcaatcctgtccaagattacattgcaggagagaacccagacggccacaaggtaagagacaaaagaaatactaactagcaacatagcaatccagaacaatctggtaaaaggaaaaacaaatttacatatgttgataacccatgaggccatcactgtctcttaacataataactgttattcatcatgaggaccctgaactatcttgtaaaagccatattgtgattaggtaaatcttttctttctacaccaaagcatgagaatgaataatgcattttaggaagatctatataacaattaaaatgaactgtttaatgaatatatttgaatatagctatttcaaattatcttaattaggactcctagaaattgtgaaacatctttttgaaaaatagtaatttgttttgtgaataacataaaaaggatacaccatctaattatcattattttaaatatactgtaaccagaatctttgattttttgctttatgtggataatctacgcaaaagacattttcaaagagtaaacatccaccctaaattatattctgtatcttttcttagagatagatatagaaccactataaaaacaatctgggctgggcatgatggctcacgcctgtaatcccagcactttgggaggccgaagctcgtggactacctgaggtcaggagttcgagaccngcctgaccaatatggtgaaacccccatctctnctaaaaatacaaaaattagccaggcatggtgttgcgtgcctctaatcccagctactcgggaggctgagacaggagaatcgcttgaacccaggaggcggaggttgcagtgagccaagatcacgccattgcactccagcctgggcgacagagcaagactccatctg

SEQ ID NO: 39891 - DNA, 1697 bp, Homo sapiens
atctttttgaattgtcttatatgagtgagtactttgtggcagaagatctagacattttaataaaacattttaatacaaatatctagatattttagatacatatttaagtatctaagctgaggtgaaaggatcactcgaacccaggagtttgaggctgcattgagcaattttctcaccactgtacttcagcctgggcaacagagcaagaacctgtctcagtcaatcaataaatgtatgtatatatatatatgtatatatgtcagaccaccgtctgaaattgctgttcatgattggaaatcgaactggaaacccgaaggcaggagatgtatgctcccttgggatgtatggggaaatcacacagagctgttagtacttcagtcatgggatttgctctcatgctatgcatatgggcctcacaacttgtaaatgccactggaagatggcttatctaaggttccttattttgtggtctttcccccttagttctgcagtgagtggggcaaagcgtgtcactgaccttttgaatggaaaacactggaagccttagcgttcttaattcctgaaatgttcattttttcttctaagcaactgggcttcagaggagattagggcaggcaataacagtgttgacaccagggcaactgttttctcctgtttatgggtatttattcaacatctgctttctgctaagctccatggaaggcacagaggaaacacagcagagtccatgccttagagactttgtacctgatgaattgagtggtatcaggacaatgctatttaatgtttgatccatcccttctctaagcacatctcagatttctgtgctacctgatttaaccctttcagttcatagaacccagaaggataaggtgaaaagatagaccgggaaaagtaatgcaagtggccaagagtagcttccacttcaaagttcctcatgtgtgtgtgctaacattgtgacttctgttcagtcattgtcagtataaactgtacattggaatcatttgtagctttttaaaaaatgcctatgcctcaccctagacctaccacatcaaaatctcaggatagagtctcaagctaaaaagcctctatttgagccaggcttattggcacctgcctgtagtcccgtactcagaaggctgaagtgagaggatcgcttgaactcaggagtttaacgccagcagaggcaatagggcaaaatagcgagatctcatctctttaaaaaaaaaaaaaaagaaaagaaaagcggtttttgttttgtttgtttgtattttattttaattattttacatagagacaagatcgcactatattgcccaggctggtcttgaactcctggcctcaagtgatccacccgccttggcttcccaaagtgctgacattacaggcgtgagccaccatggccgaccccctgtttggttttgatatccagacaagggtagctttctggttgtttatgacagtagcagtgttgacaaacaactaattttaaagagagagagctctattggctaaggaaaaatgtatgagaaaagatcatagatttttaaaagtttttaagttttagtttgtgactttggctttgccaataaatcaacaaatacatgatgaatgcttactctattacagttggtcctctgtatccggaacatggattcaaccaatcacaaattgaaaatatttggggaaaaaaaaga

SEQ ID NO: 39892 - DNA, 864 bp, Homo sapiens
ctctcattaaatttaatagtacttgttgctttggtgtagtgaaatgaatgccttgatgaaattgcattgcaccatttttgaaagagagaatactcaaacgtgtcacttctgtttcttgcaagcaactgtgatcctgagctgtgcacacttctggttgggattatttctggtttctacttcctgtttgaagatgtggcatggagagtgtaagttgaagagatgagtgcggggctcatctatccctggaattgtctttcccacaatccctgacacagaatatgagccatacaggaattctgaagaaatgggtctcttgccacctcccagtaaaagattatttttttaaaaaaaaaggctctgctttgacctgaagtattttatctatcctcagtctcaggacactgttgatggaattaaggccaagcacatctgcaaaaaagacattgctggaggaggtgcaaagagctggaaaccaagtctccagtcctgggaaaagcagtggtatggaaaagcaatggaaagagcattttgaaaatgccattccactgttttctggcctttatgatttctgctgagaaatccactgttagtctgatggggtctccttcatagcaccaatgacctgaagagccttgttgaaggaagactccatctgatgactcagagcaagtattttttagtgtgttattgttattagcagaaagagggccataaaatacatggggcaagctgaatatatcttaggcaaaagaagaaaatattcaaattcttatgttattttatctaattattttatctctttttgtgtgtgacttataatgtgtgtattgtattaataaaagtatataaacatgtagtttacaa

SEQ ID NO: 39893 - DNA, 543 bp, Homo sapiens
ccctactgaagtccagaggcacttttctgaaaggctctgctttgacctgaagtattttatctatcctcagtctcaggacactgttgatggaattaaggccaagcacatctgcaaaaaagacattgctggaggaggtgcaaagagctggaaaccaagtctccagtcctgggaaaagcagtggtatggaaaagcaatggaaagagcattttgaaaatgccattccactgttttctggcctttatgatttctgctgagaaatccactgttagtctgatggggtctccttcatagcaccaatgacctgaagagccttgttgaaggaagactccatctgatgactcagagcaagtattttttagtgtgttattgttattagcagaaagagggccataaaatacatggggcaagctgaatatatcttaggcaaaagaagaaaatattcaaattcttatgttattttatctaattattttatctctttttgtgtgtgacttataatgtgtgtattgtattaataaaagtatataaacatgtagtttacaa

SEQ ID NO: 39894 - DNA, 507 bp, Homo sapiens
ctcctgggctctctgactgcagtcaggccaaggaccagggaacctgcatctgttcactagggccaagcacatctgcaaaaaagacattgctggaggaggtgcaaagagctggaaaccaagtctccagtcctgggaaaagcagtggtatggaaaagcaatggaaagagcattttgaaaatgccattccactgttttctggcctttatgatttctgctgagaaatccactgttagtctgatggggtctccttcatagcaccaatgacctgaagagccttgttgaaggaagactccatctgatgactcagagcaagtattttttagtgtgttattgttattagcagaaagagggccataaaatacatggggcaagctgaatatatcttaggcaaaagaagaaaatattcaaattcttatgttattttatctaattattttatctctttttgtgtgtgacttataatgtgtgtattgtattaataaaagtatataaacatgtagtttacaa

SEQ ID NO: 39895 - DNA, 562 bp, Homo sapiens
ctctcattaaatttaatagtacttgttgctttggtgtagtgaaatgaatgccttgatgaaattgcattgcaccatttttgaaagagagaatactcaaacgtgtcacttctgtttcttgcaagcaactgtgatcctgagctgtgcacacttctggttgggattatttctggtttctacttcctgtttgaagatgtggcatggagagtgtaagttgaagagatgagtgcggggctcatctatccctggaattgtctttcccacaatccctgacacagaatatgagccatacaggaattctgaagaaatgggtctcttgccacctcccagtaaaagattatttttttaaaaaaaaaggtaaatctaaacttgtgctttatcttgatatgaaaatacagacagcaatagaaaaatttaaaaattaactgggcatggtggtgcatacctgtaatatcagctacttgggaaactgaagtaagaggatcacttgaacccgggagtttgaggctacagtgacctgtcactgcagtccaggctgggcaagagagcaagaccctgtatctta

SEQ ID NO: 39896 - DNA, 625 bp, Homo sapiens
aaaagtttttaccctgaggtgttgctaattcatgaacctattctcttgacagtttttccctccaatataacctatatcttattaaatgtcttttcttcttctagattgtttccaatagtagctcaattttagctttgttcaggctccaaattagaaaaacgctgagattagccaaatatttgaacactgtaaggtattaatcagtttaatctgaaaaaaaaggtataagaacacttcctacagttccagaagagtgagctgtcctggctgagggttatttcataagcacctacatgtatggacactaatggtgagtcatcaccagaggaagatgaaaaatctggactctgtatttgtgttgatgccacatttcagggcaaaagttttgcatccagaccatgcactctagcatcctaagtccatggctgctgtggcagtggctcttttcacaccaaaaatggagggagaaaaccagctaactcctgggctctctgactgcagtcaggccaaggaccagggaacctgcatctgttcactagggtgaggatttaaagcatcttctgggttttcagatcctaccaagaaaagcttcagaggcagaccttgagtctctgtgaaccccatc

SEQ ID NO: 39897 - DNA, 363 bp, Homo sapiens
taatgataaagtgtagtccctaccttcctagaacttcgagaatggtggttagttgtgggtagaatagcacttttttttgttataatctacagtttagtatagtggccaacatctgacttaatgagctaaggcagttgttggtttacatattactttctagtgtgagaaaatgtcaatgtgtttcttcaacagtgagttttaaaaataactattgggtactaggcttagtacctgggtgatgaaataatctgtacaacaaactctgtgacatgagtttacctatataaataaataaaaaatagaagttaaaaaaaattttccttatgctaggactggggtgactaccaagtagcatgagtgagt

SEQ ID NO: 39898 - DNA, 374 bp, Homo sapiens
taaacctcttttctttataaactacccagcctcgggtattcctttatagcaacacaatggtctaagacaccctgaattcactgtaaactggattaaggttataagcttcagtagattcagcttgaatatttaggacagaattcttcactgggaatgctgtgtacttcatatggcattacatcttctgcaggtatttctggcaaataaatataagcatttatcttaagtacgtacttggaaatgaaatttctgagtcatagcatatacaaatgtagttttttcaagtggtcatatcagttttcacccttcaaattcatcctacaaacagagttccagtggctccacatcttcaccaacatttgaaattgtcagtc

SEQ ID NO: 39899 - DNA, 820 bp, Homo sapiens
aatcctttctgggaagcgtagtcttaggtgtctggagaagtcgcccggtttctgcttgctggtcgcgaaattttatagctataattaactcagggcggaacagctagcagaatcctcagcgttcgggcaaagggcagagaatccagccagaagcaacatgtagatctaatgaccttctccaggagtcgaggacccactacctcgctgaattctcagagtcaaaatgcgtctctacctgctggtcccagaacagtcccctgctgctgcattgaatgaatctcatctcacttcctcgagtcagccctacctatatttgatgatcacaaaccttatccttacgttgccagcagtaacattctgcatccctcacccactccactgtgtccttttcctcccactgatcttcactctgccttttctaggggaactctgaacagtatttctgagaaggggtaggtaatgtgcgctttgcttcagtctgagtggattccatcaacctctgcatagagcaggggtggaaagaaatcctgtgtcattgcagcttcttttcgatctaagctttcatggccttattatgtagtttacatgtttttgtcagacaacaggatgttttgcctatatcattctatttccctttctcaaatgttggagatgccatagtaattaatgaagtacaaatccattttaaaatatcttactcctggccaggcgcagtggctcacttctgtaatcccagcactttgggaggcggaggcgagcggatcacttgaggtcaggagtttgagaccagcctggccaacgtggtaaaaccccgtctcta

SEQ ID NO: 39900 - DNA, 804 bp, Homo sapiens
aatcctttctgggaagcgtagtcttaggtgtctggagaagtcgcccggtttctgcttgctggtcgcgaaattttatagctataattaactcagggcggaacagctagcagaatcctcagcgttcgggcaaagggcagagaatccagccagaagcaacatgtgtaagttgttacattcagtccgggctcagtgtcattcaattttacaaaattttgttgtgtgctgactctgccagcgactgtgctgagggctttgcccccaaaattgccttcgaaatgtagtgaggggggcgggcgtagtggctcactcctgtaatcccaccactgtgggaagccgaggcgggccgatcacctgaggtcaggagttcgagaccagcctggccaacatggtgaaacaccgttgttactaaaagtacaaaaattagccgggcgtggtggcggccgccttagtcctggctactcaggaggctgaggcaggagaatcgcttgaacccgggaggcggaggttgcagtaagcccatgtggcgccactgcattccgtcctgagcgacagagcgagactccgtctcaaaaaaataaataaacaaataaataaaagaaagaaagaaaagaaatgtagtgagggaagtagtgtgtggaaaagtaatacaataggaagccatgtagcagcgatcataaatgaactagagctaccaggtagcagcatcaatggctgaatctcagaaacacgatgttcagtgaaagaaggaagtctaacaacacttttgtaaagttcaaaccaagtaaaactaatgttgtttagaga

SEQ ID NO: 39901 - DNA, 421 bp, Homo sapiens
gtaaatggtttttgtatgtgtgaatgaatggaagactgaagttagttattatagatgagatattatggggccattccgagtccagtattcaaggagtttgcaaagttgcagatgacaagtttgctaatgtgtgctgagtgttcgtgcctagtagcatgttaagtggtttgcttgggttgtttcattcagtcctcacagcggactcgtgaattaagtgctgttattatcacgtttttgcagatgaggaaactgaggctcaaagaagataatgtgcccaaggtcaccttgctaggaaagagtggagctgagatttaaactgtgactttaagcccaagttcaaggcttcttactagttttaactacattcccataccccttttaatcaatcatgtaaataaaatcttaattcttttaaaaaatt

SEQ ID NO: 39902 - DNA, 633 bp, Homo sapiens
aatcctttctgggaagcgtagtcttaggtgtctggagaagtcgcccggtttctgcttgctggtcgcgaaattttatagctataattaactcagggcggaacagctagcagaatcctcagcgttcgggcaaagggcagagaatccagccagaagcaacatgtagatctaatgaccttctccaggagtcgaggacccactacctcgctgaattctcagagtcaaaatgcgtctctacctgctggtcccagaacagtcccctgctgctgcattgaatgaatctcatctcacttcctcgagtcagccctacctatatttgatgatcacaaaccttatccttacgttgccagcagtaacattctgcatccctcacccactccactgtgtccttttcctcccactgatcttcactctgccttttctaggggaactctgaacagtatttctgagaagggatgaggaaactgaggctcaaagaagataatgtgcccaaggtcaccttgctaggaaagagtggagctgagatttaaactgtgactttaagcccaagttcaaggcttcttactagttttaactacattcccataccccttttaatcaatcatgtaaataaaatcttaattcttttaaaaaatt

SEQ ID NO: 39903 - DNA, 368 bp, Homo sapiens
aatccagaattggaacccgggcagccttgctccagagtccggtctcacttaatgagtactagataattctctgcatgtcagatgggtacactcttcttgaacctgctagttcttttggagccagatctggggagggggagcaaggcaggagttgagcaaatagcaggaacagactgtgtgacacttgctgggaggctccgaggctccagctccctgagcttagaagtgcggagtttatctatcccctgcgcgattcctgggggaagggaaggacaggcgaaggggcatggcggggcagtcctggtgtctccaggaccagggtcagggggaggccagagcaattagcctggctgaggcctctgctaact

SEQ ID NO: 39904 - DNA, 478 bp, Homo sapiens
gagtatttgccattagtagatgaagtcagcatactatttttataggaattgaactacattaactaattgcttttctatttttgattttgatactgtttccgtttgattctgtttgatcaaatctgctgcagtcattttttagtttgaaagatcctaatacttctccctagctccacatttggaagactgtcaactcctgtggagtaatttgtcaagaatgtagagttcatgaaggtggacaacatctttataaagaccaagaacctagctcagtgccttcctttcagacgacaggcttaaaggaaaaaaaagttacgtgttgcacaacttcagtagttattcttggctttatggcggtccaggcatgttcttcacatggactgtgagaatataatgtggtaggggctccctggagctgagcagtgtggcgatggtgatgttgaaatacagtgggtggggaatggcaggtgagacagtt

SEQ ID NO: 39905 - DNA, 424 bp, Homo sapiens
aaaagtgcgggaaagttgagtaacgcaagcatccaactgatgcggagcacctgtactcactccagttccaaacacatttatttttaccaagttgctaagttgacagcagagcagacagctccagctttgctagggcattagaggaagagaacattgacttggagcattggggccacctttattatagaacacttaatgtagatattgtatagagtgaccagacaatttatacccaaaatgggatgtttttgtttaggacaaatattaaagtgccctgggcaagcagggacatatggactggtatttcgaggaaccttatctgatagggaatcatatagtgtttgtaggaagtgatcctttgggctgtggagctacattctgtcctgtaccaatatagtactgtcaactcaaagaaaggaagaaa

SEQ ID NO: 39906 - DNA, 388 bp, Homo sapiens
aaaaagagaacaatatcacatttaaagtacgagtgtctaagaggaagtttatagtgcatgcctcacattttaaattcagcaagaaagaacagggacatcctttttctcactggcaagtttgtaatctgtgtaaaacactaggtatgtttccataagctatttaaatgcaagtgacattcagaaagaagatccagggatgaacacttgtcatatgagtttcattttattcacactttgagagttgtgtttcacactcatatttgaataagaaacctccttggcatcatggaatgaaatgttttcaacaacaaaaaagtcacatgttgggtaaattgttaacacatttttcccttaaattttcaccacaactttaggaattgtactccca

SEQ ID NO: 39907 - DNA, 432 bp, Homo sapiens
caagaatcaaccattagtgaaaatgcacctaaaaccttttaaagtcacttatcacatctaattatctgataccaggtattataattatgctattatgtataattttagtaccatggcttagatcatgttaattcaccctatatgccatattgaatttctagcctaaaattatcaacatactgattgcagcaagactaaaaatgagcagtcaaagacagttattctaagagccttacaaacaagcatatttattcatttttgaatttattagacaattttttttctgagcaccaattttgtgctatgtaaggtactagattctggtgataacagtgacaaataatatgtccttgaggcacacacagtctacaggagagcagggttgggagagacaaatgttctaaatagggggccatgccacagtagagtgaa

SEQ ID NO: 39908 - DNA, 451 bp, Homo sapiens
agacaaaggtaaaataggacactttctgacctcaagttataatagtgagaaacaggcaaattctctcctttctcttcttcagggaaaccttccctagccttccctgatcttggtgatataccctatgtgcgtttttaatagtatgtgttcctgtgttaaatgctcccaagaagaggtaattttacatttatttgagtggttattttattaatttctgtcaccccccaatagactaaattccatgagtacaggggccatgtcagtttttgtgcagtcaatgtttgtaagggacaatgcctgcagtgaacacttctttttccaacattaataccttctccactgtacttcacaacctctgccatagtctcacaggtctcctgtgaacacgtcattgcattttttttgcctttaaacctttcttctaccattctccttcaactgaatgccagcc

SEQ ID NO: 39909 - DNA, 420 bp, Homo sapiens
gcgtcgacccccatcacaccccccaattgttaactaaatagcagagactcttggcaagtcacttaacctctctgtgcttctagtgataactacaataaaaacagtaccacctgcctaatctattacatgtgacaatactataacaatgtagatttattgactgtctactgcatgtcaagcacagggataaaagacacagtctttacttcaggcagctcaatctctagtagggggctgataccaaaataactgcagcgtggtgtgtaagtggttcatgcataggttacactggtgtcaggaagaaggagggtgaccaattgctgggagacagcaggagaaatgaggaaggactcacaggaagggaatacctgaactaggtcttagggaataaataagaccaccaccttttaaggggtgggc

SEQ ID NO: 39910 - DNA, 371 bp, Homo sapiens
aatttattaagcactataaatgccaagtcattaatgtatatatgtatatgtatgtgtgcatgtgtgcgtgtgtgtgtgtgtgtatatctttttttaaatagatacaaggtctcactatgttgcccaggctagtttcaaactcctgggttcaagtgatcctccagccttgcctctcataaaaatgataaaaataatcactcaggaattaatgtccatcaagaatctgtttcctcttggccagcaactaacacatcctccttcctgctaacttttccttcctggatccagcagcctccatgttgctgaaaccaatgggatctgctggaattaaaggtgtgggccactgcacccggccctaagtcattaattga

SEQ ID NO: 39911 - DNA, 299 bp, Homo sapiens
gagtggtggcaacttgattctaagtagcttttagaattatatgtaaactgattgcacctagtttctgttttaaataatatacatcttttaaatgctttggctaaattgtgggaaagatagtggtggcttaacagtttagtaaaatatctatatttgtcagcttttggccttaacttcaatcttgtctgacttcaagatacttgcacatcttttaaactggctaatttaagtaactttatagaatttttgtgacttatctctggaaatactttgtcatataaattctatatagaatatat

SEQ ID NO: 39912 - DNA, 442 bp, Homo sapiens
atagtgtattaacactactgtttggatttccaagagatcttgctagtatgcagcatcttattcatgtcacatgctttttctgaatttcaggacccgatacccagtctctagtgggtggatgctgaggacagcttggaaggtgccatgctaacaggggcctctcagagatgaggttctgatattgcactatcaaattctgacttgtcctatcccactccaagtcataggaagtcacctttatttaaatgtggtttgcttaaatgtacttgataattaaaaagaaacacacacacacaaatatattcacaactctatttcaaagaactatcttgtggcctcattgaatgtggcagagttgcagtgtggaaaagttaatgcagccactaatgcattcactcagctttgggggaagccctaaaacagatctgagcacagactggag

SEQ ID NO: 39913 - DNA, 232 bp, Homo sapiens
atattattggaacacagcctctcatattcattttaaatattgtctatggctgttttcacactacagtggcagtgttaggtagttgtgacagagaccattatggtctacaaagcctaaaatacttattaatgtcccttgacaaaaaatagtttcctgacctctgctgtagaacattacgactctaaagtttctcaatgtggtagtatgactatcaggttgttttatttcttaa

SEQ ID NO: 39914 - DNA, 1800 bp, Homo sapiens
agcaggcagaggagcacttagcagcttattcagtgtccgattctgattccggcaaggatccaagcatggaatgctgccgtcgggcaactcctggcacactgctcctctttctggctttcctgctcctgagttccaggaccgcacgctccgaggaggaccgggacggcctatgggatgcctggggcccatggagtgaatgctcacgcacctgcgggggtggggcctcctactctctgaggcgctgcctgagcagcaagagctgtgaaggaagaaatatccgatacagaacatgcagtaatgtggactgcccaccagaagcaggtgatttccgagctcagcaatgctcagctcataatgatgtcaagcaccatggccagttttatgaatggcttcctgtgtctaatgaccctgacaacccatgttcactcaagtgccaagccaaaggaacaaccctggttgttgaactagcacctaaggtcttagatggtacgcgttgctatacagaatctttggatatgtgcatcagtggtttatgccaaattgttggctgcgatcaccagctgggaagcaccgtcaaggaagataactgtggggtctgcaacggagatgggtccacctgccggctggtccgagggcagtataaatcccagctctccgcaaccaaatcggatgatactgtggttgcaattccctatggaagtagacatattcgccttgtcttaaaaggtcctgatcacttatatctggaaaccaaaaccctccaggggactaaaggtgaaaacagtctcagctccacaggaactttccttgtggacaattctagtgtggacttccagaaatttccagacaaagagatactgagaatggctggaccactcacagcagatttcattgtcaagattcgtaactcgggctccgctgacagtacagtccagttcatcttctatcaacccatcatccaccgatggagggagacggatttctttccttgctcaagcaacctgtggaggaggttatcagctgacatcggctgagtgctacgatctgaggagcaaccgtgtggttgctgaccaatactgtcactattacccagagaacatcaaacccaaacccaagcttcaggagtgcaacttggatccttgtccagccagtgacggatacaagcagatcatgccttatgacctctaccatccccttcctcggtgggaggccaccccatggaccgcgtgctcctcctcgtgtggggggggcatccagagccgggcagtttcctgtgtggaggaggacatccaggggcatgtcacttcagtggaagagtggaaatgcatgtacacccctaagatgcccatcgcgcagccctgcaacatttttgactgccctaaatggctggcacaggagtggtctccgtgcacagtgacatgtggccagggcctcagataccgtgtggtcctctgcatcgaccatcgaggaatgcacacaggaggctgtagcccaaaaacaaagccccacataaaagaggaatgcatcgtacccactccctgctataaacccaaagagaaacttccagtcgaggccaagttgccatggttcaaacaagctcaagagctagaagaaggagctgctgtgtcagaggagccctcgtaagttgtaaaagcacagactgttctatatttgaaactgttttgtttaaagaaagcagtgtctcactggttgtagctttcatgggttctgaactaagtgtaatcatctcaccaaagctttttggctctcaaattaaagattgattagtttcaaaaagtg

SEQ ID NO: 39915 - DNA, 846 bp, Homo sapiens
  misc_feature (803)..(803): n is a, c, g, or t
  misc_feature (806)..(807): n is a, c, g, or t
  misc_feature (810)..(810): n is a, c, g, or t
caatttccattaagtaccagttttatttaaaagcaaataaattgtttttaagtaagtaatcgtttttatgacataaatttgtgttttcagtttgattcttaaaccatcaacatttgaattacctagttcgctgggcatgggcccagaagtttgccttttagcaagcatctagttggtaacttcgcacactaaatggacaagaagcccaatatgtgtctctgaatgggaagtgttatttaattcttcaactcgtcttttttcttaaccaaaaccagtatcttttattttctgcagtatataattttcttagaacaaattgtctatttctgaatctacattttaaaatccacataattttatctattataccaaagaggttggaaataaaggacggaaagggaatacaggcttggaataagatgatagtgaaatcacaaattgagatattgttctcccttgctctgtggcaacagaactcagaagataatgatagtgaaagcttatgcaaggaccattcactggtaaaatggtaggatacatgatactgccattgccacttctcccgcagtgcagtccctcacacaggctaaaaccatcagcactaccatatactcttgttcgaagctgcaagggaccagaaagcaccgcactggcacattacttctactttcctggtgactcctgcagattcgtaactcgggctccgctgacagtacagtccagttcatcttctatcaacccatcatccaccgatggagggagacggatttctttccttgctcaagcaacctgtggaggaggtntgnnctngggcccggcacagggaatattatcacccgaggcggg

SEQ ID NO: 39916 - DNA, 2319 bp, Homo sapiens
agcaggcagaggagcacttagcagcttattcagtgtccgattctgattccggcaaggatccaagcatggaatgctgccgtcgggcaactcctggcacactgctcctctttctggctttcctgctcctgagttccaggaccgcacgctccgaggaggaccgggacggcctatgggatgcctggggcccatggagtgaatgctcacgcacctgcgggggtggggcctcctactctctgaggcgctgcctgagcagcaagagctgtgaaggaagaaatatccgatacagaacatgcagtaatgtggactgcccaccagaagcaggtgatttccgagctcagcaatgctcagctcataatgatgtcaagcaccatggccagttttatgaatggcttcctgtgtctaatgaccctgacaacccatgttcactcaagtgccaagccaaaggaacaaccctggttgttgaactagcacctaaggtcttagatggtacgcgttgctatacagaatctttggatatgtgcatcagtggtttatgccaaattgttggctgcgatcaccagctgggaagcaccgtcaaggaagataactgtggggtctgcaacggagatgggtccacctgccggctggtccgagggcagtataaatcccagctctccgcaaccaaatcggatgatactgtggttgcaattccctatggaagtagacatattcgccttgtcttaaaaggtcctgatcacttatatctggaaaccaaaaccctccaggggactaaaggtgaaaacagtctcagctccacaggaactttccttgtggacaattctagtgtggacttccagaaatttccagacaaagagatactgagaatggctggaccactcacagcagatttcattgtcaagattcgtaactcgggctccgctgacagtacagtccagttcatcttctatcaacccatcatccaccgatggagggagacggatttctttccttgctcaagcaacctgtggaggaggttatcagctgacatcggctgagtgctacgatctgaggagcaaccgtgtggttgctgaccaatactgtcactattacccagagaacatcaaacccaaacccaagcttcaggagtgcaacttggatccttgtccagccagtgacggatacaagcagatcatgccttatgacctctaccatccccttcctcggtgggaggccaccccatggaccgcgtgctcctcctcgtgtggggggggcatccagagccgggcagtttcctgtgtggaggaggacatccaggggcatgtcacttcagtggaagagtggaaatgcatgtacacccctaagatgcccatcgcgcagccctgcaacatttttgactgccctaaatggctggcacaggagtggtctccgtgcacagtgacatgtggccagggcctcagataccgtgtggtcctctgcatcgaccatcgaggaatgcacacaggaggctgtagcccaaaaacaaagccccacataaaagaggaatgcatcgtacccactccctgctataaacccaaagagaaacttccagtcgaggccaagttgccatggttcaaacaagctcaagagctagaagaaggagctgctgtgtcagaggagccctcgttcatcccagaggcctggtcggcctgcacagtcacctgtggtgtggggacccaggtgcgaatagtcaggtgccaggtgctcctgtctttctctcagtccgtggctgacctgcctattgacgagtgtgaagggcccaagccagcatcccagcgtgcctgttatgcaggcccatgcagcggggaaattcctgagttcaacccagacgagacagatgggctctttggtggcctgcaggatttcgacgagctgtatgactgggagtatgaggggttcaccaagtgctccgagtcctgtggaggaggtgtccaggaggctgtggtgagctgcttgaacaaacagactcgggagcctgctgaggagaacctgtgcgtgaccagccgccggcccccacagctcctgaagtcctgcaatttggatccctgcccagcaagaagcagtatcgactcagcatggaacgcctgcaacgttctttgttaggcaaccaagaggcctggcttctcatcctgctgtcaccaactagctctgtggcctagggcgaggtgtctgccctttatgtttccacatctgcaaagtgaactggttgtacctgatgatctgagatcccatgacttgctcacatgtcccatgattctttattttgtaggcagaagcattaaacagctactcctgctgctgtgt

SEQ ID NO: 39917 - DNA, 805 bp, Homo sapiens
agcaggcagaggagcacttagcagcttattcagtgtccgattctgattccggcaaggatccaagcatggaatgctgccgtcgggcaactcctggcacactgctcctctttctggctttcctgctcctgagttccaggaccgcacgctccgaggaggaccgggacggcctatgggatgcctggggcccatggagtgaatgctcacgcacctgcgggggtggggcctcctactctctgaggcgctgcctgagcagcaagagctgtgaaggaagaaatatccgatacagaacatgcagtaatgtggactgcccaccagaagcaggtgatttccgagctcagcaatgctcagctcataatgatgtcaagcaccatggccagttttatgaatggcttcctgtgtctaatgaccctgacaacccatgttcactcaagtgccaagccaaaggaacaaccctggttgttgaactagcacctaaggtcttagatggtacgcgttgctatacagaatctttggatatgtgcatcagtggtttatgccaagtaagtgctgatttgttctcattcaacttgtccagagggtttcaatgtctttgtgtaaatggtttacatagtctcactctctgaatcactcatctttacactttttagagtttgtaaatggtgaaagatttgaaaattaaggtatgatttcagtgaaaagtaccaagtgttgtattgtgcgaaggaaaagtagactagagttatttttctttccttgagtgtcacttgaatataaaagaataaaaatttttgaatagtgttaaaaa

SEQ ID NO: 39918 - DNA, 160 bp, Homo sapiens
gtgtccaggaggctgtggtgagctgcttgaacaaacagactcgggagcctgctgaggagaacctgtgcgtgaccagccgccggcccccacagctcctgaagtcctgcaatttggatccctgcccagcaaggtaagggatgtgtggcctgccctgctgtcc

SEQ ID NO: 39919 - DNA, 352 bp, Homo sapiens
ctatcgtgttgccttagctctctttcaagtcacaaacacagctggccttaagtatttatttaagcatctttatattcctgtttactttaaactccttgaattagccatgcaataatttgggtatgttgtattaagagctctaccacattatggttcagtcattgtataattaaacatgaggcatcaagaatcaaaagttactgttttacttgcctgctctctccattgtgtcattttacattttagtagtactgtgttttgtttattaaaaaaagtaaaatcaacaatatactatgaagctgaaaaatgatacagaagcctaaatcatttcttagtctagagatgcatttca

SEQ ID NO: 39920 - DNA, 254 bp, Homo sapiens
tgtccagcttcatttctcctctttggctaatgcatttagctcctggcacaccaactagttgaactgttacccaaatatgcttttccagtgctattctctctgcctggaatcccccttcccgccctcaccccctgacatgatcacgcaacttccacttctttaggggttaacttagatgtcatctctcaggcttcttccttgatccagtcctctctcacgtgtttttaaatgtaggttttattattattcaggta

SEQ ID NO: 39921 - DNA, 389 bp, Homo sapiens
tcctccaacttatcctctggaggaaggatggctcagagttctggaggcaagcagtcagagatcaaggtgttggcagggttggtttcttctgcagcctccctccttggcttgtggatgaccgtcttctccctgtgtcttcatgtaggctttctgtgtctgtgtgtgtctgtattttaatcttctcatcttaggaggacaccagtcaggttggactgggactcactctaataacctcactgtcacttaattacctgtctttcaagaccctgtccttgatagcagtcacattctgagctcctggcggttaggactttaacatatgaattctggcggaacacagttcagcccgtagtggaccctaaccaaaaagatcctggaatacccctgtt

SEQ ID NO: 39922 - DNA, 929 bp, Homo sapiens
aatggtgggaatataattggagaagatggatgggcacgcccaggctgcagccccattaatttaccatccggacagctaacaagcagaagcagcgtgtctcctgccgcctaattattttaggtaatggaaatgcttaatgttgtgtgaatgcagccagcctgagagccgacggctcccccgactgggactagggaagggagtcccgttccgtactaatggcagggagggagggtcgctccctgactcagtcccacctctggggctttggaggctgtttccacaggcctgacacccctgtccctagacaggcccacatcagggccttccccagcccagatctggcagccctgctccccgagcagcactgagtggcattccccctgtgcccacgtcactcagtctctacccttggggtcttcaaagtgtatgttggagggagggacaccctgagtgttagccattcatcagaatgaagtgtggtctccaagagggagagaaggagctgccacaggcaggttatcttccacgctctgtaatcttcatgggctgggaagctactgtcagggacagcatgtctgggggcacacttggtacagcctgggttgagcctcagacacactgcttcctagctgtttaatactaggcgagtttcttaacatccctgagcctcagttgttaccttctgtaaaacaggtatactatacgtatctgggaggattaggagataggactgcgtgaactaattcacagcaggtacttagtctatgcctggtacacagaaggcacaagtccaataaacagtagctgttggccgggcacagtggctcacgcctgtagtctcaacactttgggaggccaaggcaggagaattgcatatgtccaggagtttgagaccagcttggggaatataatgaaaccctgttctctcc

SEQ ID NO: 39923 - DNA, 432 bp, Homo sapiens
gccatggagcccaacctgtgatttctttgctgtgtacccccatttgatggataattttttggcatgttgataaacgtccagggtgtaaagtatcccagtatgaggggtaaagccccggattataataaatttgtcaaccttcaggttttccttgcctagccttttctgtgatatacaaagtgcacatacaactacatgggtaggagaattgttgaaataagttatcattgttcaaacaataatttgttggaaccaaatatcacccacaatgcaattgtctacctttaaagaatggccatagagtcaaaaactttcttttgaatcctggattcactatttatttgatgtgagatcacctttacttttataccatcaatttcctcagtgtaaagagtgtattattaaaattccctcgtacggtcaaaaaaaaat

SEQ ID NO: 39924 - DNA, 446 bp, Homo sapiens
ttccatcatatatagcagtattttctataacattaatttatgcactgtatattaactgctctcttttgagtataattttgaacttaacattattcccattattaaaaattactattctttttatgcttggctttttacaacttcttctgtggataacttttaagcttctcccctgtacctccaacattatatttcctgctataaaaccacccttccttttggccacaaaagaatgctctagacccaccttagatatattttttctgctgaagacagaatcagtcatgtcctcagagcatctgggttcttttagtagagaaatatggaccaagcatggtggctcatgcatgtaatctgtgcactttgggaggctgaggtgggagggttgcttgaggctaggagttcaagaccagcctgggcaacagggtgagacctcgtttctacaa

SEQ ID NO: 39925 - DNA, 247 bp, Homo sapiens
gtaagatttagtttgagctttcacttctcataacctcattcagctgcatgaggattacctgggagcgtctaagcccaccatccctggagattttgatcaaaaagtctgagataggcttcaggaatctgtattttgaaagaactttctgagtggttggataaacatccaggtttgaaaatcactgtcataggaattgaagagcattaaaaattgtgtgtagatgatactgagatgaaatctatgttta

SEQ ID NO: 39926 - DNA, 453 bp, Homo sapiens
tcaagatcttggacacaaaattatttcatattgtttacatgtaatactaatctaaagcttgctaagactcaagtaaaatgttagggtcagaaaagacaacataactagaagccctcttgttatgttgaataggaaagaaaaaaagtccactgggtatgaatcacataagttgcctctgtggcaggtgcctgcagcaattactttccaatgggtgcttaataaaaacagaagatggaaaactcaatacgtaaggtcaatactgataacagttcattagcacaagttgaggacaagcgaaggatgaatgtgccttgtcctccaagcagctgaagtgcacttccccaggcttctgtcttctcttctgagtcactgagtctctgtgctctttgacaccctataactggaggattatgattacttagtaggcttctgtgcttaacttgataaaacaat

SEQ ID NO: 39927 - DNA, 775 bp, Homo sapiens
cgttttgctacttactgtctcttgaggccaagtttttttccccctgattttttgccatctgtgccatatttttaaagagtttttctcctctaatcccttctttgatgccaggagaagcaataccaatggactggagatattccaaagcttaatgtacagggaccagctaaaaacctcaacaacattacttcacacacattctctctctttcgtttttgcaagtgggcatgtgataggggccacaagagaagataaataaagctcacaattcaacagggctggcaggctacctgctcttgaaacataaatcaggaggcccagggtcctggctgctgcctacagtcccagggagacatgattttcccagtcatttggaatggccaaacctacaagtcacaatttcaaggaagacaggttaaaacctcacattttccttgggctttgacctttggctaaagtcaggagctatgaactctgtgaagcttaagactcatctactttttaagaaaacttagaagactgctttaacccacacagttactcaatgggacaggaacagtgaggaacacaagcaagggccaagccaattagaaatcgattaattaattaaaaagaaaaaaacaactccagaagtcagcatcccatcctctagagatcctggcttactttgtgcctagagaacacttggtaactattgtccatttttaggtcttgttaaatcaaaaataaagcaatccatcttcagtaagtttgtagaaatatattcatctcatgc

SEQ ID NO: 39928 - DNA, 184 bp, Homo sapiens
aaaaaaaaaaaaaaaacaacaaaaccccaccccaaaccaatacattccaaaaaagcagacattgtacgggttctaatctctggctgcaagtaagcataactggaattaatttttaaaagcttaactgaacaagcatgtaagagagactcctaccacttgataattaaaaagaaaatgaaaacca

SEQ ID NO: 39929 - DNA, 562 bp, Homo sapiens
cagcctcctgtgttaatcaactaagacaggggtgtcccatcttttggcttccctgggccacactggaagaattgtcttgggtgacacaaaatacgctaaggatagctgatgagctcaaaacaaaacagctcataatgttttaagaaaacttacaaatgtgtgttgggccacattcaaagctgttgtgggctctgggttggacaagcttgagctaggagaaactatccaaagaattcctaacctttatcctgtctctagtagctttaactggtacagcttgttttctgaaagtcttaattttctgcttttattcaagaaggttacttcacaatatgaaaataagattatgaaatgatgctaaaacagttatacatagttcctttttcatgttggtaaatgttttcttttgaagtgggaaacaatcttatttttaaccctggtttcagtcaaaagtaactatcctagtgtgaaatgatatcgccaggataaactatcttttgtgattatttttaaagcagaaatgccagtttctcttacctcagtaaaagttgattttatagca

SEQ ID NO: 39930 - DNA, 586 bp, Homo sapiens
caaacatcaaattaagaccaataaaccactgagtgcatactctggagacattgtgcctttccaaatggcgtaatgagagtgtgagtacaactcacgctgtcactctcctgtcagaaaatgacagttgcctgtatcagttctactcccagagcactgactatcacagagtgaaaacttggatgtgacagcaccaactttctgccctccaagtaggagtctgtggggactgaaccagtccagaggaagaatcatcgctctagaaggagtgagtgtgtaaatttaaatcatcagcaaagcagaacctggttactgaaggcaggagagctggttccaaattatctccctcagttagtccccctccccaactctgacaaatgaattaatttacaggtccatttctgctaagttaaaatgcatctatcttctcctgggattttcttcttccatagaaatggagttttctctctccccagtgtcggctgaagctttcaacagaaaccaaaattctaaaataagaaatcctttaaaatatcagatccacatctccttcacctaagaaaaatatataaggccttttacatttaaa

SEQ ID NO: 39931 - DNA, 328 bp, Homo sapiens
gtgttctctgtggcacaaagcccagcttctacatccacaggtactgaagtatcagagactgatgctgagaagaccaactagtaatcagacttttgctatatcttcagggcttttataaaaggggttgcttattgcattattaaaatacagatatacagtagaaattaagcagtgaatccttacaatggaatgagtctcatactctatcagctgcatgctaggtagatttaaaacatgaaataaatgcttactattggcattccttctagttaatacttcctatgagcctgttaaaaatagctgaagcattaaaatattctaagatgtg

SEQ ID NO: 39932 - DNA, 903 bp, Homo sapiens
tctaaactacggacaggatgcatgggccagctagctgagaacttggaaactgcatagtagccaatatattggagaaggaaacaagaatttgaagtatgattgaactggggttgagtttcccatttattttccccccagttttgcctgaccttgactcacatgtagcccaaaacctggaagagtgcaccaggtaggggcagatagagctccaagagaatagaaagaactccttttctggtttgaggagcaggaaggtggctcctaaagatcagatgtgggaagttttcctgtttatgtgtttttttctccatcgtctcccactcaagctgccaggtagtattgcaatggaggcagtggcaatggtgatagcagcattagccaagtagatgcctaaaattcttagacagaaaaaacttctcctaccagaaaagccgtgagcccaagagcatggggaaattcctgttacttctgtctccaccctcacaccccaatccctctgccttctgttctcctgctgcttggccccagacacagatgcagttataagtacatagcagagctgggaaattaaagtcctagatttctggctgagagactggaaaaggaggccccaaagagccaaaaactgatgagggagattgtagagaggagagagcataaaagagtgatcccatacttttgtgtataaactcccagaatcacctccaaactgtgcagcatggatctgatcccaaacaaaacatcaaagaccttgagaactagtctacatatgaaacccatctgaagagtactgcaaatggctttgaaaactgaattgatattggtaccagaacccagagaaggtaggtggaactggcagcctggacctagcctggtcacttgtctgctaaaattaaaaaaaaa

SEQ ID NO: 39933 - DNA, 800 bp, Homo sapiens
tgggctcccaccgtgtgatgggtaaaggggaggcttgggtctggggtcacttgttgcatgccctttggcaagttaattgagacccaaggccttgtttcttccgctgtaaaatggaggtagtatccaccttgcagctaagccattttacataagacatctttaaagaacctggtacccaagaaggcattaatactaattttcttctcccattcccaaatgatcataattaattaattagttcaatgagtgtttaatgagaagtgctagttgcagggcactgttttaggttccatgagggcaacagaaaggtgttacatatggttctaacctctgtcacttcttacagtgtagacagaggtaagtctacagtccataccaccctgaatgtgactgatcttttctgatcttggaggctaagcaggttcgggcctggttagtacttggatgagagattggctgggaattccaggtgctataggttttaaatttattttttaaaaaatagaggtggccggccgggcacattggctcatgcctgtaatcccagcactttgggaagccaaggcgggtgaatcacgaagtcagatcgagaccatcctggctaacacggtgaaaccccatctctactaaaaatacaaaaaattagccgggcgtggtggcgggcgcctgtagtcccagctactcgggaggctgaggcaggagaatggcatgaacccgggaggcggagcttgcagtgagcagagatggcgccaccgcactccagcctgggcaacagagcgagacttcgtctcaaaaaaaaa

SEQ ID NO: 39934 - DNA, 135 bp, Homo sapiens
tggttgaaattactggtttcatttgaacgcagcaaagccaagtctttacaaaacattacctaatcagattttcactcattcttattagttgtcccgtcagaaagctgggtatataaaagactgtggcccactcac

SEQ ID NO: 39935 - DNA, 298 bp, Homo sapiens
agtgtttctctcctaaggccagtcagtaaagaccagagggggtgactgtttctttaaatgcaaaggcagcagcacaataattcaagaaacatgaaaaatcaagaaaacatgacaccaccagaagaacacaatcattttccaataaccaactccccaaaaatggagatttacaaattggtttataatgaattcagaacaattatgttaaggaagctcagcaaactaaaaggaacaccaatagactactctgtgaagtcaggcaaacaattcatgaacaaaactagaaattcaaaaaaga

SEQ ID NO: 39936 - DNA, 771 bp, Homo sapiens
actatgttgcttaggctagtctcaaactcctgggtgcaaatgatcctcctgcttcagcctcccagagtgctggaattacaggcatgagccactgtgcctggccctaacaattttttgaagagagcatttcattcactgttaaatttatttcttccctaaatctctatagaaaatgtgccactctatttctagcatgttagtaaacttggcgaggtttattctagactgcatcacggtggtggctttcttccatttggacattcagattggtcactgtctagttataagactctttccaccattggaaggataccataaattaaagtgaccttgctcagtagcaatccctttgactttgaagaaggctataccatataagtaatacactctgttagtcaatttgacacttgattttggttaattttgtctttaattactttttaaacttgaaacattcacacaccataaaactcattatttgaaagtgcacaattcagccaggtgtggtgactcacgcctgtattcccagtactttggggggccgaggtgggcggtcacctgaggtcaggagttcaagaccagcccagccaacacggtgaaaccccatctctactaaaatacaaaaattagctgggcttcgtggcagagacctgtaatcccagctactcgggaggccaaggcatgagaattgcttgaacccaggaggtggaggttgcattgaggccaagattgcgccattgcactccagcctgggcaacagagtaagactcc

SEQ ID NO: 39937 - DNA, 382 bp, Homo sapiens
tttagtgtgaaattttttatatggtgaggcattgactaacataatgggtattggctttaacaacagttttggaaaagatgtaaaagtcttcataactatatttcttccatcccttcagtagaactcaagccatagcattacatttcacaaaaacacttccataggaagttatgataatatgattatcaaggaatgatgctttcaggcatggtattcaggaacatatgataatatgattatcaaggaatgatgctttcaggcatggtattcaggaacatttctcctttcatcagcaaaaagtcatttatacctgtttttaaaaatcacttattgaaacttttttctcctttgagcacctttatttacatttgttcttccagta

SEQ ID NO: 39938 - DNA, 384 bp, Homo sapiens
cccaataaattttatgaagaaaaatgaagcagcttacagaaatagcagagtgaagggaagggctatgatagatggttagatgatagttgtcactgaccactgctctcaggtggtgccttttgagcagacacttggtatctgagaagaagagttggcagcatgatagcatgtgcaaaaggcctgaggcaggaatatgtttgtcctattggaggaacagcaataagcttggtgtggttgtagtcgggtaagcaaagattgtaagagatgaagtcatggaagtaaccagtggaacaaaatagggatgtccattcttatcattagtaatcaacattatgctggagagtctaaataattagactagaaaattgaagagttgttattaaa

SEQ ID NO: 39939 - DNA, 814 bp, Homo sapiens
ctacagccccggtccccacgcctagaagacagcggaactaagaaaagaagaggcctgtggacagaacaatcatgtctgactccctggtggtgtgcgaggtagacccagagctaacagaaaagctgaggaaattccgcttccgaaaagagacagacaatgcagccatcataatgaaggtggacaaagaccggcagatggtggtgctggaggaagaatttcagaacatttccccagaggagctcaaaatggagttgccggagagacagcccaggttcgtggtttacagctacaagtacgtgcatgacgatggccgagtgtcctaccctttgtgtttcatcttctccagccctgtggtgcaaaagccgggaacaacagatgatgtatgcagggagtaaaaacaggctggtgcagacagcagagctcacaaaggtgttcgaaatccgcaccactgatgacctcactgaggcctggctccaagaaaagttgtctttctttcgttgatctctgggctggggactgaattcctgatgtctgagtcctcaaggtgactggggacttggaacccctaggacctgaacaaccaagactttaaataaattttaaaatgccaaaactctgaaaaaaaagaagaaagaagactgcgaggggacactaaattcggggggtggggggaaaaaagggggtaataaaaggggccatgtgctctaatagggtttcgtgaacccaaggttttctttgtacacagtgttgtaaaattgggggatccccataggggggtcggatataaatgaaaagcggttacctgttttgggag

SEQ ID NO: 39940 - DNA, 811 bp, Homo sapiens
caggtatcttcgggtttggtagcgaggcctgggtggcggaaaagaagaggcgtgtggacagaacaatcatgtctgactccctggtggtgtgcgaggtagacccagagctaacagaaaagctgaggaaattccgcttccgaaaagagacagacaatgcagccatcataatgaaggtggacaaagaccggcagatggtggtgctggaggaagaatttcagaacatttccccagaggagctcaaaatggagttgccggagagacagcccaggttcgtggtttacagctacaagtacgtgcatgacgatggccgagtgtcctaccctttgtgtttcatcttctccagccctgtggtgcaaaagccgggaacaacagatgatgtatgcagggagtaaaaacaggctggtgcagacagcagagctcacaaaggtgttcgaaatccgcaccactgatgacctcactgaggcctggctccaagaaaagttgtctttctttcgttgatctctgggctggggactgaattcctgatgtctgagtcctcaaggtgactggggacttggaacccctaggacctgaacaaccaagactttaaataaattttaaaatgccaaaactctgaaaaaaaagaagaaagaagactgcgaggggacactaaattcggggggtggggggaaaaaagggggtaataaaaggggccatgtgctctaatagggtttcgtgaacccaaggttttctttgtacacagtgttgtaaaattgggggatccccataggggggtcggatataaatgaaaagcggttacctgttttgggag

SEQ ID NO: 39941 - DNA, 731 bp, Homo sapiens
caggtatcttcgggtttggtagcgaggcctgggtggcggaaaagaagaggcgtgtggacagaacaatcatgtctgactccctggtggtgtgcgaggtagacccagagctaacagaaaagctgaggaaattccgcttccgaaaagagacagacaatgcagccatcataatgaaggtggacaaagaccggcagatggtggtgctggaggaagaatttcagaacatttccccagaggagctcaaaatggagttgccggagagacagcccaggtgtgcaaaagccgggaacaacagatgatgtatgcagggagtaaaaacaggctggtgcagacagcagagctcacaaaggtgttcgaaatccgcaccactgatgacctcactgaggcctggctccaagaaaagttgtctttctttcgttgatctctgggctggggactgaattcctgatgtctgagtcctcaaggtgactggggacttggaacccctaggacctgaacaaccaagactttaaataaattttaaaatgccaaaactctgaaaaaaaagaagaaagaagactgcgaggggacactaaattcggggggtggggggaaaaaagggggtaataaaaggggccatgtgctctaatagggtttcgtgaacccaaggttttctttgtacacagtgttgtaaaattgggggatccccataggggggtcggatataaatgaaaagcggttacctgttttgggag

SEQ ID NO: 39942 - DNA, 443 bp, Homo sapiens
tttttttttttgagatagagtcttgctctgtttcccaggctggagtgcagtggtgtaatctcagctcactgcagcttctgcctcctgggttcaagcaattctcctgcctcagcctcccaagtagctgggattacaggagcccactaccacacctggttaatttttttgtattttttgtagagacggggtttcaccatgttggctggtttcgaactcctgacctcaagtgacccgcctgcctcggccttccaaaatgctggaattacagggatgagccaccatgcccagccaacctttctattccttactcacttcatccataaattgggaataatagtaggacctctcatagggttgaggatcaattgaattaaagcactgaccaaagtgcaaggtacatatgaaatgctatcacagtgtcagctattttagctgttactgag

SEQ ID NO: 39943 - DNA, 357 bp, Homo sapiens
ggaatctttaatattgtcaaagtcttgacccaatagagacattcttgccccagactctcttgcttcagtgcctttgcctgttctggtcctaagtaccttgaatatccttctcttgatgccctgatataaaactctttattcctcaaagccaagttcaggttatcacctccaccacagacttttctttccctccccaaacttcattgcctcttctcatcactccctttgtaatttgtttatactggtaagagagcattcatcataattaggcctatctatgcctacctttcttgttaaattatgagctttgttctgccttggatatctctctggcttggatatctctctggcctttgc

SEQ ID NO: 39944 - DNA, 290 bp, Homo sapiens
tctcttcagtctgtcttcttgggaagttctggtgtgagcccaaccaagactgcatccctgtgatacaagtgtgagttacatcatagtctatttcttgctaaggccaaagtagaggaagtcgaggtaaatttgcaaatgctatttgagccagtggccatggaaataattatgctcacattcttcacaacagaaaacgcaagagcatgcctcacatgcctcacatcctgtgggcagctccactcacagttcaaactctctgcagcatctgttcaccagctgcacagcaaatc

SEQ ID NO: 39945 - DNA, 601 bp, Homo sapiens
tggggtctgtggtgatgggtccttaggaatagagagaaagagaaatggccttggaatttagtggcctgaagacatagtttaaaaattcatttccggacctcaacctacggcctttgacagaaagatgggtttgttgtctgctgtgaaataaaagccatctgaggcttgtgggagcatgatgagcaccagagtccggcttagaaatcacgctgatggcccagaaaactcagccaaccacagataccattgctgcttctagaagcccaggacactggcactgtgaggcaatgctggagattcgtcctatccctggtctcttgcaaacattttaaattgaaacctttaatagtcagcatgagagcactcggattcaattatattcatctctgaagatgtcctgatatcgcctacttgtttataaaaattaatcataaaatattgaactagtggagggtttgtatgttttctataaagtctaaaaaatgaattccatttggatccagtgaaaggtgaattaacgaattattccctcagtaggacaagaatgttgaagaaaaaaactgaatgatttttcttttgaacaattcttagccaatacaaa

SEQ ID NO: 39946 - DNA, 269 bp, Homo sapiens
ataacacaagggggaactgggcacttgcatattttttatgtctggaaatgaaagggctttcttcaaacctatgaaagcagctctagctgagatcagaaggctctggtagagactgttactagcagtgtgcctcccacccaccccaggtctgagggatagaccagaggaagaatttgcaggttcacaggaatggagaggcaggaatgcctgggtgtcggttgtgtagagaagaggctaatttttggtagtctaagcattccttgacttag

SEQ ID NO: 39947 - DNA, 696 bp, Homo sapiens
gaacctaatctgcctgatgctgtaatgatgaatacatgtcattgtaaatttgtctaaacccatagaatgtataacaccaagagtgaaccctaatgcaaactatggactctgggtgataatgatgtgttagtgtaggatcatcagttataacagaggtaccctctggtggtggcagggtgggggaatatgggaaatctgctcagtgttgctgtgaacctaaaactggtctaaaaaataaagaccgttttaaaaaagataaagtaataaaaaatatgctcacagctcagttgtgatactagtaatgcaatttttatgcaaaattatgcttttgaagaaatcagaattctcaattttttggtgattatttaaattttcctcatttttatatggtttcttttaaaatgtttcacttttttccctaatttatattagaatggcaatgtatgcttaacacttgtatttttataagtttatgagtttttaatgttctgaaatgttattttttacttcaaatgtgttgaacatttaacttgttaaaacattccaggctgggcacagtggctcacgcctgtagtcctagcactttgggaggctaaggcaggaggatcacttgagcccaggagtttgaggccagcctgggcaacatagtgagaccccatatgttttaaaaaaaaattctgaactaaaaaaaaaaaa

SEQ ID NO: 39948 - DNA, 460 bp, Homo sapiens
tccttccccaggccccatgccaccagcaagaacagcccagccaatgcagactgcacccctcggcctcggccgggaccgagcacactgccctgtgtgctctccctggcccctgaggcaggtggcctgacccctgtcttcagaggggaaagctgagtctcgggaaggccacacagccgaggagtgggggcagaaagaacccagctctgcgtcaggctgtgtcaagccgacatttagtgcctagcagcagccacggcctctgcagggcttcctggagcaggtgtgggctcttccagcacagagcatgggctgcaccagcttcggggtgcaccgcgtacaggttagggctgtggctgtggctgctggctgacaccaggagtaaacgtggacaccagaccagcgcagcctagacccagctgggtggcaggtgctgccagtgcgtctcgagggggcagcagggtca

SEQ ID NO: 39949 - DNA, 299 bp, Homo sapiens
tggaggttctgatcttggaggcatcctcttatgaaatccttaagtttcattcctcaccggctctgcccagatggcataattcaatgggaggcctaaagctgcactgatcaataaagtggccactagacacatatggctatttcaattaatgaaagctaaataaatgactgttcggtttttccattatactagccacacatatgtgttcgatagccccatgcagctcgttgctactgtactgaacagtgcagctatataatctttccattacctcagtggagtgtgataataaaaaaaaa

SEQ ID NO: 39950 - DNA, 779 bp, Homo sapiens
aacggagtcatggccatttgtttacgcattgtctatgctgtttcaccctgtagcaggagagttgggtaattgtgagagagaccacatgggcccataaagcctgaaatatttactatctggctttttacaaaaaaaaaactctcccacccctgatacaatccacatacattattttgtacaagtcctagtatgtaaacacttagctattgttttctatttagagttttgtattttgtgacttgcgaaaataaatgtgtgaattgtaaggcaatgtaaagctgaacaattgacaatgaaaactagattctggcatcaggttctcagaatatttgatttcaaggaaaagttacccagacatataaaatcattaagaacagagctactttgactggagccatggtgggggacctggaaaaatactatatcaaacatacacaattacgtaggtgctccttaaaacctaaagaaattaattgaaaacataaaatctaaagcctgaatgccagagggctttttctttgtatttcatgtaactttatactctcacctataagccacaagagcaaataatggcaatagcataaggtaagtaattactaatatcacacctttatacacttatttatataaccacaaaatttttttcttaaataatatcatttcttgaataagggaggtaaacagatggattctcaagtcactctgttttcatgaagctttcccccttacctgatattttatactggcatgcatttccaaaaggaatactttgcagaaaa

SEQ ID NO: 39951 - DNA, 300 bp, Homo sapiens
aggaaaaaaaaaaaaaaacccaatttggataccaaattaatcaactaatttgagctatctggccttactcttagtagtttttagtacgtgctggacaccacttttaaaaagcaatcactgtgctagaaaagtatattggctttgttaggattaaagttcattaacttcaatgtaatcatgcctcctattactgaagtcagattggaaccactaaagatccaaactttctgtctggtaatagaaagtaaaaatctaggacatcatttacatttgagaaagctgtttttaacattattttaa

SEQ ID NO: 39952 - DNA, 3335 bp, Homo sapiens
cgccactgtgcacgatctcgcgagacttggcccagaacattgcggatcgggtcggcgccattttgggactgagactggttgtgggggagggaaaagcggcaaaaggggattattcaaagtaccgaaaaccttctcccgggatcaggcgcggcggcacccccaggccaggggcacctctggtggggcagaaggtgattgaattactcagatatgaagatcatcatctaggttttgtgtaaaaggccctggatattttaagtggccattttggatttacagtgtttttggataattttgccccagaagtttattaaaattggcaagaatcgtctgtgaagtgaattgatagtagtgaacaattcagcaagctacttaaaaagagacccaggcagcatttcttcagtattttggttcaaacggattatataactggttacagtatttcagctggtggtaatttttgcctccccttcccccaccccgttgttggggttcttcagccgaaactgagagacgttgatttgtgtactgagtagtttcagcagtttcaaatgactgagtattgctgaagtttcatggcagtttatttttacctttattgaaagttttaggaatttttgacttcagctctttcatgtcacaatgggacactttttctgaatgaagagattgaaagaatacagagtttttttccttttatcttttatttacgtggaaatttaagatgttgcagttttccggcagcatggtagtattgagatagctatgtgtgtctctgtatatgctgatgtttaggaatgctcttcagatgtgaaattttctttttgtttttgctttttggctcgtaaattggatatttcatctggagtggacaagtacaacagtggcaagtacatggaataataaagaagactttgatcttaaatctaaagaacttggctaattcgggagatagccatatgaaaactttaaaacagaagtatgggtagctgacttgaagtaactctatgtcaaatagtcgtaggttaagtatcttcaaagaacttcgatattatttcagaggatacaaaataaaaatacaaactggaaaataaagattacagagaaaaaaccaacaccttcctgtgcagtcctgttggaattttcgtcattgaattttgagaagcattctgaaaactttgcatggacagagaatcgttatgatgtgaaccgtcgacgacacaactcttcagatggctttgattctgctattggacgtcctaatggaggtaactttggaaggaaagaaaaaaatggatggcgtacacatggaagaaatggtacagaaaacataaatcatcgaggtggataccatggtggaagttcccgttctcgtagcagtattttccatgcaggaaaaagccaaggactacatgaaaacaacatacctgacaatgaaaccgggaggaaagaagacaagagagaacgcaaacagtttgaagctgaggattttccgtctttaaatcctgagtatgagagagaaccaaatcacaataagtctttagctgcaggtgtgtgggaatatcctccgaatcctaaatctagagctccaaggatgctggtcattaagaaaggtaatacaaaagacttacagctatctggattcccagtagtaggaaatcttccgtcacagccagttaagaatggaactggtccaagtgtttataaaggtttagtccctaaacctgctgctccacctacaaaacctacacaatggaaaagccaaacaaaagaaaataaagttggaacttctttccctcatgagtccacatttggcgttggcaactttaatgcttttaaatcaactgccaagaactttagtccatctacaaattcagtgaaagagtgtaatcgctcaaattcctcttctcctgttgacaaacttaatcagcagcctcgtctaaccaaactgacacgaatgcgcactgataagaagagtgaatttttgaaagcattgaaaagagacagagtagaagaggaacatgaagatgaaagccgtgctggctcagagaaggatgacgactcatttaatttacataacagcaatagtactcaccaagaaagggatataaaccgaaacttcgatgaaaatgaaattcctcaagagaatggcaatgcctcagtgatttcccagcagatcattcggtcttcaaccttcccacaaactgatgttctttcaagttcacttgaggcagaacacagattgttaaaggaaatgggctggcaggaagacagtgaaaatgatgaaacatgtgctcccttaactgaggatgaaatgagagaattccaagttattagtgaacagttacagaagaatggtctgagaaaaaatggtattttgaaaaatggcttgatctgtgacttcaagtttggaccgtggaagaacagcactttcaaacccacaactgagaatgatgacacagagacaagtagcagtgatacatcagatgacgacgatgtgtgaaggatttcctaacagctttagaaatcttagtgtgatacatctctcatacagtttggggtgaattgtaaaaatgaagaactataatttatgtagtgaaataccccattagaagaggattttttgggggacttcaatatgaagaaaaccaagaatgttttgttgggctgtgttgaacattatttctttgtaaatgaatgttgtaggaatgaggacttgggttggtccaacattgactttcttcatcactgcaacatttctctgactagcaatgtgacgatgtaacaaatgagattttctcatttaataataaaaaattgtgtaatgttttgcaaagcttctgtcttaaaatgtccaggtcttaagaaaaaaggcagcttacactgttttgcttgcagagtcatatctttttcgtacaatggaaatcctcaagtccactttgtgcggtctccctctccttcccccaaaaaacaacaacaacaaaacaaaaaccaaaaaggaaaatgtagcatgttggctaaaactggagcaaagtgcactaaaacaatttcctgaactcacctgttgtactattcaccttttaaaccataaattgctctttagccatttgtagtgcagtaaatgttacaggaaaagacttggcacattttcttccaaattttaagaggtgattttcaaaagctttattggggtatgttgtcagaccagggttttcagagttgatggaaaagagtcttgtgagaaaacttattttgataaattattacacacgcagaaaaactgatcacactgactggatctgtccacgacatggaaaataaactggattttcaga

SEQ ID NO: 39953 - DNA, 1232 bp, Homo sapiens
caatttgttagcattttacagaagattaaactgaactcatatagtacaatttagacagcttttttaaagattcaagtgaagtttaaaataatggaaaattttatactaagatttgacatctgaaaaataaaattaatcatttgatactaaattcagaggtgctcaatccatgttggaacttaaacacatgttcatttgtatttttctattgaaaatcaactcactaaaacaaaaggattgtggcttttgacagcatactagtcctaacagtaaaggcattattttaaactttgccacttcctgtgctatattgtatgtatgaggtgaaactcgggaattattttgttttcttttgatcttcctctttatttaagggctttttgagggtgggggtgggggtggtcagacacttttgttagaaccatgtgaatggcattgttttttctgtattgcaaattagtatttctaccactctccccaggcctacacgcccagacacacacatacccaaccaaaaaaatctcccaagctcctctcttaggtatgtttccttattattcagtttttctgggaacaactgattgcataagaatatagaaccacctggaaggtgttaaatagaatctctaagaaattaggaataatttggatttgattagaatgaaagttttaaaaatcaagaatgccagtgagcgtttgtcatataaaactatctatagatactattggtactgatcctgggttgatttaataatcttagaaatgatttagagacaaagacatatttgaaaataatgagagtaaaatgtattaatatgaagattttggttctactgtttcagggttggtctaaggattttgagtactagttgaaaagatgttcaaaaggaagatgtactctttactgtgtttaggtaaactaagaaatgtgtctgcataaacaaaaaaagaaaatggttaattgtggaatggttaattgttaaattcccagtacttcccataggaatacaatgaaactctcattgtatcacactttactattcctctctcactttcccccctgggttcccaagtattgttttccctattgcaacatttaaaatagctatgttcctgaggaagacgagaattttaggaaagacttcaatagagcttttctagtgctacttccttccaggtaagtaaaaatttactaacgaaaatataatatttattaaaaaaaaaagcaattt

SEQ ID NO: 39954 - DNA, 940 bp, Homo sapiens
tcataggttcgcaggattatgtataggatatgggaggactacaaatcagcgagaaaaaggccagtagaataatggtaataaaagataagagagaacgcaaacagtttgaagctgaggattttccgtctttaaatcctgagtatgagagagaaccaaatcacaataagtctttagctgcaggtgtgtggggcctacacgcccagacacacacatacccaaccaaaaaaatctcccaagctcctctcttaggtatgtttccttattattcagtttttctgggaacaactgattgcataagaatatagaaccacctggaaggtgttaaatagaatctctaagaaattaggaataatttggatttgattagaatgaaagttttaaaaatcaagaatgccagtgagcgtttgtcatataaaactatctatagatactattggtactgatcctgggttgatttaataatcttagaaatgatttagagacaaagacatatttgaaaataatgagagtaaaatgtattaatatgaagattttggttctactgtttcagggttggtctaaggattttgagtactagttgaaaagatgttcaaaaggaagatgtactctttactgtgtttaggtaaactaagaaatgtgtctgcataaacaaaaaaagaaaatggttaattgtggaatggttaattgttaaattcccagtacttcccataggaatacaatgaaactctcattgtatcacactttactattcctctctcactttcccccctgggttcccaagtattgttttccctattgcaacatttaaaatagctatgttcctgaggaagacgagaattttaggaaagacttcaatagagcttttctagtgctacttccttccaggtaagtaaaaatttactaacgaaaatataatatttattaaaaaaaaaagcaattt

SEQ ID NO: 39955 - DNA, 440 bp, Homo sapiens
cgtgactaataatccatatgacacagagttttaacattctgttttgtgttccactgtcaaaacaccaaagaaccaaaaacaaaaggattctttctcctctcctccctgccatctcacaaacattttaccaggtgaaatccactcttataaaccctatgtatgtgtataaataattataaaatacattttattggagctgttactgaactctagaactctgtgtaacacagtttgaaaagctgctcttctgtgtattatagaaaagtttaaacaattctaggatgcatttataaaataatagacacctaatttagaatcatagttctgagtattatcagaccttcattgtttgtgggataagaaaattattttgttgactcattcagtaggggaaaaaacagggatagaactagacagtacagctaccttcccgtccgcag

SEQ ID NO: 39956 - DNA, 2954 bp, Homo sapiens
cgccactgtgcacgatctcgcgagacttggcccagaacattgcggatcgggtcggcgccattttgggactgagactggttgtgggggagggaaaagcggcaaaaggggattattcaaagtaccgaaaaccttctcccgggatcaggcgcggcggcacccccaggccaggggcacctctggtggggcagaaggtgattgaattactcagatatgaagatcatcatctaggttttgtgtaaaaggccctggatattttaagtggccattttggatttacagtgtttttggataattttgccccagaagtttattaaaattggcaagaatcgtctgtgaagtgaattgatagtagtgaacaattcagcaagctacttaaaaagagacccaggcagcatttcttcagtattttggttcaaacggattatataactggttacagtatttcagctggtggtaatttttgcctccccttcccccaccccgttgttggggttcttcagccgaaactgagagacgttgatttgtgtactgagtagtttcagcagtttcaaatgactgagtattgctgaagtttcatggcagtttatttttacctttattgaaagttttaggaatttttgacttcagctctttcatgtcacaatgggacactttttctgaatgaagagattgaaagaatacagagtttttttccttttatcttttatttacgtggaaatttaagatgttgcagttttccggcagcatggtagtattgagatagctatgtgtgtctctgtatatgctgatgtttaggaatgctcttcagatgtgaaattttctttttgtttttgctttttggctcgtaaattggatatttcatctggagtggacaagtacaacagtggcaagtacatggaataataaagaagactttgatcttaaatctaaagaacttggctaattcgggagatagccatatgaaaactttaaaacagaagtatgggtagctgacttgaagtaactctatgtcaaatagtcgtaggttaagtatcttcaaagaacttcgatattatttcagaggatacaaaataaaaatacaaactggaaaataaagattacagagaaaaaaccaacaccttcctgtgcagtcctgttggaatttggacttgccatgaggtgttgaagccttgtttcactgagttggagagactggacctaaatggcgcagcatgactttgctccagcctggcttaatttccctactccaccatcatcaacaaagtcgtcattgaattttgagaagcattctgaaaactttgcatggacagagaatcgttatgatgtgaaccgtcgacgacacaactcttcagatggctttgattctgctattggacgtcctaatggaggtaactttggaaggaaagaaaaaaatggatggcgtacacatggaagaaatggtacagaaaacataaatcatcgaggtggataccatggtggaagttcccgttctcgtagcagtattttccatgcaggaaaaagccaaggactacatgaaaacaacatacctgacaatgaaaccgggaggaaagaagacaagagagaacgcaaacagtttgaagctgaggattttccgtctttaaatcctgagtatgagagagaaccaaatcacaataagtctttagctgcaggtgtgtgggaatatcctccgaatcctaaatctagagctccaaggatgctggtcattaagaaaggtaatacaaaagacttacagctatctggattcccagtagtaggaaatcttccgtcacagccagttaagaatggaactggtccaagtgtttataaaggtttagtccctaaacctgctgctccacctacaaaacctacacaatggaaaagccaaacaaaagaaaataaagttggaacttctttccctcatgagtccacatttggcgttggcaactttaatgcttttaaatcaactgccaagaactttagtccatctacaaattcagtgaaagagtgtaatcgctcaaattcctcttctcctgttgacaaacttaatcagcagcctcgtctaaccaaactgacacgaatgcgcactgataagaagagtgaatttttgaaagcattgaaaagagacagagtagaagaggaacatgaagatgaaagccgtgctggctcagagaaggatgacgactcatttaatttacataacagcaatagtactcaccaagaaagggatataaaccgaaacttcgatgaaaatgaaattcctcaagagaatggcaatgcctcagtgatttcccagcagatcattcggtcttcaaccttcccacaaactgatgttctttcaagttcacttgaggcagaacacagattgttaaaggaaatgggctggcaggaagacagtgaaaatgatgaaacatgtgctcccttaactgaggatgaaatgagagaattccaagttattagtgaacagttacagaagaatggtctgagaaaaaatggtattttgaaaaatggcttgatctgtgacttcaagtttggaccgtggaagaacagcactttcaaacccacaactgagaatgatgacacagagacaagtagcagtgatacatcagatgacgacgatgtgtgaaggatttcctaacagctttagaaatcttagtgtgatacatctctcatacagtttggggtgaattgtaaaaatgaagaactataatttatgtagtgaaataccccattagaagaggattttttgggggacttcaatatgaagaaaaccaagaatgttttgttgggctgtgttgaacattatttctttgtaaatgaatgttgtaggaatgaggacttgggttggtccaacattgactttcttcatcactgcaacatttctctgactagcaatgtgacgatgtaacaaatgagattttctcatttaataataaaaaattgtgtaatgttttgca

SEQ ID NO: 39957 - DNA, 3455 bp, Homo sapiens
cgccactgtgcacgatctcgcgagacttggcccagaacattgcggatcgggtcggcgccattttgggactgagactggttgtgggggagggaaaagcggcaaaaggggattattcaaagtaccgaaaaccttctcccgggatcaggcgcggcggcacccccaggccaggggcacctctggtggggcagaaggtgattgaattactcagatatgaagatcatcatctaggttttgtgtaaaaggccctggatattttaagtggccattttggatttacagtgtttttggataattttgccccagaagtttattaaaattggcaagaatcgtctgtgaagtgaattgatagtagtgaacaattcagcaagctacttaaaaagagacccaggcagcatttcttcagtattttggttcaaacggattatataactggttacagtatttcagctggtggtaatttttgcctccccttcccccaccccgttgttggggttcttcagccgaaactgagagacgttgatttgtgtactgagtagtttcagcagtttcaaatgactgagtattgctgaagtttcatggcagtttatttttacctttattgaaagttttaggaatttttgacttcagctctttcatgtcacaatgggacactttttctgaatgaagagattgaaagaatacagagtttttttccttttatcttttatttacgtggaaatttaagatgttgcagttttccggcagcatggtagtattgagatagctatgtgtgtctctgtatatgctgatgtttaggaatgctcttcagatgtgaaattttctttttgtttttgctttttggctcgtaaattggatatttcatctggagtggacaagtacaacagtggcaagtacatggaataataaagaagactttgatcttaaatctaaagaacttggctaattcgggagatagccatatgaaaactttaaaacagaagtatgggtagctgacttgaagtaactctatgtcaaatagtcgtaggttaagtatcttcaaagaacttcgatattatttcagaggatacaaaataaaaatacaaactggaaaataaagattacagagaaaaaaccaacaccttcctgtgcagtcctgttggaatttggacttgccatgaggtgttgaagccttgtttcactgagttggagagactggacctaaatggcgcagcatgactttgctccagcctggcttaatttccctactccaccatcatcaacaaagtcgtcattgaattttgagaagcattctgaaaactttgcatggacagagaatcgttatgatgtgaaccgtcgacgacacaactcttcagatggctttgattctgctattggacgtcctaatggaggtaactttggaaggaaagaaaaaaatggatggcgtacacatggaagaaatggtacagaaaacataaatcatcgaggtggataccatggtggaagttcccgttctcgtagcagtattttccatgcaggaaaaagccaaggactacatgaaaacaacatacctgacaatgaaaccgggaggaaagaagacaagagagaacgcaaacagtttgaagctgaggattttccgtctttaaatcctgagtatgagagagaaccaaatcacaataagtctttagctgcaggtgtgtgggaatatcctccgaatcctaaatctagagctccaaggatgctggtcattaagaaaggtaatacaaaagacttacagctatctggattcccagtagtaggaaatcttccgtcacagccagttaagaatggaactggtccaagtgtttataaaggtttagtccctaaacctgctgctccacctacaaaacctacacaatggaaaagccaaacaaaagaaaataaagttggaacttctttccctcatgagtccacatttggcgttggcaactttaatgcttttaaatcaactgccaagaactttagtccatctacaaattcagtgaaagagtgtaatcgctcaaattcctcttctcctgttgacaaacttaatcagcagcctcgtctaaccaaactgacacgaatgcgcactgataagaagagtgaatttttgaaagcattgaaaagagacagagtagaagaggaacatgaagatgaaagccgtgctggctcagagaaggatgacgactcatttaatttacataacagcaatagtactcaccaagaaagggatataaaccgaaacttcgatgaaaatgaaattcctcaagagaatggcaatgcctcagtgatttcccagcagatcattcggtcttcaaccttcccacaaactgatgttctttcaagttcacttgaggcagaacacagattgttaaaggaaatgggctggcaggaagacagtgaaaatgatgaaacatgtgctcccttaactgaggatgaaatgagagaattccaagttattagtgaacagttacagaagaatggtctgagaaaaaatggtattttgaaaaatggcttgatctgtgacttcaagtttggaccgtggaagaacagcactttcaaacccacaactgagaatgatgacacagagacaagtagcagtgatacatcagatgacgacgatgtgtgaaggatttcctaacagctttagaaatcttagtgtgatacatctctcatacagtttggggtgaattgtaaaaatgaagaactataatttatgtagtgaaataccccattagaagaggattttttgggggacttcaatatgaagaaaaccaagaatgttttgttgggctgtgttgaacattatttctttgtaaatgaatgttgtaggaatgaggacttgggttggtccaacattgactttcttcatcactgcaacatttctctgactagcaatgtgacgatgtaacaaatgagattttctcatttaataataaaaaattgtgtaatgttttgcaaagcttctgtcttaaaatgtccaggtcttaagaaaaaaggcagcttacactgttttgcttgcagagtcatatctttttcgtacaatggaaatcctcaagtccactttgtgcggtctccctctccttcccccaaaaaacaacaacaacaaaacaaaaaccaaaaaggaaaatgtagcatgttggctaaaactggagcaaagtgcactaaaacaatttcctgaactcacctgttgtactattcaccttttaaaccataaattgctctttagccatttgtagtgcagtaaatgttacaggaaaagacttggcacattttcttccaaattttaagaggtgattttcaaaagctttattggggtatgttgtcagaccagggttttcagagttgatggaaaagagtcttgtgagaaaacttattttgataaattattacacacgcagaaaaactgatcacactgactggatctgtccacgacatggaaaataaactggattttcaga

SEQ ID NO: 39958 - DNA, 2861 bp, Homo sapiens
gacgtagagggcggagcttctttgaccgcggcgtgagcggttgcttgggccagaaggttctctggtggaggcgctcttcctggtgtcccgcccagtaggtgattgaattactcagatatgaagatcatcatctaggttttgtgtaaaaggccctggatattttaagtggccattttggatttacagtgtttttggataattttgccccagaagtttattaaaattggcaagaatcgtctgtgaagtgaattgatagtagtgaacaattcagcaagctacttaaaaagagacccaggcagcatttcttcagtattttggttcaaacggattatataactggttacagtatttcagctggtggtaatttttgcctccccttcccccaccccgttgttggggttcttcagccgaaactgagagacgttgatttgtgtactgagtagtttcagcagtttcaaatgactgagtattgctgaagtttcatggcagtttatttttacctttattgaaagttttaggaatttttgacttcagctctttcatgtcacaatgggacactttttctgaatgaagagattgaaagaatacagagtttttttccttttatcttttatttacgtggaaatttaagatgttgcagttttccggcagcatggtagtattgagatagctatgtgtgtctctgtatatgctgatgtttaggaatgctcttcagatgtgaaattttctttttgtttttgctttttggctcgtaaattggatatttcatctggagtggacaagtacaacagtggcaagtacatggaataataaagaagactttgatcttaaatctaaagaacttggctaattcgggagatagccatatgaaaactttaaaacagaagtatgggtagctgacttgaagtaactctatgtcaaatagtcgtaggttaagtatcttcaaagaacttcgatattatttcagaggatacaaaataaaaatacaaactggaaaataaagattacagagaaaaaaccaacaccttcctgtgcagtcctgttggaatttggacttgccatgaggtgttgaagccttgtttcactgagttggagagactggacctaaatggcgcagcatgactttgctccagcctggcttaatttccctactccaccatcatcaacaaagtcgtcattgaattttgagaagcattctgaaaactttgcatggacagagaatcgttatgatgtgaaccgtcgacgacacaactcttcagatggctttgattctgctattggacgtcctaatggaggtaactttggaaggaaagaaaaaaatggatggcgtacacatggaagaaatggtacagaaaacataaatcatcgaggtggataccatggtggaagttcccgttctcgtagcagtattttccatgcaggaaaaagccaaggactacatgaaaacaacatacctgacaatgaaaccgggaggaaagaagacaagagagaacgcaaacagtttgaagctgaggattttccgtctttaaatcctgagtatgagagagaaccaaatcacaataagtctttagctgcaggtgtgtgggaatatcctccgaatcctaaatctagagctccaaggatgctggtcattaagaaaggtaatacaaaagacttacagctatctggattcccagtagtaggaaatcttccgtcacagccagttaagaatggaactggtccaagtgtttataaaggtttagtccctaaacctgctgctccacctacaaaacctacacaatggaaaagccaaacaaaagaaaataaagttggaacttctttccctcatgagtccacatttggcgttggcaactttaatgcttttaaatcaactgccaagaactttagtccatctacaaattcagtgaaagagtgtaatcgctcaaattcctcttctcctgttgacaaacttaatcagcagcctcgtctaaccaaactgacacgaatgcgcactgataagaagagtgaatttttgaaagcattgaaaagagacagagtagaagaggaacatgaagatgaaagccgtgctggctcagagaaggatgacgactcatttaatttacataacagcaatagtactcaccaagaaagggatataaaccgaaacttcgatgaaaatgaaattcctcaagagaatggcaatgcctcagtgatttcccagcagatcattcggtcttcaaccttcccacaaactgatgttctttcaagttcacttgaggcagaacacagattgttaaaggaaatgggctggcaggaagacagtgaaaatgatgaaacatgtgctcccttaactgaggatgaaatgagagaattccaagttattagtgaacagttacagaagaatggtctgagaaaaaatggtattttgaaaaatggcttgatctgtgacttcaagtttggaccgtggaagaacagcactttcaaacccacaactgagaatgatgacacagagacaagtagcagtgatacatcagatgacgacgatgtgtgaaggatttcctaacagctttagaaatcttagtgtgatacatctctcatacagtttggggtgaattgtaaaaatgaagaactataatttatgtagtgaaataccccattagaagaggattttttgggggacttcaatatgaagaaaaccaagaatgttttgttgggctgtgttgaacattatttctttgtaaatgaatgttgtaggaatgaggacttgggttggtccaacattgactttcttcatcactgcaacatttctctgactagcaatgtgacgatgtaacaaatgagattttctcatttaataataaaaaattgtgtaatgttttgca

SEQ ID NO: 39959 - DNA, 3875 bp, Homo sapiens
cgccactgtgcacgatctcgcgagacttggcccagaacattgcggatcgggtcggcgccattttgggactgagactggttgtgggggagggaaaagcggcaaaaggggattattcaaagtaccgaaaaccttctcccgggatcaggcgcggcggcacccccaggccaggggcacctctggtggggcagaaggtgattgaattactcagatatgaagatcatcatctaggttttgtgtaaaaggccctggatattttaagtggccattttggatttacagtgtttttggataattttgccccagaagtttattaaaattggcaagaatcgtctgtgaagtgaattgatagtagtgaacaattcagcaagctacttaaaaagagacccaggcagcatttcttcagtattttggttcaaacggattatataactggttacagtatttcagctggtggtaatttttgcctccccttcccccaccccgttgttggggttcttcagccgaaactgagagacgttgatttgtgtactgagtagtttcagcagtttcaaatgactgagtattgctgaagtttcatggcagtttatttttacctttattgaaagttttaggaatttttgacttcagctctttcatgtcacaatgggacactttttctgaatgaagagattgaaagaatacagagtttttttccttttatcttttatttacgtggaaatttaagatgttgcagttttccggcagcatggtagtattgagatagctatgtgtgtctctgtatatgctgatgtttaggaatgctcttcagatgtgaaattttctttttgtttttgctttttggctcgtaaattggatatttcatctggagtggacaagtacaacagtggcaagtacatggaataataaagaagactttgatcttaaatctaaagaacttggctaattcgggagatagccatatgaaaactttaaaacagaagtatgggtagctgacttgaagtaactctatgtcaaatagtcgtaggttaagtatcttcaaagaacttcgatattatttcagaggatacaaaataaaaatacaaactggaaaataaagattacagagaaaaaaccaacaccttcctgtgcagtcctgttggaatttggacttgccatgaggtgttgaagccttgtttcactgagttggagagactggacctaaatggcgcagcatgactttgctccagcctggcttaatttccctactccaccatcatcaacaaagtcgtcattgaattttgagaagcattctgaaaactttgcatggacagagaatcgttatgatgtgaaccgtcgacgacacaactcttcagatggctttgattctgctattggacgtcctaatggaggtaactttggaaggaaagaaaaaaatggatggcgtacacatggaagaaatggtacagaaaacataaatcatcgaggtggataccatggtggaagttcccgttctcgtagcagtattttccatgcaggaaaaagccaaggactacatgaaaacaacatacctgacaatgaaaccgggaggaaagaagacaagagagaacgcaaacagtttgaagctgaggattttccgtctttaaatcctgagtatgagagagaaccaaatcacaataagtctttagctgcaggtgtgtgggaatatcctccgaatcctaaatctagagctccaaggatgctggtcattaagaaaggtaatacaaaagacttacagctatctggattcccagtagtaggaaatcttccgtcacagccagttaagaatggaactggtccaagtgtttataaaggtttagtccctaaacctgctgctccacctacaaaacctacacaatggaaaagccaaacaaaagaaaataaagttggaacttctttccctcatgagtccacatttggcgttggcaactttaatgcttttaaatcaactgccaagaactttagtccatctacaaattcagtgaaagagtgtaatcgctcaaattcctcttctcctgttgacaaacttaatcagcagcctcgtctaaccaaactgacacgaatgcgcactgataagaagagtgaatttttgaaagcattgaaaagagacagagtagaagaggaacatgaagatgaaagccgtgctggctcagagaaggatgacgactcatttaatttacataacagcaatagtactcaccaagaaagggatataaaccgaaacttcgatgaaaatgaaattcctcaagagaatggcaatgcctcagtgatttcccagcagatcattcggtcttcaaccttcccacaaactgatgttctttcaagttcacttgaggcagaacacagattgttaaaggaaatgggctggcaggaagacagtgaaaatgatgaaacatgtgctcccttaactgaggatgaaatgagagaattccaagttattagtgaacagttacagaagaatggtctgagaaaaaatggtattttgaaaaatggcttgatctgtgacttcaagtttggaccgtggaagaacagcactttcaaacccacaactgagaatgatgacacagagacaagtagcagtgatacatcagatgacgacgatgtgtgaaggatttcctaacagctttagaaatcttagtgtgatacatctctcatacagtttggggtgaattgtaaaaatgaagaactataatttatgtagtgaaataccccattagaagaggattttttgggggacttcaatatgaagaaaaccaagaatgttttgttgggctgtgttgaacattatttctttgtaaatgaatgttgtaggaatgaggacttgggttggtccaacattgactttcttcatcactgcaacatttctctgactagcaatgtgacgatgtaacaaatgagattttctcatttaataataaaaaattgtgtaatgttttgcaaagcttctgtcttaaaatgtccaggtcttaagaaaaaaggcagcttacactgttttgcttgcagagtcatatctttttcgtacaatggaaatcctcaagtccactttgtgcggtctccctctccttcccccaaaaaacaacaacaacaaaacaaaaaccaaaaaggaaaatgtagcatgttggctaaaactggagcaaagtgcactaaaacaatttcctgaactcacctgttgtactattcaccttttaaaccataaattgctctttagccatttgtagtgcagtaaatgttacaggaaaagacttggcacattttcttccaaattttaagaggtgattttcaaaagctttattggggtatgttgtcagaccagggttttcagagttgatggaaaagagtcttgtgagaaaacttattttgataaattattacacacgcagaaaaactgatcacactgactggatctgtccacgacatggaaaataaactggattttcagaatattgttgttttctgtagtgttcaaggtattgtttctaaacataaacatactctaaacatgctttattcacttgttaaagtcatacttttaaaagtaataccttactaaagatggtgattacttttccgaggtcagaaaaggaaagctaagcgttttcattatcaaatacacaagcttattaaatgaatgactgttaactactttattttcatttgcacattaattttggaattgtttctgttttgctgctgacggaaatactattttggctctgtgtatatttgtattttgatttttctggtttgtttacccccatttgcttttagctcccccttatgtttaaatatattctaacttatgtaaagagcataatcttagagcaaaaatacttgaggttttatgtcagatctaatcttaa

SEQ ID NO: 39960 - DNA, 2909 bp, Homo sapiens
cgccactgtgcacgatctcgcgagacttggcccagaacattgcggatcgggtcggcgccattttgggactgagactggttgtgggggagggaaaagcggcaaaaggggattattcaaagtaccgaaaaccttctcccgggatcaggcgcggcggcacccccaggccaggggcacctctggtggggcagaaggtgattgaattactcagatatgaagatcatcatctaggttttgtgtaaaaggccctggatattttaagtggccattttggatttacagtgtttttggataattttgccccagaagtttattaaaattggcaagaatcgtctgtgaagtgaattgatagtagtgaacaattcagcaagctacttaaaaagagacccaggcagcatttcttcagtattttggttcaaacggattatataactggttacagtatttcagctggtggtaatttttgcctccccttcccccaccccgttgttggggttcttcagccgaaactgagagacgttgatttgtgtactgagtagtttcagcagtttcaaatgactgagtattgctgaagtttcatggcagtttatttttacctttattgaaagttttaggaatttttgacttcagctctttcatgtcacaatgggacactttttctgaatgaagagattgaaagaatacagagtttttttccttttatcttttatttacgtggaaatttaagatgttgcagttttccggcagcatggtagtattgagatagctatgtgtgtctctgtatatgctgatgtttaggaatgctcttcagatgtgaaattttctttttgtttttgctttttggctcgtaaattggatatttcatctggagtggacaagtacaacagtggcaagtacatggaataataaagaagactttgatcttaaatctaaagaacttggctaattcgggagatagccatatgaaaactttaaaacagaagtatgggtagctgacttgaagtaactctatgtcaaatagtcgtaggttaagtatcttcaaagaacttcgatattatttcagaggatacaaaataaaaatacaaactggaaaataaagattacagagaaaaaaccaacaccttcctgtgcagtcctgttggaatttggacttgccatgaggtgttgaagccttgtttcactgagttggagagactggacctaaatggcgcagcatgactttgctccagcctggcttaatttccctactccaccatcatcaacaaagtcgtcattgaattttgagaagcattctgaaaactttgcatggacagagaatcgttatgatgtgaaccgtcgacgacacaactcttcagatggctttgattctgctattggacgtcctaatggaggtaactttggaaggaaagaaaaaaatggatggcgtacacatggaagaaatggtacagaaaacataaatcatcgaggtggataccatggtggaagttcccgttctcgtagcagtattttccatgcaggaaaaagccaaggactacatgaaaacaacatacctgacaatgaaaccgggaggaaagaagacaagagagaacgcaaacagtttgaagctgaggattttccgtctttaaatcctgagtatgagagagaaccaaatcacaataagtctttagctgcaggtgtgtgggaatatcctccgaatcctaaatctagagctccaaggatgctggtcattaagaaaggtaatacaaaagacttacagctatctggattcccagtagtaggaaatcttccgtcacagccagttaagaatggaactggtccaagtgtttataaaggtttagtccctaaacctgctgctccacctacaaaacctacacaatggaaaagccaaacaaaagaaaataaagttggaacttctttccctcatgagtccacatttggcgttggcaactttaatgcttttaaatcaactgccaagaactttagtccatctacaaattcagtgaaagagcagcctcgtctaaccaaactgacacgaatgcgcactgataagaagagtgaatttttgaaagcattgaaaagagacagagtagaagaggaacatgaagatgaaagccgtgctggctcagagaaggatgacgactcatttaatttacataacagcaatagtactcaccaagaaagggatataaaccgaaacttcgatgaaaatgaaattcctcaagagaatggcaatgcctcagtgatttcccagcagatcattcggtcttcaaccttcccacaaactgatgttctttcaagttcacttgaggcagaacacagattgttaaaggaaatgggctggcaggaagacagtgaaaatgatgaaacatgtgctcccttaactgaggatgaaatgagagaattccaagttattagtgaacagttacagaagaatggtctgagaaaaaatggtattttgaaaaatggcttgatctgtgacttcaagtttggaccgtggaagaacagcactttcaaacccacaactgagaatgatgacacagagacaagtagcagtgatacatcagatgacgacgatgtgtgaaggatttcctaacagctttagaaatcttagtgtgatacatctctcatacagtttggggtgaattgtaaaaatgaagaactataatttatgtagtgaaataccccattagaagaggattttttgggggacttcaatatgaagaaaaccaagaatgttttgttgggctgtgttgaacattatttctttgtaaatgaatgttgtaggaatgaggacttgggttggtccaacattgactttcttcatcactgcaacatttctctgactagcaatgtgacgatgtaacaaatgagattttctcatttaataataaaaaattgtgtaatgttttgca

SEQ ID NO: 39961 - DNA, 2990 bp, Homo sapiens
cgccactgtgcacgatctcgcgagacttggcccagaacattgcggatcgggtcggcgccattttgggactgagactggttgtgggggagggaaaagcggcaaaaggggattattcaaagtaccgaaaaccttctcccgggatcaggcgcggcggcacccccaggccaggggcacctctggtggggcagaaggtgattgaattactcagatatgaagatcatcatctaggttttgtgtaaaaggccctggatattttaagtggccattttggatttacagtgtttttggataattttgccccagaagtttattaaaattggcaagaatcgtctgtgaagtgaattgatagtagtgaacaattcagcaagctacttaaaaagagacccaggcagcatttcttcagtattttggttcaaacggattatataactggttacagtatttcagctggtggtaatttttgcctccccttcccccaccccgttgttggggttcttcagccgaaactgagagacgttgatttgtgtactgagtagtttcagcagtttcaaatgactgagtattgctgaagtttcatggcagtttatttttacctttattgaaagttttaggaatttttgacttcagctctttcatgtcacaatgggacactttttctgaatgaagagattgaaagaatacagagtttttttccttttatcttttatttacgtggaaatttaagatgttgcagttttccggcagcatggtagtattgagatagctatgtgtgtctctgtatatgctgatgtttaggaatgctcttcagatgtgaaattttctttttgtttttgctttttggctcgtaaattggatatttcatctggagtggacaagtacaacagtggcaagtacatggaataataaagaagactttgatcttaaatctaaagaacttggctaattcgggagatagccatatgaaaactttaaaacagaagtatgggtagctgacttgaagtaactctatgtcaaatagtcgtaggttaagtatcttcaaagaacttcgatattatttcagaggatacaaaataaaaatacaaactggaaaataaagattacagagaaaaaaccaacaccttcctgtgcagtcctgttggaatttggacttgccatgaggtgttgaagccttgtttcactgagttggagagactggacctaaatggcgcagcatgactttgctccagcctggcttaatttccctactccaccatcatcaacaaagtcgtcattgaattttgagaagcattctgaaaactttgcatggacagagaatcgttatgatgtgaaccgtcgacgacacaactcttcagatggctttgattctgctattggacgtcctaatggaggtaactttggaaggaaagaaaaaaatggatggcgtacacatggaagaaatggtacagaaaacataaatcatcgaggtggataccatggtggaagttcccgttctcgtagcagtattttccatgcaggaaaaagccaaggactacatgaaaacaacatacctgacaatgaaaccgggaggaaagaagacaagagagaacgcaaacagtttgaagctgaggattttccgtctttaaatcctgagtatgagagagaaccaaatcacaataagtctttagctgcaggtgtgtgggaatatcctccgaatcctaaatctagagctccaaggatgctggtcattaagaaaggtaatacaaaagacttacagctatctggattcccagtagtaggaaatcttccgtcacagccagttaagaatggaactggtccaagtgtttataaaggtttagtccctaaacctgctgctccacctacaaaacctacacaatggaaaagccaaacaaaagaaaataaagttggaacttctttccctcatgagtccacatttggcgttggcaactttaatgcttttaaatcaactgccaagaactttagtccatctacaaattcagtgaaagagtgtaatcgctcaaattcctcttctcctgttgacaaacttaatcagcagcctcgtctaaccaaactgacacgaatgcgcactgataagaagagtgaatttttgaaagcattgaaaagagacagagtagaagaggaacatgaagatgaaagccgtgctggctcagagaaggatgacgactcatttaatttacataacagcaatagtactcaccaagaaagggatataaaccgaaacttcgatgaaaatgaaattcctcaagagaatggcaatgcctcagtgatttcccagcagatcattcggtcttcaaccttcccacaaactgatgttctttcaagttcacttgaggcagaacacagattgttaaaggaaatgggctggcaggaagacagtgaaaatgatgaaacatgtgctcccttaactgaggatgaaatgagagaattccaagttattagtgaacagttacagaagaatggtctgagaaaaaatggtattttgaaaaatggcttgatctgtgacttcaagtttggaccgtggaagaacagcactttcaaacccacaactgagaatgatgacacagagacaagtagcagtgatacatcagatgacgacgatgtgtgaaggatttcctaacagctttagaaatcttagtgtgatacatctctcatacagtttggggtgaattgtaaaaatgaagaactataatttatgtagtgaaataccccattagaagaggattttttgggggacttcaatatgaagaaaaccaagaatgttttgttgggctgtgttgaacattatttctttgtaaatgaatgttgtaggaatgaggacttgggtgtccacatgcttctttcacggaatttctggtgactggggtcaaggatttcttatataaggggtgtggaaaaaaagggggaaatcggcagcatgaaggcagagaaaaagggaaggaggtggtggtgaacaaattgttttttaagatcca

SEQ ID NO: 39962 - DNA, 1928 bp, Homo sapiens
taagaatggaactggtccaagtgtttataaaggtttagtccctaaacctgctgctccacctacaaaacctacacaatggaaaaaaccaacaccttcctgtgcagtcctgttggaatttggacttgccatgaggtgttgaagccttgtttcactgagttggagagactggacctaaatggcgcagcatgactttgctccagcctggcttaatttccctactccaccatcatcaacaaagtcgtcattgaattttgagaagcattctgaaaactttgcatggacagagaatcgttatgatgtgaaccgtcgacgacacaactcttcagatggctttgattctgctattggacgtcctaatggaggtaactttggaaggaaagaaaaaaatggatggcgtacacatggaagaaatggtacagaaaacataaatcatcgaggtggataccatggtggaagttcccgttctcgtagcagtattttccatgcaggaaaaagccaaggactacatgaaaacaacatacctgacaatgaaaccgggaggaaagaagacaagagagaacgcaaacagtttgaagctgaggattttccgtctttaaatcctgagtatgagagagaaccaaatcacaataagtctttagctgcaggtgtgtgggaatatcctccgaatcctaaatctagagctccaaggatgctggtcattaagaaaggtaatacaaaagacttacagctatctggattcccagtagtaggaaatcttccgtcacagccagttaagaatggaactggtccaagtgtttataaaggtttagtccctaaacctgctgctccacctacaaaacctacacaatggaaaagccaaacaaaagaaaataaagttggaacttctttccctcatgagtccacatttggcgttggcaactttaatgcttttaaatcaactgccaagaactttagtccatctacaaattcagtgaaagagtgtaatcgctcaaattcctcttctcctgttgacaaacttaatcagcagcctcgtctaaccaaactgacacgaatgcgcactgataagaagagtgaatttttgaaagcattgaaaagagacagagtagaagaggaacatgaagatgaaagccgtgctggctcagagaaggatgacgactcatttaatttacataacagcaatagtactcaccaagaaagggatataaaccgaaacttcgatgaaaatgaaattcctcaagagaatggcaatgcctcagtgatttcccagcagatcattcggtcttcaaccttcccacaaactgatgttctttcaagttcacttgaggcagaacacagattgttaaaggaaatgggctggcaggaagacagtgaaaatgatgaaacatgtgctcccttaactgaggatgaaatgagagaattccaagttattagtgaacagttacagaagaatggtctgagaaaaaatggtattttgaaaaatggcttgatctgtgacttcaagtttggaccgtggaagaacagcactttcaaacccacaactgagaatgatgacacagagacaagtagcagtgatacatcagatgacgacgatgtgtgaaggatttcctaacagctttagaaatcttagtgtgatacatctctcatacagtttggggtgaattgtaaaaatgaagaactataatttatgtagtgaaataccccattagaagaggattttttgggggacttcaatatgaagaaaaccaagaatgttttgttgggctgtgttgaacattatttctttgtaaatgaatgttgtaggaatgaggacttgggttggtccaacattgactttcttcatcactgcaacatttctctgactagcaatgtgacgatgtaacaaatgagattttctcatttaataataaaaaattgtgtaatgttttgca

SEQ ID NO: 39963 - DNA, 2609 bp, Homo sapiens
cactaattcacatgatcttatttaatgtggagaacttaatttattctaaactttccagctgtgaaactgatgcttttaaaagtttttgtaagggaagaaagaaagacttcactgcaatgtctgtttgattacacacacacattgattaaattataggaataataggtatttttggcaactgcagtagtcttgagaaaagtctgcctttagcaattattcgtagtatttatcttcagaaatcaggattgagttggttggtctgcattcatataatgctttgaatgtagataaatggtcaataaatacatgaatgaattgatattgtgaaatagaattctcagtcataactgaagtatttagaaataaaaggaatgtaatttcttgcttattggtaataactttgtaagtggagtaaaaagaatgaaaaaattgaaattttaattctcttcaaatggggaagggaaaatagaaatgtattttatattctaaatcttaagagtcattaggttgatgtttgcaattttttatagttaatgcaaggcatgttaaaatataatttgtcttggttttaacattctgagccactgtgtagcagaatttatctgtattacttgacattgcccaattcttcctatattctgtgggataatgttttagctttacttgttcaattggaatatagtttgtacttttttagtttagttattttacccaggaggcagctgttagttaaaaaaaaaaaaaaatttggaatatactgttcttttggtggttttattctatactaaaacttgaaattgtgagtgactcttggtcatgctttatttatgcagaatatcctccgaatcctaaatctagagctccaaggatgctggtcattaagaaaggtaatacaaaagacttacagctatctggattcccagtagtaggaaatcttccgtcacagccagttaagaatggaactggtccaagtgtttataaaggtttagtccctaaacctgctgctccacctacaaaacctacacaatggaaaagccaaacaaaagaaaataaagttggaacttctttccctcatgagtccacatttggcgttggcaactttaatgcttttaaatcaactgccaagaactttagtccatctacaaattcagtgaaagagtgtaatcgctcaaattcctcttctcctgttgacaaacttaatcagcagcctcgtctaaccaaactgacacgaatgcgcactgataagaagagtgaatttttgaaagcattgaaaagagacagagtagaagaggaacatgaagatgaaagccgtgctggctcagagaaggatgacgactcatttaatttacataacagcaatagtactcaccaagaaagggatataaaccgaaacttcgatgaaaatgaaattcctcaagagaatggcaatgcctcagtgatttcccagcagatcattcggtcttcaaccttcccacaaactgatgttctttcaagttcacttgaggcagaacacagattgttaaaggaaatgggctggcaggaagacagtgaaaatgatgaaacatgtgctcccttaactgaggatgaaatgagagaattccaagttattagtgaacagttacagaagaatggtctgagaaaaaatggtattttgaaaaatggcttgatctgtgacttcaagtttggaccgtggaagaacagcactttcaaacccacaactgagaatgatgacacagagacaagtagcagtgatacatcagatgacgacgatgtgtgaaggatttcctaacagctttagaaatcttagtgtgatacatctctcatacagtttggggtgaattgtaaaaatgaagaactataatttatgtagtgaaataccccattagaagaggattttttgggggacttcaatatgaagaaaaccaagaatgttttgttgggctgtgttgaacattatttctttgtaaatgaatgttgtaggaatgaggacttgggttggtccaacattgactttcttcatcactgcaacatttctctgactagcaatgtgacgatgtaacaaatgagattttctcatttaataataaaaaattgtgtaatgttttgcaaagcttctgtcttaaaatgtccaggtcttaagaaaaaaggcagcttacactgttttgcttgcagagtcatatctttttcgtacaatggaaatcctcaagtccactttgtgcggtctccctctccttcccccaaaaaacaacaacaacaaaacaaaaaccaaaaaggaaaatgtagcatgttggctaaaactggagcaaagtgcactaaaacaatttcctgaactcacctgttgtactattcaccttttaaaccataaattgctctttagccatttgtagtgcagtaaatgttacaggaaaagacttggcacattttcttccaaattttaagaggtgattttcaaaagctttattggggtatgttgtcagaccagggttttcagagttgatggaaaagagtcttgtgagaaaacttattttgataaattattacacacgcagaaaaactgatcacactgactggatctgtccacgacatggaaaataaactggattttcaga

SEQ ID NO: 39964 - DNA, 1936 bp, Homo sapiens
cagttcgacggagactctcatactcaggattttccgtctttaaatcctgagtatgagagagaaccaaatcacaataagtctttagctgcaggtgtgtggggcctacacgcccagacacacacatacccaaccaaaaaaatctcccaagctcctctcttagaatatcctccgaatcctaaatctagagctccaaggatgctggtcattaagaaaggtaatacaaaagacttacagctatctggattcccagtagtaggaaatcttccgtcacagccagttaagaatggaactggtccaagtgtttataaaggtttagtccctaaacctgctgctccacctacaaaacctacacaatggaaaagccaaacaaaagaaaataaagttggaacttctttccctcatgagtccacatttggcgttggcaactttaatgcttttaaatcaactgccaagaactttagtccatctacaaattcagtgaaagagtgtaatcgctcaaattcctcttctcctgttgacaaacttaatcagcagcctcgtctaaccaaactgacacgaatgcgcactgataagaagagtgaatttttgaaagcattgaaaagagacagagtagaagaggaacatgaagatgaaagccgtgctggctcagagaaggatgacgactcatttaatttacataacagcaatagtactcaccaagaaagggatataaaccgaaacttcgatgaaaatgaaattcctcaagagaatggcaatgcctcagtgatttcccagcagatcattcggtcttcaaccttcccacaaactgatgttctttcaagttcacttgaggcagaacacagattgttaaaggaaatgggctggcaggaagacagtgaaaatgatgaaacatgtgctcccttaactgaggatgaaatgagagaattccaagttattagtgaacagttacagaagaatggtctgagaaaaaatggtattttgaaaaatggcttgatctgtgacttcaagtttggaccgtggaagaacagcactttcaaacccacaactgagaatgatgacacagagacaagtagcagtgatacatcagatgacgacgatgtgtgaaggatttcctaacagctttagaaatcttagtgtgatacatctctcatacagtttggggtgaattgtaaaaatgaagaactataatttatgtagtgaaataccccattagaagaggattttttgggggacttcaatatgaagaaaaccaagaatgttttgttgggctgtgttgaacattatttctttgtaaatgaatgttgtaggaatgaggacttgggttggtccaacattgactttcttcatcactgcaacatttctctgactagcaatgtgacgatgtaacaaatgagattttctcatttaataataaaaaattgtgtaatgttttgcaaagcttctgtcttaaaatgtccaggtcttaagaaaaaaggcagcttacactgttttgcttgcagagtcatatctttttcgtacaatggaaatcctcaagtccactttgtgcggtctccctctccttcccccaaaaaacaacaacaacaaaacaaaaaccaaaaaggaaaatgtagcatgttggctaaaactggagcaaagtgcactaaaacaatttcctgaactcacctgttgtactattcaccttttaaaccataaattgctctttagccatttgtagtgcagtaaatgttacaggaaaagacttggcacattttcttccaaattttaagaggtgattttcaaaagctttattggggtatgttgtcagaccagggttttcagagttgatggaaaagagtcttgtgagaaaacttattttgataaattattacacacgcagaaaaactgatcacactgactggatctgtccacgacatggaaaataaactggattttcaga

SEQ ID NO: 39965 - DNA, 1890 bp, Homo sapiens
  misc_feature (26)..(27): n is a, c, g, or t
  misc_feature (29)..(29): n is a, c, g, or t
  misc_feature (32)..(32): n is a, c, g, or t
  misc_feature (36)..(36): n is a, c, g, or t
cctcgtcagtgatactgtggcagtgnncnganttcncggctgcaggtgtgtggggcctacacgcccagacacacacatacccaaccaaaaaaatctcccaagctcctctcttagaatatcctccgaatcctaaatctagagctccaaggatgctggtcattaagaaaggtaatacaaaagacttacagctatctggattcccagtagtaggaaatcttccgtcacagccagttaagaatggaactggtccaagtgtttataaaggtttagtccctaaacctgctgctccacctacaaaacctacacaatggaaaagccaaacaaaagaaaataaagttggaacttctttccctcatgagtccacatttggcgttggcaactttaatgcttttaaatcaactgccaagaactttagtccatctacaaattcagtgaaagagtgtaatcgctcaaattcctcttctcctgttgacaaacttaatcagcagcctcgtctaaccaaactgacacgaatgcgcactgataagaagagtgaatttttgaaagcattgaaaagagacagagtagaagaggaacatgaagatgaaagccgtgctggctcagagaaggatgacgactcatttaatttacataacagcaatagtactcaccaagaaagggatataaaccgaaacttcgatgaaaatgaaattcctcaagagaatggcaatgcctcagtgatttcccagcagatcattcggtcttcaaccttcccacaaactgatgttctttcaagttcacttgaggcagaacacagattgttaaaggaaatgggctggcaggaagacagtgaaaatgatgaaacatgtgctcccttaactgaggatgaaatgagagaattccaagttattagtgaacagttacagaagaatggtctgagaaaaaatggtattttgaaaaatggcttgatctgtgacttcaagtttggaccgtggaagaacagcactttcaaacccacaactgagaatgatgacacagagacaagtagcagtgatacatcagatgacgacgatgtgtgaaggatttcctaacagctttagaaatcttagtgtgatacatctctcatacagtttggggtgaattgtaaaaatgaagaactataatttatgtagtgaaataccccattagaagaggattttttgggggacttcaatatgaagaaaaccaagaatgttttgttgggctgtgttgaacattatttctttgtaaatgaatgttgtaggaatgaggacttgggttggtccaacattgactttcttcatcactgcaacatttctctgactagcaatgtgacgatgtaacaaatgagattttctcatttaataataaaaaattgtgtaatgttttgcaaagcttctgtcttaaaatgtccaggtcttaagaaaaaaggcagcttacactgttttgcttgcagagtcatatctttttcgtacaatggaaatcctcaagtccactttgtgcggtctccctctccttcccccaaaaaacaacaacaacaaaacaaaaaccaaaaaggaaaatgtagcatgttggctaaaactggagcaaagtgcactaaaacaatttcctgaactcacctgttgtactattcaccttttaaaccataaattgctctttagccatttgtagtgcagtaaatgttacaggaaaagacttggcacattttcttccaaattttaagaggtgattttcaaaagctttattggggtatgttgtcagaccagggttttcagagttgatggaaaagagtcttgtgagaaaacttattttgataaattattacacacgcagaaaaactgatcacactgactggatctgtccacgacatggaaaataaactggattttcaga

SEQ ID NO: 39966 - DNA, 2053 bp, Homo sapiens
  misc_feature (12)..(12): n is a, c, g, or t
ttttttaaaccngccgccactcagctcagtcacttagagatccctacacaatggaaaagccaaacaaaagaaaataaagttggaacttctttccctcatgagtccacatttggcgttggcaactttaatgcttttaaatcaactgccaagaactttagtccatctacaaattcagtgaaagagtgtaatcgctcaaattcctcttctcctgttgacaaacttaatcagcagcctcgtctaaccaaactgacacgaatgcgcactgataagaagagtgaatttttgaaagcattgaaaagagacagagtagaagaggaacatgaagatgaaagccgtgctggctcagagaaggatgacgactcatttaatttacataacagcaatagtactcaccaagaaagggatataaaccgaaacttcgatgaaaatgaaattcctcaagagaatggcaatgcctcagtgatttcccagcagatcattcggtcttcaaccttcccacaaactgatgttctttcaagttcacttgaggcagaacacagattgttaaaggaaatgggctggcaggaagacagtgaaaatgatgaaacatgtgctcccttaactgaggatgaaatgagagaattccaagttattagtgaacagttacagaagaatggtctgagaaaaaatggtattttgaaaaatggcttgatctgtgacttcaagtttggaccgtggaagaacagcactttcaaacccacaactgagaatgatgacacagagacaagtagcagtgatacatcagatgacgacgatgtgtgaaggatttcctaacagctttagaaatcttagtgtgatacatctctcatacagtttggggtgaattgtaaaaatgaagaactataatttatgtagtgaaataccccattagaagaggattttttgggggacttcaatatgaagaaaaccaagaatgttttgttgggctgtgttgaacattatttctttgtaaatgaatgttgtaggaatgaggacttgggttggtccaacattgactttcttcatcactgcaacatttctctgactagcaatgtgacgatgtaacaaatgagattttctcatttaataataaaaaattgtgtaatgttttgcaaagcttctgtcttaaaatgtccaggtcttaagaaaaaaggcagcttacactgttttgcttgcagagtcatatctttttcgtacaatggaaatcctcaagtccactttgtgcggtctccctctccttcccccaaaaaacaacaacaacaaaacaaaaaccaaaaaggaaaatgtagcatgttggctaaaactggagcaaagtgcactaaaacaatttcctgaactcacctgttgtactattcaccttttaaaccataaattgctctttagccatttgtagtgcagtaaatgttacaggaaaagacttggcacattttcttccaaattttaagaggtgattttcaaaagctttattggggtatgttgtcagaccagggttttcagagttgatggaaaagagtcttgtgagaaaacttattttgataaattattacacacgcagaaaaactgatcacactgactggatctgtccacgacatggaaaataaactggattttcagaatattgttgttttctgtagtgttcaaggtattgtttctaaacataaacatactctaaacatgctttattcacttgttaaagtcatacttttaaaagtaataccttactaaagatggtgattacttttccgaggtcagaaaaggaaagctaagcgttttcattatcaaatacacaagcttattaaatgaatgactgttaactactttattttcatttgcacattaattttggaattgtttctgttttgctgctgacggaaatactattttggctctgtgtatatttgtattttgatttttctggtttgtttacccccatttgcttttagctcccccttatgtttaaatatattctaacttatgtaaagagcataatcttagagcaaaaatacttgaggttttatgtcagatctaatcttaa

SEQ ID NO: 39967 - DNA, 2417 bp, Homo sapiens
cgtgactaataatccatatgacacagagttttaacattctgttttgtgttccactgtcaaaacaccaaagaaccaaaaacaaaaggattctttctcctctcctccctgccatctcacaaacattttaccaggtgaaatccactcttataaaccctatgtatgtgtataaataattataaaatacattttattggagctgttactgaactctagaactctgtgtaacacagtttgaaaagctgctcttctgtgtattatagaaaagtttaaacaattctaggatgcatttataaaataatagacacctaatttagaatcatagttctgagtattatcagaccttcattgtttgtgggataagaaaattattttgttgactcattcagtaggggaaaaaacagggatagaactagacagtaacatagacattataatcaattttattttgtgagtaaaggtaaaataggaagctgtggtagtagtgaattttatgttgacattgattccttggctacatatttatcagtatttctgaatttcctcttagtgtaatcgctcaaattcctcttctcctgttgacaaacttaatcagcagcctcgtctaaccaaactgacacgaatgcgcactgataagaagagtgaatttttgaaagcattgaaaagagacagagtagaagaggaacatgaagatgaaagccgtgctggctcagagaaggatgacgactcatttaatttacataacagcaatagtactcaccaagaaagggatataaaccgaaacttcgatgaaaatgaaattcctcaagagaatggcaatgcctcagtgatttcccagcagatcattcggtcttcaaccttcccacaaactgatgttctttcaagttcacttgaggcagaacacagattgttaaaggaaatgggctggcaggaagacagtgaaaatgatgaaacatgtgctcccttaactgaggatgaaatgagagaattccaagttattagtgaacagttacagaagaatggtctgagaaaaaatggtattttgaaaaatggcttgatctgtgacttcaagtttggaccgtggaagaacagcactttcaaacccacaactgagaatgatgacacagagacaagtagcagtgatacatcagatgacgacgatgtgtgaaggatttcctaacagctttagaaatcttagtgtgatacatctctcatacagtttggggtgaattgtaaaaatgaagaactataatttatgtagtgaaataccccattagaagaggattttttgggggacttcaatatgaagaaaaccaagaatgttttgttgggctgtgttgaacattatttctttgtaaatgaatgttgtaggaatgaggacttgggttggtccaacattgactttcttcatcactgcaacatttctctgactagcaatgtgacgatgtaacaaatgagattttctcatttaataataaaaaattgtgtaatgttttgcaaagcttctgtcttaaaatgtccaggtcttaagaaaaaaggcagcttacactgttttgcttgcagagtcatatctttttcgtacaatggaaatcctcaagtccactttgtgcggtctccctctccttcccccaaaaaacaacaacaacaaaacaaaaaccaaaaaggaaaatgtagcatgttggctaaaactggagcaaagtgcactaaaacaatttcctgaactcacctgttgtactattcaccttttaaaccataaattgctctttagccatttgtagtgcagtaaatgttacaggaaaagacttggcacattttcttccaaattttaagaggtgattttcaaaagctttattggggtatgttgtcagaccagggttttcagagttgatggaaaagagtcttgtgagaaaacttattttgataaattattacacacgcagaaaaactgatcacactgactggatctgtccacgacatggaaaataaactggattttcagaatattgttgttttctgtagtgttcaaggtattgtttctaaacataaacatactctaaacatgctttattcacttgttaaagtcatacttttaaaagtaataccttactaaagatggtgattacttttccgaggtcagaaaaggaaagctaagcgttttcattatcaaatacacaagcttattaaatgaatgactgttaactactttattttcatttgcacattaattttggaattgtttctgttttgctgctgacggaaatactattttggctctgtgtatatttgtattttgatttttctggtttgtttacccccatttgcttttagctcccccttatgtttaaatatattctaacttatgtaaagagcataatcttagagcaaaaatacttgaggttttatgtcagatctaatcttaa

SEQ ID NO: 39968 - DNA, 2841 bp, Homo sapiens
cactaattcacatgatcttatttaatgtggagaacttaatttattctaaactttccagctgtgaaactgatgcttttaaaagtttttgtaagggaagaaagaaagacttcactgcaatgtctgtttgattacacacacacattgattaaattataggaataataggtatttttggcaactgcagtagtcttgagaaaagtctgcctttagcaattattcgtagtatttatcttcagaaatcaggattgagttggttggtctgcattcatataatgctttgaatgtagataaatggtcaataaatacatgaatgaattgatattgtgaaatagaattctcagtcataactgaagtatttagaaataaaaggaatgtaatttcttgcttattggtaataactttgtaagtggagtaaaaagaatgaaaaaattgaaattttaattctcttcaaatggggaagggaaaatagaaatgtattttatattctaaatcttaagagtcattaggttgatgtttgcaattttttatagttaatgcaaggcatgttaaaatataatttgtcttggttttaacattctgagccactgtgtagcagaatttatctgtattacttgacattgcccaattcttcctatattctgtgggataatgttttagctttacttgttcaattggaatatagtttgtacttttttagtttagttattttacccaggaggcagctgttagttaaaaaaaaaaaaaaatttggaatatactgttcttttggtggttttattctatactaaaacttgaaattgtgagtgactcttggtcatgctttatttatgcagaatatcctccgaatcctaaatctagagctccaaggatgctggtcattaagaaaggtaatacaaaagacttacagctatctggattcccagtagtaggaaatcttccgtcacagccagttaagaatggaactggtccaagtgtttataaaggtttagtccctaaacctgctgctccacctacaaaacctacacaatggaaaagccaaacaaaagaaaataaagttggaacttctttccctcatgagtccacatttggcgttggcaactttaatgcttttaaatcaactgccaagaactttagtccatctacaaattcagtgaaagagtgtaatcgctcaaattcctcttctcctgttgacaaacttaatcagcagcctcgtctaaccaaactgacacgaatgcgcactgataagaagagtgaatttttgaaagcattgaaaagagacagagtagaagaggaacatgaagatgaaagccgtgctggctcagagaagattgttaaaggaaatgggctggcaggaagacagtgaaaatgatgaaacatgtgctcccttaactgaggatgaaatgagagaattccaagttattagtgaacagttacagaagaatggtctgagaaaaaatggtattttgaaaaatggcttgatctgtgacttcaagtttggaccgtggaagaacagcactttcaaacccacaactgagaatgatgacacagagacaagtagcagtgatacatcagatgacgacgatgtgtgaaggatttcctaacagctttagaaatcttagtgtgatacatctctcatacagtttggggtgaattgtaaaaatgaagaactataatttatgtagtgaaataccccattagaagaggattttttgggggacttcaatatgaagaaaaccaagaatgttttgttgggctgtgttgaacattatttctttgtaaatgaatgttgtaggaatgaggacttgggttggtccaacattgactttcttcatcactgcaacatttctctgactagcaatgtgacgatgtaacaaatgagattttctcatttaataataaaaaattgtgtaatgttttgcaaagcttctgtcttaaaatgtccaggtcttaagaaaaaaggcagcttacactgttttgcttgcagagtcatatctttttcgtacaatggaaatcctcaagtccactttgtgcggtctccctctccttcccccaaaaaacaacaacaacaaaacaaaaaccaaaaaggaaaatgtagcatgttggctaaaactggagcaaagtgcactaaaacaatttcctgaactcacctgttgtactattcaccttttaaaccataaattgctctttagccatttgtagtgcagtaaatgttacaggaaaagacttggcacattttcttccaaattttaagaggtgattttcaaaagctttattggggtatgttgtcagaccagggttttcagagttgatggaaaagagtcttgtgagaaaacttattttgataaattattacacacgcagaaaaactgatcacactgactggatctgtccacgacatggaaaataaactggattttcagaatattgttgttttctgtagtgttcaaggtattgtttctaaacataaacatactctaaacatgctttattcacttgttaaagtcatacttttaaaagtaataccttactaaagatggtgattacttttccgaggtcagaaaaggaaagctaagcgttttcattatcaaatacacaagcttattaaatgaatgactgttaactactttattttcatttgcacattaattttggaattgtttctgttttgctgctgacggaaatactattttggctctgtgtatatttgtattttgatttttctggtttgtttacccccatttgcttttagctcccccttatgtttaaatatattctaacttatgtaaagagcataatcttagagcaaaaatacttgaggttttatgtcagatctaatcttaa

SEQ ID NO: 39969 - DNA, 424 bp, Homo sapiens
aagctttacattaaacttaatttcctctccttttcagattgttaaaggaaatgggctggcaggaagacagtgaaaatgatgaaacatgtgctcccttaactgaggatgaaatgagagaattccaagttattagtgaacaggtaagagaacctgaatcatacaacttcacttttaaactgcccttatttagaacaatataattatatgtaagcatggagtgggggagatttaggaatttatcacgataggtcagaattgcttttaaaaaaaaaaagagggaggacaggcttttgctatggtgtccagctggcctctagaactcctgggtgccaggtgatcctccaaccttagcctctggagtaactgggactacaggcaggaaccactgcacctggttgaattgactttatagaagtctgcaata

SEQ ID NO: 39970 - DNA, 3515 bp, Homo sapiens
cgccactgtgcacgatctcgcgagacttggcccagaacattgcggatcgggtcggcgccattttgggactgagactggttgtgggggagggaaaagcggcaaaaggggattattcaaagtaccgaaaaccttctcccgggatcaggcgcggcggcacccccaggccaggggcacctctggtggggcagaaggtgattgaattactcagatatgaagatcatcatctaggttttgtgtaaaaggccctggatattttaagtggccattttggatttacagtgtttttggataattttgccccagaagtttattaaaattggcaagaatcgtctgtgaagtgaattgatagtagtgaacaattcagcaagctacttaaaaagagacccaggcagcatttcttcagtattttggttcaaacggattatataactggttacagtatttcagctggtggtaatttttgcctccccttcccccaccccgttgttggggttcttcagccgaaactgagagacgttgatttgtgtactgagtagtttcagcagtttcaaatgactgagtattgctgaagtttcatggcagtttatttttacctttattgaaagttttaggaatttttgacttcagctctttcatgtcacaatgggacactttttctgaatgaagagattgaaagaatacagagtttttttccttttatcttttatttacgtggaaatttaagatgttgcagttttccggcagcatggtagtattgagatagctatgtgtgtctctgtatatgctgatgtttaggaatgctcttcagatgtgaaattttctttttgtttttgctttttggctcgtaaattggatatttcatctggagtggacaagtacaacagtggcaagtacatggaataataaagaagactttgatcttaaatctaaagaacttggctaattcgggagatagccatatgaaaactttaaaacagaagtatgggtagctgacttgaagtaactctatgtcaaatagtcgtaggttaagtatcttcaaagaacttcgatattatttcagaggatacaaaataaaaatacaaactggaaaataaagattacagagaaaaaaccaacaccttcctgtgcagtcctgttggaatttggacttgccatgaggtgttgaagccttgtttcactgagttggagagactggacctaaatggcgcagcatgactttgctccagcctggcttaatttccctactccaccatcatcaacaaagtcgtcattgaattttgagaagcattctgaaaactttgcatggacagagaatcgttatgatgtgaaccgtcgacgacacaactcttcagatggctttgattctgctattggacgtcctaatggaggtaactttggaaggaaagaaaaaaatggatggcgtacacatggaagaaatggtacagaaaacataaatcatcgaggtggataccatggtggaagttcccgttctcgtagcagtattttccatgcaggaaaaagccaaggactacatgaaaacaacatacctgacaatgaaaccgggaggaaagaagacaagagagaacgcaaacagtttgaagctgaggattttccgtctttaaatcctgagtatgagagagaaccaaatcacaataagtctttagctgcaggtgtgtggggcctacacgcccagacacacacatacccaaccaaaaaaatctcccaagctcctctcttagaatatcctccgaatcctaaatctagagctccaaggatgctggtcattaagaaaggtaatacaaaagacttacagctatctggattcccagtagtaggaaatcttccgtcacagccagttaagaatggaactggtccaagtgtttataaaggtttagtccctaaacctgctgctccacctacaaaacctacacaatggaaaagccaaacaaaagaaaataaagttggaacttctttccctcatgagtccacatttggcgttggcaactttaatgcttttaaatcaactgccaagaactttagtccatctacaaattcagtgaaagagtgtaatcgctcaaattcctcttctcctgttgacaaacttaatcagcagcctcgtctaaccaaactgacacgaatgcgcactgataagaagagtgaatttttgaaagcattgaaaagagacagagtagaagaggaacatgaagatgaaagccgtgctggctcagagaaggatgacgactcatttaatttacataacagcaatagtactcaccaagaaagggatataaaccgaaacttcgatgaaaatgaaattcctcaagagaatggcaatgcctcagtgatttcccagcagatcattcggtcttcaaccttcccacaaactgatgttctttcaagttcacttgaggcagaacacagattgttaaaggaaatgggctggcaggaagacagtgaaaatgatgaaacatgtgctcccttaactgaggatgaaatgagagaattccaagttattagtgaacagttacagaagaatggtctgagaaaaaatggtattttgaaaaatggcttgatctgtgacttcaagtttggaccgtggaagaacagcactttcaaacccacaactgagaatgatgacacagagacaagtagcagtgatacatcagatgacgacgatgtgtgaaggatttcctaacagctttagaaatcttagtgtgatacatctctcatacagtttggggtgaattgtaaaaatgaagaactataatttatgtagtgaaataccccattagaagaggattttttgggggacttcaatatgaagaaaaccaagaatgttttgttgggctgtgttgaacattatttctttgtaaatgaatgttgtaggaatgaggacttgggttggtccaacattgactttcttcatcactgcaacatttctctgactagcaatgtgacgatgtaacaaatgagattttctcatttaataataaaaaattgtgtaatgttttgcaaagcttctgtcttaaaatgtccaggtcttaagaaaaaaggcagcttacactgttttgcttgcagagtcatatctttttcgtacaatggaaatcctcaagtccactttgtgcggtctccctctccttcccccaaaaaacaacaacaacaaaacaaaaaccaaaaaggaaaatgtagcatgttggctaaaactggagcaaagtgcactaaaacaatttcctgaactcacctgttgtactattcaccttttaaaccataaattgctctttagccatttgtagtgcagtaaatgttacaggaaaagacttggcacattttcttccaaattttaagaggtgattttcaaaagctttattggggtatgttgtcagaccagggttttcagagttgatggaaaagagtcttgtgagaaaacttattttgataaattattacacacgcagaaaaactgatcacactgactggatctgtccacgacatggaaaataaactggattttcaga

SEQ ID NO: 39971 - DNA, 3330 bp, Homo sapiens
cgccactgtgcacgatctcgcgagacttggcccagaacattgcggatcgggtcggcgccattttgggactgagactggttgtgggggagggaaaagcggcaaaaggggattattcaaagtaccgaaaaccttctcccgggatcaggcgcggcggcacccccaggccaggggcacctctggtggggcagaaggtgattgaattactcagatatgaagatcatcatctaggttttgtgtaaaaggccctggatattttaagtggccattttggatttacagtgtttttggataattttgccccagaagtttattaaaattggcaagaatcgtctgtgaagtgaattgatagtagtgaacaattcagcaagctacttaaaaagagacccaggcagcatttcttcagtattttggttcaaacggattatataactggttacagtatttcagctggtggtaatttttgcctccccttcccccaccccgttgttggggttcttcagccgaaactgagagacgttgatttgtgtactgagtagtttcagcagtttcaaatgactgagtattgctgaagtttcatggcagtttatttttacctttattgaaagttttaggaatttttgacttcagctctttcatgtcacaatgggacactttttctgaatgaagagattgaaagaatacagagtttttttccttttatcttttatttacgtggaaatttaagatgttgcagttttccggcagcatggtagtattgagatagctatgtgtgtctctgtatatgctgatgtttaggaatgctcttcagatgtgaaattttctttttgtttttgctttttggctcgtaaattggatatttcatctggagtggacaagtacaacagtggcaagtacatggaataataaagaagactttgatcttaaatctaaagaacttggctaattcgggagatagccatatgaaaactttaaaacagaagtatgggtagctgacttgaagtaactctatgtcaaatagtcgtaggttaagtatcttcaaagaacttcgatattatttcagaggatacaaaataaaaatacaaactggaaaataaagattacagagaaaaaaccaacaccttcctgtgcagtcctgttggaatttggacttgccatgaggtgttgaagccttgtttcactgagttggagagactggacctaaatggcgcagcatgactttgctccagcctggcttaatttccctactccaccatcatcaacaaagtcgtcattgaattttgagaagcattctgaaaactttgcatggacagagaatcgttatgatgtgaaccgtcgacgacacaactcttcagatggctttgattctgctattggacgtcctaatggaggtaactttggaaggaaagaaaaaaatggatggcgtacacatggaagaaatggtacagaaaacataaatcatcgaggtggataccatggtggaagttcccgttctcgtagcagtattttccatgcaggaaaaagccaaggactacatgaaaacaacatacctgacaatgaaaccgggaggaaagaagacaagagagaacgcaaacagtttgaagctgaggattttccgtctttaaatcctgagtatgagagagaaccaaatcacaataagtctttagctgcaggtgtgtgggaatatcctccgaatcctaaatctagagctccaaggatgctggtcattaagaaaggtaatacaaaagacttacagctatctggattcccagtagtaggaaatcttccgtcacagccagttaagaatggaactggtccaagtgtttataaaggtttagtccctaaacctgctgctccacctacaaaacctacacaatggaaaagccaaacaaaagaaaataaagttggaacttctttccctcatgagtccacatttggcgttggcaactttaatgcttttaaatcaactgccaagaactttagtccatctacaaattcagtgaaagagtgtaatcgctcaaattcctcttctcctgttgacaaacttaatcagcagcctcgtctaaccaaactgacacgaatgcgcactgataagaagagtgaatttttgaaagcattgaaaagagacagagtagaagaggaacatgaagatgaaagccgtgctggctcagagaaggatgacgactcatttaatttacataacagcaatagtactcaccaagaaagggatataaaccgaaacttcgatgaaaatgaaattcctcaagagaatggcaatgcctcagtgatttcccagcagatcattcggtcttcaaccttcccacaaactgatgttctttcaagttcacttgaggcagaacacagattgttaaaggaaatgggctggcaggaagacagtgaaaatgatgaaacatgtgctcccttaactgaggatgaaatgagagaattccaagttattagtgaacagttacagaagaatggtctgagaaaaaatggtattttgaaaaatggcttgatctgtgacttcaagtttggaccgtggaagaacagcactttcaaacccacaactgagaatgatgacacagagacaagtagcagtgatacatcagatgacgacgatgtgtgaaggatttcctaacagctttagaaatcttagtgtgatacatctctcatacagtttggggtgaattgtaaaaatgaagaactataatttatgtagtgaaataccccattagaagaggattttttgggggacttcaatatgaagaaaaccaagaatgttttgttgggctgtgttgaacattatttctttgtaaatgaatgttgtaggaatgaggacttgggttggtccaacattgactttcttcatcactgcaacatttctctgactagcaatgtgacgatgtaacaaatgagattttctcatttaataataaaaaattgtgtaatgttttgcaaagcttctgtcttaaaatgtccaggtcttaagaaaaaaggcagcttacactgttttgcttgcagagtcatatctttttcgtacaatggaaatcctcaagtccactttgtgcggtctccctctccttcccccaaaaaacaacaacaacaaaacaaaaaccaaaaaggaaaatgtagcatgttggctaaaactggagcaaagtgcactaaaacaatttcctgaactcacctgttgtactattcaccttttaaaccataaattgctctttagccatttgtagtgcagtaaatgttacaggaaaagacttggcacattttcttccaaattttaagaggtgatttcagtctgtgagatactaatttgataatattaccacg

SEQ ID NO: 39972 - DNA, 1952 bp, Homo sapiens
gtgaagtaggtagcgttacttatctacatcagcttcacatattatcgtcataggatacataatacaatagtcatcgtactcgtggaaaataaagattacagagaaaaaaccaacaccttcctgtgcagtcctgttggaatttggacttgccatgaggtgttgaagccttgtttcactgagttggagagactggacctaaatggcgcagcatgactttgctccagcctggcttaatttccctactccaccatcatcaacaaagtcgtcattgaattttgagaagcattctgaaaactttgcatggacagagaatcgttatgatgtgaaccgtcgacgacacaactcttcagatggctttgattctgctattggacgtcctaatggaggtaactttggaaggaaagaaaaaaatggatggcgtacacatggaagaaatggtacagaaaacataaatcatcgaggtggataccatggtggaagttcccgttctcgtagcagtattttccatgcaggaaaaagccaaggactacatgaaaacaacatacctgacaatgaaaccgggaggaaagaagacaagagagaacgcaaacagtttgaagctgaggattttccgtctttaaatcctgagtatgagagagaaccaaatcacaataagtctttagctgcaggtgtgtgggaatatcctccgaatcctaaatctagagctccaaggatgctggtcattaagaaaggtaatacaaaagacttacagctatctggattcccagtagtaggaaatcttccgtcacagccagttaagaatggaactggtccaagtgtttataaaggtttagtccctaaacctgctgctccacctacaaaacctacacaatggaaaagccaaacaaaagaaaataaagttggaacttctttccctcatgagtccacatttggcgttggcaactttaatgcttttaaatcaactgccaagaactttagtccatctacaaattcagtgaaagagtgtaatcgctcaaattcctcttctcctgttgacaaacttaatcagcagcctcgtctaaccaaactgacacgaatgcgcactgataagaagagtgaatttttgaaagcattgaaaagagacagagtagaagaggaacatgaagatgaaagccgtgctggctcagagaaggatgacgactcatttaatttacataacagcaatagtactcaccaagaaagggatataaaccgaaacttcgatgaaaatgaaattcctcaagagaatggcaatgcctcagtgatttcccagcagatcattcggtcttcaaccttcccacaaactgatgttctttcaagttcacttgaggcagaacacagattgttaaaggaaatgggctggcaggaagacagtgaaaatgatgaaacatgtgctcccttaactgaggatgaaatgagagaattccaagttattagtgaacagttacagaagaatggtctgagaaaaaatggtattttgaaaaatggcttgatctgtgacttcaagtttggaccgtggaagaacagcactttcaaacccacaactgagaatgatgacacagagacaagtagcagtgatacatcagatgacgacgatgtgtgaaggatttcctaacagctttagaaatcttagtgtgatacatctctcatacagtttggggtgaattgtaaaaatgaagaactataatttatgtagtgaaataccccattagaagaggattttttgggggacttcaatatgaagaaaaccaagaatgttttgttgggctgtgttgaacattatttctttgtaaatgaatgttgtaggaatgaggacttgggttggtccaacattgactttcttcatcactgcaacatttctctgactagcaatgtgacgatgtaacaaatgagattttctcatttaataataaaaaattgtgtaatgttttgca

SEQ ID NO: 39973 - DNA, 3687 bp, Homo sapiens
cgccactgtgcacgatctcgcgagacttggcccagaacattgcggatcgggtcggcgccattttgggactgagactggttgtgggggagggaaaagcggcaaaaggggattattcaaagtaccgaaaaccttctcccgggatcaggcgcggcggcacccccaggccaggggcacctctggtggggcagaaggtgattgaattactcagatatgaagatcatcatctaggttttgtgtaaaaggccctggatattttaagtggccattttggatttacagtgtttttggataattttgccccagaagtttattaaaattggcaagaatcgtctgtgaagtgaattgatagtagtgaacaattcagcaagctacttaaaaagagacccaggcagcatttcttcagtattttggttcaaacggattatataactggttacagtatttcagctggtggtaatttttgcctccccttcccccaccccgttgttggggttcttcagccgaaactgagagacgttgatttgtgtactgagtagtttcagcagtttcaaatgactgagtattgctgaagtttcatggcagtttatttttacctttattgaaagttttaggaatttttgacttcagctctttcatgtcacaatgggacactttttctgaatgaagagattgaaagaatacagagtttttttccttttatcttttatttacgtggaaatttaagatgttgcagttttccggcagcatggtagtattgagatagctatgtgtgtctctgtatatgctgatgtttaggaatgctcttcagatgtgaaattttctttttgtttttgctttttggctcgtaaattggatatttcatctggagtggacaagtacaacagtggcaagtacatggaataataaagaagactttgatcttaaatctaaagaacttggctaattcgggagatagccatatgaaaactttaaaacagaagtatgggtagctgacttgaagtaactctatgtcaaatagtcgtaggttaagtatcttcaaagaacttcgatattatttcagaggatacaaaataaaaatacaaactggaaaataaagattacagagaaaaaaccaacaccttcctgtgcagtcctgttggaatttggacttgccatgaggtgttgaagccttgtttcactgagttggagagactggacctaaatggcgcagcatgactttgctccagcctggcttaatttccctactccaccatcatcaacaaagtcgtcattgaattttgagaagcattctgaaaactttgcatggacagagaatcgttatgatgtgaaccgtcgacgacacaactcttcagatggctttgattctgctattggacgtcctaatggaggtaactttggaaggaaagaaaaaaatggatggcgtacacatggaagaaatggtacagaaaacataaatcatcgaggtggataccatggtggaagttcccgttctcgtagcagtattttccatgcaggaaaaagccaaggactacatgaaaacaacatacctgacaatgaaaccgggaggaaagaagacaagagagaacgcaaacagtttgaagctgaggattttccgtctttaaatcctgagtatgagagagaaccaaatcacaataagtctttagctgcaggtgtgtgggaatatcctccgaatcctaaatctagagctccaaggatgctggtcattaagaaaggtaatacaaaagacttacagctatctggattcccagtagtaggaaatcttccgtcacagccagttaagaatggaactggtccaagtgtttataaaggtttagtccctaaacctgctgctccacctacaaaacctacacaatggaaaagccaaacaaaagaaaataaagttggaacttctttccctcatgagtccacatttggcgttggcaactttaatgcttttaaatcaactgccaagaactttagtccatctacaaattcagtgaaagagtgtaatcgctcaaattcctcttctcctgttgacaaacttaatcagcagcctcgtctaaccaaactgacacgaatgcgcactgataagaagagtgaatttttgaaagcattgaaaagagacagagtagaagaggaacatgaagatgaaagccgtgctggctcagagaagattgttaaaggaaatgggctggcaggaagacagtgaaaatgatgaaacatgtgctcccttaactgaggatgaaatgagagaattccaagttattagtgaacagttacagaagaatggtctgagaaaaaatggtattttgaaaaatggcttgatctgtgacttcaagtttggaccgtggaagaacagcactttcaaacccacaactgagaatgatgacacagagacaagtagcagtgatacatcagatgacgacgatgtgtgaaggatttcctaacagctttagaaatcttagtgtgatacatctctcatacagtttggggtgaattgtaaaaatgaagaactataatttatgtagtgaaataccccattagaagaggattttttgggggacttcaatatgaagaaaaccaagaatgttttgttgggctgtgttgaacattatttctttgtaaatgaatgttgtaggaatgaggacttgggttggtccaacattgactttcttcatcactgcaacatttctctgactagcaatgtgacgatgtaacaaatgagattttctcatttaataataaaaaattgtgtaatgttttgcaaagcttctgtcttaaaatgtccaggtcttaagaaaaaaggcagcttacactgttttgcttgcagagtcatatctttttcgtacaatggaaatcctcaagtccactttgtgcggtctccctctccttcccccaaaaaacaacaacaacaaaacaaaaaccaaaaaggaaaatgtagcatgttggctaaaactggagcaaagtgcactaaaacaatttcctgaactcacctgttgtactattcaccttttaaaccataaattgctctttagccatttgtagtgcagtaaatgttacaggaaaagacttggcacattttcttccaaattttaagaggtgattttcaaaagctttattggggtatgttgtcagaccagggttttcagagttgatggaaaagagtcttgtgagaaaacttattttgataaattattacacacgcagaaaaactgatcacactgactggatctgtccacgacatggaaaataaactggattttcagaatattgttgttttctgtagtgttcaaggtattgtttctaaacataaacatactctaaacatgctttattcacttgttaaagtcatacttttaaaagtaataccttactaaagatggtgattacttttccgaggtcagaaaaggaaagctaagcgttttcattatcaaatacacaagcttattaaatgaatgactgttaactactttattttcatttgcacattaattttggaattgtttctgttttgctgctgacggaaatactattttggctctgtgtatatttgtattttgatttttctggtttgtttacccccatttgcttttagctcccccttatgtttaaatatattctaacttatgtaaagagcataatcttagagcaaaaatacttgaggttttatgtcagatctaatcttaa

SEQ ID NO: 39974 - DNA, 2435 bp, Homo sapiens
tgaaagcaagtttattaagaaagtaaaggaataagagaatggctactccataggcagagtagcctgttttttaaccctgacttttttcttagttatggataaggaaacttaaacacactcttgttttctctgaccagcaattagtatagatagtaactagtttaatggttagcaaagtaagctgagagtaaggtttatgagtaattcatgtttaatacaggctgaatgtcctttatctgaaatgcttgggaccagaagtgttttggattttggatttttttcagattttacgtttattatttcagcatcctgtttctgaaaatccaaaatccaagtgcttcaatgagtaggcagagcgtgacactggcactcaaaaagtttcagattttgtagcttttcagattagggttattcaacctgtagctaagagttggtcatatttgattcatcagttacaacatgtatgattctgagattggttttaaatgatttatttttaaaatgtgaaatgtttattccaactttcttccagccgtctttaaatcctgagtatgagagagaaccaaatcacaataagtctttagctgcaggtgtgtggggcctacacgcccagacacacacatacccaaccaaaaaaatctcccaagctcctctcttagaatatcctccgaatcctaaatctagagctccaaggatgctggtcattaagaaaggtaatacaaaagacttacagctatctggattcccagtagtaggaaatcttccgtcacagccagttaagaatggaactggtccaagtgtttataaaggtttagtccctaaacctgctgctccacctacaaaacctacacaatggaaaagccaaacaaaagaaaataaagttggaacttctttccctcatgagtccacatttggcgttggcaactttaatgcttttaaatcaactgccaagaactttagtccatctacaaattcagtgaaagagtgtaatcgctcaaattcctcttctcctgttgacaaacttaatcagcagcctcgtctaaccaaactgacacgaatgcgcactgataagaagagtgaatttttgaaagcattgaaaagagacagagtagaagaggaacatgaagatgaaagccgtgctggctcagagaaggatgacgactcatttaatttacataacagcaatagtactcaccaagaaagggatataaaccgaaacttcgatgaaaatgaaattcctcaagagaatggcaatgcctcagtgatttcccagcagatcattcggtcttcaaccttcccacaaactgatgttctttcaagttcacttgaggcagaacacagattgttaaaggaaatgggctggcaggaagacagtgaaaatgatgaaacatgtgctcccttaactgaggatgaaatgagagaattccaagttattagtgaacagttacagaagaatggtctgagaaaaaatggtattttgaaaaatggcttgatctgtgacttcaagtttggaccgtggaagaacagcactttcaaacccacaactgagaatgatgacacagagacaagtagcagtgatacatcagatgacgacgatgtgtgaaggatttcctaacagctttagaaatcttagtgtgatacatctctcatacagtttggggtgaattgtaaaaatgaagaactataatttatgtagtgaaataccccattagaagaggattttttgggggacttcaatatgaagaaaaccaagaatgttttgttgggctgtgttgaacattatttctttgtaaatgaatgttgtaggaatgaggacttgggttggtccaacattgactttcttcatcactgcaacatttctctgactagcaatgtgacgatgtaacaaatgagattttctcatttaataataaaaaattgtgtaatgttttgcaaagcttctgtcttaaaatgtccaggtcttaagaaaaaaggcagcttacactgttttgcttgcagagtcatatctttttcgtacaatggaaatcctcaagtccactttgtgcggtctccctctccttcccccaaaaaacaacaacaacaaaacaaaaaccaaaaaggaaaatgtagcatgttggctaaaactggagcaaagtgcactaaaacaatttcctgaactcacctgttgtactattcaccttttaaaccataaattgctctttagccatttgtagtgcagtaaatgttacaggaaaagacttggcacattttcttccaaattttaagaggtgattttcaaaagctttattggggtatgttgtcagaccagggttttcagagttgatggaaaagagtcttgtgagaaaacttattttgataaattattacacacgcagaaaaactgatcacactgactggatctgtccacgacatggaaaataaactggattttcaga

SEQ ID NO: 39975 - DNA, 2483 bp, Homo sapiens
cgccactgtgcacgatctcgcgagacttggcccagaacattgcggatcgggtcggcgccattttgggactgagactggttgtgggggagggaaaagcggcaaaaggggattattcaaagtaccgaaaaccttctcccgggatcaggcgcggcggcacccccaggccaggggcacctctggtggggcagaaggtgattgaattactcagatatgaagatcatcatctaggttttgtgtaaaaggccctggatattttaagtggccattttggatttacagtgtttttggataattttgccccagaagtttattaaaattggcaagaatcgtctgtgaagtgaattgatagtagtgaacaattcagcaagctacttaaaaagagacccaggcagcatttcttcagtattttggttcaaacggattatataactggttacagtatttcagctggtggtaatttttgcctccccttcccccaccccgttgttggggttcttcagccgaaactgagagacgttgatttgtgtactgagtagtttcagcagtttcaaatgactgagtattgctgaagtttcatggcagtttatttttacctttattgaaagttttaggaatttttgacttcagctctttcatgtcacaatgggacactttttctgaatgaagagattgaaagaatacagagtttttttccttttatcttttatttacgtggaaatttaagatgttgcagttttccggcagcatggtagtattgagatagctatgtgtgtctctgtatatgctgatgtttaggaatgctcttcagatgtgaaattttctttttgtttttgctttttggctcgtaaattggatatttcatctggagtggacaagtacaacagtggcaagtacatggaataataaagaagactttgatcttaaatctaaagaacttggctaattcgggagatagccatatgaaaactttaaaacagaagtatgggtagctgacttgaagtaactctatgtcaaatagtcgtaggttaagtatcttcaaagaacttcgatattatttcagaggatacaaaataaaaatacaaactggaaaataaagattacagagaaaaaaccaacaccttcctgtgcagtcctgttggaatttggacttgccatgaggtgttgaagccttgtttcactgagttggagagactggacctaaatggcgcagcatgactttgctccagcctggcttaatttccctactccaccatcatcaacaaagtcgtcattgaattttgagaagcattctgaaaactttgcatggacagagaatcgttatgatgtgaaccgtcgacgacacaactcttcagatggctttgattctgctattggacgtcctaatggaggtaactttggaaggaaagaaaaaaatggatggcgtacacatggaagaaatggtacagaaaacataaatcatcgaggtggataccatggtggaagttcccgttctcgtagcagtattttccatgcaggaaaaagccaaggactacatgaaaacaacatacctgacaatgaaaccgggaggaaagaagacaagagagaacgcaaacagtttgaagctgaggattttccgtctttaaatcctgagtatgagagagaaccaaatcacaataagtctttagctgcaggtgtgtgggaatatcctccgaatcctaaatctagagctccaaggatgctggtcattaagaaaggtaatacaaaagacttacagctatctggattcccagtagtaggaaatcttccgtcacagccagttaagaatggaactggtccaagtgtttataaaggtttagtccctaaacctgctgctccacctacaaaacctacacaatggaaaagccaaacaaaagaaaataaagttggaacttctttccctcatgagtccacatttggcgttggcaactttaatgcttttaaatcaactgccaagaactttagtccatctacaaattcagtgaaagagtgtaatcgctcaaattcctcttctcctgttgacaaacttaatcagcagcctcgtctaaccaaactgacacgaatgcgcactgataagaagagtgaatttttgaaagcattgaaaagagacagagtagaagaggaacatgaagatgaaagccgtgctggctcagagaaggatgacgactcatttaatttacataacagcaatagtactcaccaagaaagggatataaaccgaaacttcgatgaaaatgaaattcctcaagagaatggcaatgcctcagtgatttcccagcagatcattcggtcttcaaccttcccacaaactgatgttctttcaagttcacttgaggcagaacacagattgttaaaggaaatgggctggcaggaagacagtgaaaatgatgaaacatgtgctcccttaactgaggatgaaatgagagaattccaagttattagtgaacaggtaagagaacctgaatcat

SEQ ID NO: 39976 - DNA, 2430 bp, Homo sapiens
cgccactgtgcacgatctcgcgagacttggcccagaacattgcggatcgggtcggcgccattttgggactgagactggttgtgggggagggaaaagcggcaaaaggggattattcaaagtaccgaaaaccttctcccgggatcaggcgcggcggcacccccaggccaggggcacctctggtggggcagaaggtgattgaattactcagatatgaagatcatcatctaggttttgtgtaaaaggccctggatattttaagtggccattttggatttacagtgtttttggataattttgccccagaagtttattaaaattggcaagaatcgtctgtgaagtgaattgatagtagtgaacaattcagcaagctacttaaaaagagacccaggcagcatttcttcagtattttggttcaaacggattatataactggttacagtatttcagctggtggtaatttttgcctccccttcccccaccccgttgttggggttcttcagccgaaactgagagacgttgatttgtgtactgagtagtttcagcagtttcaaatgactgagtattgctgaagtttcatggcagtttatttttacctttattgaaagttttaggaatttttgacttcagctctttcatgtcacaatgggacactttttctgaatgaagagattgaaagaatacagagtttttttccttttatcttttatttacgtggaaatttaagatgttgcagttttccggcagcatggtagtattgagatagctatgtgtgtctctgtatatgctgatgtttaggaatgctcttcagatgtgaaattttctttttgtttttgctttttggctcgtaaattggatatttcatctggagtggacaagtacaacagtggcaagtacatggaataataaagaagactttgatcttaaatctaaagaacttggctaattcgggagatagccatatgaaaactttaaaacagaagtatgggtagctgacttgaagtaactctatgtcaaatagtcgtaggttaagtatcttcaaagaacttcgatattatttcagaggatacaaaataaaaatacaaactggaaaataaagattacagagaaaaaaccaacaccttcctgtgcagtcctgttggaatttggacttgccatgaggtgttgaagccttgtttcactgagttggagagactggacctaaatggcgcagcatgactttgctccagcctggcttaatttccctactccaccatcatcaacaaagtcgtcattgaattttgagaagcattctgaaaactttgcatggacagagaatcgttatgatgtgaaccgtcgacgacacaactcttcagatggctttgattctgctattggacgtcctaatggaggtaactttggaaggaaagaaaaaaatggatggcgtacacatggaagaaatggtacagaaaacataaatcatcgaggtggataccatggtggaagttcccgttctcgtagcagtattttccatgcaggaaaaagccaaggactacatgaaaacaacatacctgacaatgaaaccgggaggaaagaagacaagagagaacgcaaacagtttgaagctgaggattttccgtctttaaatcctgagtatgagagagaaccaaatcacaataagtctttagctgcaggtgtgtggggcctacacgcccagacacacacatacccaaccaaaaaaatctcccaagctcctctcttaggtatgtttccttattattcagtttttctgggaacaactgattgcataagaatatagaaccacctggaaggtgttaaatagaatctctaagaaattaggaataatttggatttgattagaatgaaagttttaaaaatcaagaatgccagtgagcgtttgtcatataaaactatctatagatactattggtactgatcctgggttgatttaataatcttagaaatgatttagagacaaagacatatttgaaaataatgagagtaaaatgtattaatatgaagattttggttctactgtttcagggttggtctaaggattttgagtactagttgaaaagatgttcaaaaggaagatgtactctttactgtgtttaggtaaactaagaaatgtgtctgcataaacaaaaaaagaaaatggttaattgtggaatggttaattgttaaattcccagtacttcccataggaatacaatgaaactctcattgtatcacactttactattcctctctcactttcccccctgggttcccaagtattgttttccctattgcaacatttaaaatagctatgttcctgaggaagacgagaattttaggaaagacttcaatagagcttttctagtgctacttccttccaggtaagtaaaaatttactaacgaaaatataatatttattaaaaaaaaaagcaattt

SEQ ID NO: 39977 - DNA, 1965 bp, Homo sapiens
tttttgcttcaggtttctcttttaataaacaaaaccatccaaggtacagttccaaagtacaaaatcaaccaggtctgaactgattggtgataagagcacacagatcagtccttccttaaggaaacagtttcctccctgatgccctctttggtcactatgcagatccggagtgcgtccccagtgtacacatctctctcagccgcagaaatgaagacatctttcaccagccgcatgaagatgaaagccgtgctggctcagagaaggatgacgactcatttaatttacataacagcaatagtactcaccaagaaagggatataaaccgaaacttcgatgaaaatgaaattcctcaagagaatggcaatgcctcagtgatttcccagcagatcattcggtcttcaaccttcccacaaactgatgttctttcaagttcacttgaggcagaacacagattgttaaaggaaatgggctggcaggaagacagtgaaaatgatgaaacatgtgctcccttaactgaggatgaaatgagagaattccaagttattagtgaacagttacagaagaatggtctgagaaaaaatggtattttgaaaaatggcttgatctgtgacttcaagtttggaccgtggaagaacagcactttcaaacccacaactgagaatgatgacacagagacaagtagcagtgatacatcagatgacgacgatgtgtgaaggatttcctaacagctttagaaatcttagtgtgatacatctctcatacagtttggggtgaattgtaaaaatgaagaactataatttatgtagtgaaataccccattagaagaggattttttgggggacttcaatatgaagaaaaccaagaatgttttgttgggctgtgttgaacattatttctttgtaaatgaatgttgtaggaatgaggacttgggttggtccaacattgactttcttcatcactgcaacatttctctgactagcaatgtgacgatgtaacaaatgagattttctcatttaataataaaaaattgtgtaatgttttgcaaagcttctgtcttaaaatgtccaggtcttaagaaaaaaggcagcttacactgttttgcttgcagagtcatatctttttcgtacaatggaaatcctcaagtccactttgtgcggtctccctctccttcccccaaaaaacaacaacaacaaaacaaaaaccaaaaaggaaaatgtagcatgttggctaaaactggagcaaagtgcactaaaacaatttcctgaactcacctgttgtactattcaccttttaaaccataaattgctctttagccatttgtagtgcagtaaatgttacaggaaaagacttggcacattttcttccaaattttaagaggtgattttcaaaagctttattggggtatgttgtcagaccagggttttcagagttgatggaaaagagtcttgtgagaaaacttattttgataaattattacacacgcagaaaaactgatcacactgactggatctgtccacgacatggaaaataaactggattttcagaatattgttgttttctgtagtgttcaaggtattgtttctaaacataaacatactctaaacatgctttattcacttgttaaagtcatacttttaaaagtaataccttactaaagatggtgattacttttccgaggtcagaaaaggaaagctaagcgttttcattatcaaatacacaagcttattaaatgaatgactgttaactactttattttcatttgcacattaattttggaattgtttctgttttgctgctgacggaaatactattttggctctgtgtatatttgtattttgatttttctggtttgtttacccccatttgcttttagctcccccttatgtttaaatatattctaacttatgtaaagagcataatcttagagcaaaaatacttgaggttttatgtcagatctaatcttaa

SEQ ID NO: 39978 - DNA, 852 bp, Homo sapiens
ccgcacacagtatacttttggacaatctgcagctataaaaatatacacatacaaaagtacagctgcagattgtccacacagtatacttttggaagtttgggtggatgactctgaattcttgcacacctttcctaaaaatttctcccaagagagacttgtttgggccttttgtggtgtcagtggaatggataggtaacttgggtgggcaacttggggagctgaccattctcttttggtaaatgttgacggctcaagaggatgaatatgaagctttccaagataagcagattaaaaggaacatgtgttaccgaggtaggtcactgtcatttttgttttaagagttggggggagtatctatagtaaacttgaataaaggggacaaagctagaacttattcattcattcattcacttatggagttgttactgattttgcggaggtcaggttcataccaatggacactaatacaatcagtgttcccaaggctgtgcaggggtggggggacatgctgtcaggatggtctgagcatctgggtgagaaccagagaaacaggacttcttccttctgtaccatgagctgtgtccctttactatgcaagcacatgaccccagagacagctggttcactggcagatccccatgatggacttactaagggaaaggtgagatgaacactgcccccaaggagggggtgaaatatgatctaacttatgcaagagcctataattagtcccagtctcgactctacatttgtttgtgcagcattcattcagcaaagacttttggggtttgtgcaaggcacagttttaagcacataatgtaattctaaaagatgaataaactagagaggttc

SEQ ID NO: 39979 - DNA, 393 bp, Homo sapiens
ccgcacacagtatacttttggacaatctgcagctataaaaatatacacatacaaaagtacagctgcagattgtccacacagtatacttttggaagtttgggtggatgactctgaattcttgcacacctttcctaaaaatttctcccaagagagacttgtttgggccttttgtggtgtcagtggaatggataggtaacttgggtgggcaacttggggagctgaccattctcttttggtaaatgttgacggctcaagaggatgaatatgaagctttccaagataagcagattaaaaggaacatgtgttaccgaggtaggtcactgtcatttttgttttaagagttggggggagtatctatagtaaacttgaataaaggggacaaagctagaactt

SEQ ID NO: 39980 - DNA, 780 bp, Homo sapiens
acagtgaatctgacaactgagacggctgcagaccatggggcagggagcatatggagcacggatatgccagacagagggatgattcatatcccaggcaggatggagcagggcagtgtgctatttcatcgtgctactcagaacttatgaattgtttatttctggaatttcccatttaatatttttggactgtggttgatcgagggtaaatgaaattgcagaaagcaaaaatacagataagggggactgcttgctgtacaaagatagagacaagaggaaggagctgtcctcaagggccttttgtgtgaagacatctggcacacagatacgctgcatgcaggtggcttgagagaacatgcatccaggccctgaggaggcgggaagtggccgctatggaccccgttatatcaccgacatgggagctggtgaggatgatgaaggatttgaagacgacttagatttggatatttcctttgaggaggttaaaccacttcctgctaccaaaggagggaataagaaatttttggtggaaagcaagaagatgtctatatctaacccaaagaccatttctaggctcatcccccctacctcagcatctctccctgtgaccacggtggctccccagcccattcccatacagagaaaggggaagaatggtgtggccataatgtcaaggctctttgacatgccttgtgatgaaactctctgctctgctgacagcttctgtgtcaatgactacacctgggggggctcgcgatgccagtgcaccctgggcaaaggtgg

SEQ ID NO: 39981 - DNA, 2222 bp, Homo sapiens
ggacgttctggactctcgggcagagcttgtgagagaaacaaggctggcttcaagtgatctgcaaccagagtaattgggatttgacaaggactgtgaaaggctgactctccctgttctctttcatgctggcaccgggcagagtgtgggaactactgcctcaatacgatcatagaagccattgagatcccgcagtttatcggccgcagttacctgacgtatgacaacccagatatcttgaagagggtgtcaggatcaagatcaaatgtgttcatgaggtttaaaacaactgccaaggatggccttttgctgtggaggggagacagccccatgagacccaacagcgacttcatttccttgggccttcgggatggagccctcgtgttcagctataacctgggcagtggtgtggcatccatcatggtgaatggctccttcaacgatggtcggtggcaccgagttaaggccgttagggatggccagtcaggaaagataaccgtggatgactatggagccagaacaggcaaatccccaggcatgatgcggcagcttaacatcaatggagctctgtatgtgggtggaatgaaggaaattgctctgcacactaacaggcaatatatgagagggctcgtgggctgtatctctcacttcaccctgtccaccgattaccacatttccctcgtggaagatgccgtggatgggaaaaacatcaacacttgtggagccaagtaacaccagctggccttgtccaagggacagagccttctattctgagaatcccaggggccctcagaccctgcctgatgctatatgcagaggcccagggaccaggtgtgtttcctctcaccaagaagaaagtacacactgatgagaaactgagaaccaagacaggcatccctgggtggcctttcctgctgacactccacgagctgacccagcagaattctctgtgtaggaagcatcggactttgtccattgaatatgtagcggctgccagagatcacacatcaatgcaaattccagagcctgtctgctatagctcagtgactgtgttgtgattcatagtacattaaaaagagagagagagagaaagaatcccacagggcactattaaaatacttctctccttccctgactcatgacactcttcctgacagcagaatgactgtgtgaccttgaacttcacatttcccacattggcccttggattgttcggattaaccccttccactcctcactggctggttcactgtgttctgactagtccataaaaataaagatggaaggagatcaaacacagaatcataatcataatgcggcccccttccccagagcttacctcgaatgtgaaatccctacttcttataatgcagagttaaggagctgagcccccatgattttgtagctgtacttttgtatgtgtatatttttatagctgcagattgtccacacagtatacttttggaagtttgggtggatgactctgaattcttgcacacctttcctaaaaatttctcccaagagagacttgtttgggccttttgtggtgtcagtggaatggataggtaacttgggtgggcaacttggggagctgaccattctcttttggtaaatgttgacggctcaagaggatgaatatgaagctttccaagataagcagattaaaaggaacatgtgttaccgaggtaggtcactgtcatttttgttttaagagttggggggagtatctatagtaaacttgaataaaggggacaaagctagaacttattcattcattcattcacttatggagttgttactgattttgcggaggtcaggttcataccaatggacactaatacaatcagtgttcccaaggctgtgcaggggtggggggacatgctgtcaggatggtctgagcatctgggtgagaaccagagaaacaggacttcttccttctgtaccatgagctgtgtccctttactatgcaagcacatgaccccagagacagctggttcactggcagatccccatgatggacttactaagggaaaggtgagatgaacactgcccccaaggagggggtgaaatatgatctaacttatgcaagagcctataattagtcccagtctcgactctacatttgtttgtgcagcattcattcagcaaagacttttggggtttgtgcaaggcacagttttaagcacataatgtaattctaaaagatgaataaactagagaggttc

SEQ ID NO: 39982 - DNA, 2104 bp, Homo sapiens
agagaaccacatactatgtaacctcctttttctgttctgtcccagcgatcatagaagccattgagatcccgcagtttatcggccgcagttacctgacgtatgacaacccagatatcttgaagagggtgtcaggatcaagatcaaatgtgttcatgaggtttaaaacaactgccaaggatggccttttgctgtggaggggagacagccccatgagacccaacagcgacttcatttccttgggccttcgggatggagccctcgtgttcagctataacctgggcagtggtgtggcatccatcatggtgaatggctccttcaacgatggtcggtggcaccgagttaaggccgttagggatggccagtcaggaaagataaccgtggatgactatggagccagaacaggcaaatccccaggcatgatgcggcagcttaacatcaatggagctctgtatgtgggtggaatgaaggaaattgctctgcacactaacaggcaatatatgagagggctcgtgggctgtatctctcacttcaccctgtccaccgattaccacatttccctcgtggaagatgccgtggatgggaaaaacatcaacacttgtggagccaagtaacaccagctggccttgtccaagggacagagccttctattctgagaatcccaggggccctcagaccctgcctgatgctatatgcagaggcccagggaccaggtgtgtttcctctcaccaagaagaaagtacacactgatgagaaactgagaaccaagacaggcatccctgggtggcctttcctgctgacactccacgagctgacccagcagaattctctgtgtaggaagcatcggactttgtccattgaatatgtagcggctgccagagatcacacatcaatgcaaattccagagcctgtctgctatagctcagtgactgtgttgtgattcatagtacattaaaaagagagagagagagaaagaatcccacagggcactattaaaatacttctctccttccctgactcatgacactcttcctgacagcagaatgactgtgtgaccttgaacttcacatttcccacattggcccttggattgttcggattaaccccttccactcctcactggctggttcactgtgttctgactagtccataaaaataaagatggaaggagatcaaacacagaatcataatcataatgcggcccccttccccagagcttacctcgaatgtgaaatccctacttcttataatgcagagttaaggagctgagcccccatgattttgtagctgtacttttgtatgtgtatatttttatagctgcagattgtccacacagtatacttttggaagtttgggtggatgactctgaattcttgcacacctttcctaaaaatttctcccaagagagacttgtttgggccttttgtggtgtcagtggaatggataggtaacttgggtgggcaacttggggagctgaccattctcttttggtaaatgttgacggctcaagaggatgaatatgaagctttccaagataagcagattaaaaggaacatgtgttaccgaggtaggtcactgtcatttttgttttaagagttggggggagtatctatagtaaacttgaataaaggggacaaagctagaacttattcattcattcattcacttatggagttgttactgattttgcggaggtcaggttcataccaatggacactaatacaatcagtgttcccaaggctgtgcaggggtggggggacatgctgtcaggatggtctgagcatctgggtgagaaccagagaaacaggacttcttccttctgtaccatgagctgtgtccctttactatgcaagcacatgaccccagagacagctggttcactggcagatccccatgatggacttactaagggaaaggtgagatgaacactgcccccaaggagggggtgaaatatgatctaacttatgcaagagcctataattagtcccagtctcgactctacatttgtttgtgcagcattcattcagcaaagacttttggggtttgtgcaaggcacagttttaagcacataatgtaattctaaaagatgaataaactagagaggttc

SEQ ID NO: 39983 - DNA, 2168 bp, Homo sapiens
ggacgttctggactctcgggcagagcttgtgagagaaacaaggctggcttcaagtgatctgcaaccagagtaattgggatttgacaaggactgtgaaaggctgactctccctgttctctttcatgctggcaccgggcagagtgtgggaactactgcctcaatacgatcatagaagccattgagatcccgcagtttatcggccgcagttacctgacgtatgacaacccagatatcttgaagagggtgtcaggatcaagatcaaatgtgttcatgaggtttaaaacaactgccaaggatggccttttgctgtggaggggagacagccccatgagacccaacagcgacttcatttccttgggccttcgggatggagccctcgtgttcagctataacctgggcagtggtgtggcatccatcatggtgaatggctccttcaacgatggtcggtggcaccgagttaaggccgttagggatggccagtcaggaaagataaccgtggatgactatggagccagaacaggcaaatccccaggcatgatgcggcagcttaacatcaatggagctctgtatgtgggtggaatgaaggaaattgctctgcacactaacaggcaatatatgagagggctcgtgggctgtatctctcacttcaccctgtccaccgattaccacatttccctcgtggaagatgccgtggatgggaagagccttctattctgagaatcccaggggccctcagaccctgcctgatgctatatgcagaggcccagggaccaggtgtgtttcctctcaccaagaagaaagtacacactgatgagaaactgagaaccaagacaggcatccctgggtggcctttcctgctgacactccacgagctgacccagcagaattctctgtgtaggaagcatcggactttgtccattgaatatgtagcggctgccagagatcacacatcaatgcaaattccagagcctgtctgctatagctcagtgactgtgttgtgattcatagtacattaaaaagagagagagagagaaagaatcccacagggcactattaaaatacttctctccttccctgactcatgacactcttcctgacagcagaatgactgtgtgaccttgaacttcacatttcccacattggcccttggattgttcggattaaccccttccactcctcactggctggttcactgtgttctgactagtccataaaaataaagatggaaggagatcaaacacagaatcataatcataatgcggcccccttccccagagcttacctcgaatgtgaaatccctacttcttataatgcagagttaaggagctgagcccccatgattttgtagctgtacttttgtatgtgtatatttttatagctgcagattgtccacacagtatacttttggaagtttgggtggatgactctgaattcttgcacacctttcctaaaaatttctcccaagagagacttgtttgggccttttgtggtgtcagtggaatggataggtaacttgggtgggcaacttggggagctgaccattctcttttggtaaatgttgacggctcaagaggatgaatatgaagctttccaagataagcagattaaaaggaacatgtgttaccgaggtaggtcactgtcatttttgttttaagagttggggggagtatctatagtaaacttgaataaaggggacaaagctagaacttattcattcattcattcacttatggagttgttactgattttgcggaggtcaggttcataccaatggacactaatacaatcagtgttcccaaggctgtgcaggggtggggggacatgctgtcaggatggtctgagcatctgggtgagaaccagagaaacaggacttcttccttctgtaccatgagctgtgtccctttactatgcaagcacatgaccccagagacagctggttcactggcagatccccatgatggacttactaagggaaaggtgagatgaacactgcccccaaggagggggtgaaatatgatctaacttatgcaagagcctataattagtcccagtctcgactctacatttgtttgtgcagcattcattcagcaaagacttttggggtttgtgcaaggcacagttttaagcacataatgtaattctaaaagatgaataaactagagaggttc

SEQ ID NO: 39984 - DNA, 2097 bp, Homo sapiens
acagtgaatctgacaactgagacggctgcagaccatggggcagggagcatatggagcacggatatgccagacagagggatgattcatatcccaggcaggatggagcagggcagtgtgctatttcatcgtgctactcagaacttatgaattgtttatttctggaatttcccatttaatatttttggactgtggttgatcgagggtaaatgaaattgcagaaagcaaaaatacagataagggggactgcttgctgtacaaagatagagacaagaggaaggagctgtcctcaagggccttttgtgtgaagacatctggcacacagatacgctgcatgcaggtggcttgagagaacatgcatccaggtttaattgtggaactggggttgccatcatcgtaagtgagaccaaaatcaaactagggggttggcacacggttatgctctacagagatgggctgaacgggctgctgcagctgaacaatggcaccccagtgacaggccagtctcagggccaatacagtaaaattactttccggacacctctctatcttggtggcgctcccagcgcttactggttggttagagcaacagggacaaaccgaggctttcaaggctgtgtgcagtcgctcgctgtgaatgggaggagaattgacatgaggcccctcagaccctgcctgatgctatatgcagaggcccagggaccaggtgtgtttcctctcaccaagaagaaagtacacactgatgagaaactgagaaccaagacaggcatccctgggtggcctttcctgctgacactccacgagctgacccagcagaattctctgtgtaggaagcatcggactttgtccattgaatatgtagcggctgccagagatcacacatcaatgcaaattccagagcctgtctgctatagctcagtgactgtgttgtgattcatagtacattaaaaagagagagagagagaaagaatcccacagggcactattaaaatacttctctccttccctgactcatgacactcttcctgacagcagaatgactgtgtgaccttgaacttcacatttcccacattggcccttggattgttcggattaaccccttccactcctcactggctggttcactgtgttctgactagtccataaaaataaagatggaaggagatcaaacacagaatcataatcataatgcggcccccttccccagagcttacctcgaatgtgaaatccctacttcttataatgcagagttaaggagctgagcccccatgattttgtagctgtacttttgtatgtgtatatttttatagctgcagattgtccacacagtatacttttggaagtttgggtggatgactctgaattcttgcacacctttcctaaaaatttctcccaagagagacttgtttgggccttttgtggtgtcagtggaatggataggtaacttgggtgggcaacttggggagctgaccattctcttttggtaaatgttgacggctcaagaggatgaatatgaagctttccaagataagcagattaaaaggaacatgtgttaccgaggtaggtcactgtcatttttgttttaagagttggggggagtatctatagtaaacttgaataaaggggacaaagctagaacttattcattcattcattcacttatggagttgttactgattttgcggaggtcaggttcataccaatggacactaatacaatcagtgttcccaaggctgtgcaggggtggggggacatgctgtcaggatggtctgagcatctgggtgagaaccagagaaacaggacttcttccttctgtaccatgagctgtgtccctttactatgcaagcacatgaccccagagacagctggttcactggcagatccccatgatggacttactaagggaaaggtgagatgaacactgcccccaaggagggggtgaaatatgatctaacttatgcaagagcctataattagtcccagtctcgactctacatttgtttgtgcagcattcattcagcaaagacttttggggtttgtgcaaggcacagttttaagcacataatgtaattctaaaagatgaataaactagagaggttc

SEQ ID NO: 39985 - DNA, 1290 bp, Homo sapiens
ggacgttctggactctcgggcagagcttgtgagagaaacaaggctggcttcaagtgatctgcaaccagagtaattgggatttgacaaggactgtgaaaggctgactctccctgttctctttcatgctggcaccgggcagagtgtgggaactactgcctcaatacgatcatagaagccattgagatcccgcagtttatcggccgcagttacctgacgtatgacaacccagatatcttgaagagggtgtcaggatcaagatcaaatgtgttcatgaggtttaaaacaactgccaaggatggccttttgctgtggaggggagacagccccatgagacccaacagcgacttcatttccttgggccttcgggatggagccctcgtgttcagctataacctgggcagtggtgtggcatccatcatggtgaatggctccttcaacgatggtcggtggcaccgagttaaggccgttagggatggccagtcaggaaagataaccgtggatgactatggagccagaacaggcaaatccccaggcatgatgcggcagcttaacatcaatggagctctgtatgtgggtggaatgaaggaaattgctctgcacactaacaggcaatatatgagagggctcgtgggctgtatctctcacttcaccctgtccaccgattaccacatttccctcgtggaagatgccgtggatgggaaaaacatcaacacttgtggagccaagtaacaccagctggccttgtccaagggacagagccttctattctgagaatcccaggggccctcagaccctgcctgatgctatatgcagaggcccagggaccaggtgtgtttcctctcaccaagaagaaagtacacactgatgagaaactgagaaccaagacaggcatccctgggtggcctttcctgctgacactccacgagctgacccagcagaattctctgtgtaggaagcatcggactttgtccattgaatatgtagcggctgccagagatcacacatcaatgcaaattccagagcctgtctgctatagctcagtgactgtgttgtgattcatagtacattaaaaagagagagagagagaaagaatcccacagggcactattaaaatacttctctccttccctgactcatgacactcttcctgacagcagaatgactgtgtgaccttgaacttcacatttcccacattggcccttggattgttcggattaaccccttccactcctcactggctggttcactgtgttctgactagtccataaaaataaagatggaaggagatca

SEQ ID NO: 39986 - DNA, 915 bp, Homo sapiens
acagtgaatctgacaactgagacggctgcagaccatggggcagggagcatatggagcacggatatgccagacagagggatgattcatatcccaggcaggatggagcagggcagtgtgctatttcatcgtgctactcagaacttatgaattgtttatttctggaatttcccatttaatatttttggactgtggttgatcgagggtaaatgaaattgcagaaagcaaaaatacagataagggggactgcttgctgtacaaagatagagacaagaggaaggagctgtcctcaagggccttttgtgtgaagacatctggcacacagatacgctgcatgcaggtggcttgagagaacatgcatccaggtttaattgtggaactggggttgccatcatcgtaagtgagaccaaaatcaaactagggggttggcacacggttatgctctacagagatgggctgaacgggctgctgcagctgaacaatggcaccccagtgacaggccagtctcagggccaatacagtaaaattactttccggacacctctctatcttggtggcgctcccagcgcttactggttggttagagcaacagggacaaaccgaggctttcaaggctgtgtgcagtcgctcgctgtgaatgggaggagaattgacatgaggccctggcccctgggaaaagcactcagtggggctgatgtgggggaatgcagcagtggaatctgtgatgaggcctcgtgcatccatggtggcacctgcacagcaatcaaagccgactcctacatttgcctctgtccccttgggtttaaaggtcgacactgtgaagatggtgagaaagaagcaagttgaaggcggtttctatctgcatgttaatttgtgtagatgtactttatcatcaatatagtttctttgttaaaaaaa

SEQ ID NO: 39987 - DNA, 1446 bp, Homo sapiens
acagtgaatctgacaactgagacggctgcagaccatggggcagggagcatatggagcacggatatgccagacagagggatgattcatatcccaggcaggatggagcagggcagtgtgctatttcatcgtgctactcagaacttatgaattgtttatttctggaatttcccatttaatatttttggactgtggttgatcgagggtaaatgaaattgcagaaagcaaaaatacagataagggggactgcttgctgtacaaagatagagacaagaggaaggagctgtcctcaagggccttttgtgtgaagacatctggcacacagatacgctgcatgcaggtggcttgagagaacatgcatccaggtttaattgtggaactggggttgccatcatcgtaagtgagaccaaaatcaaactagggggttggcacacggttatgctctacagagatgggctgaacgggctgctgcagctgaacaatggcaccccagtgacaggccagtctcagggccaatacagtaaaattactttccggacacctctctatcttggtggcgctcccagcgcttactggttggttagagcaacagggacaaaccgaggctttcaaggctgtgtgcagtcgctcgctgtgaatgggaggagaattgacatgaggccctggcccctgggaaaagcactcagtggggctgatgtgggggaatgcagcagtggaatctgtgatgaggcctcgtgcatccatggtggcacctgcacagcaatcaaagccgactcctacatttgcctctgtccccttgggtttaaaggtcgacactgtgaagatgctttcaccttgaccattcctcagttcagagagtctctgagatcttacgctgcaactccctggccactggagccccagcattacctttccttcatggaatttgagatcacatttcggccagactcaggagatggtgtcctcctgtacagctatgacacaggcagcaaagacttcctgtccatcaacttggcagggggccacgtggagttccgctttgactgtggctctgggaccggtgtcctcaggagtgaagatcccctcaccctgggcaactggcacgagcttcgtgtatctcgcacagcaaagaatggaatcttacaggtggataagcagaagatagtggagggaatggcccgaagggaggcttcacaccagattaagtggcagcacccgacacttctgcattggcgggagtcccccactactgatgatggtgcaagaacgactcgggtgtccgaaagcttagagggagcacccgaaacatatctgatgacgcgacctcccgtgagatgacttcacccccgcggaagtgggaagcgccccccctgtgagctttgccctgtggcatctccccgaacagacacacatggacccgcatcgtccccaacatgaacttcaaaacaa

SEQ ID NO: 39988 - DNA, 1256 bp, Homo sapiens
acagtgaatctgacaactgagacggctgcagaccatggggcagggagcatatggagcacggatatgccagacagagggatgattcatatcccaggcaggatggagcagggcagtgtgctatttcatcgtgctactcagaacttatgaattgtttatttctggaatttcccatttaatatttttggactgtggttgatcgagggtaaatgaaattgcagaaagcaaaaatacagataagggggactgcttgctgtacaaagatagagacaagaggaaggagctgtcctcaagggccttttgtgtgaagacatctggcacacagatacgctgcatgcaggtggcttgagagaacatgcatccaggtttaattgtggaactggggttgccatcatcgtaagtgagaccaaaatcaaactagggggttggcacacggttatgctctacagagatgggctgaacgggctgctgcagctgaacaatggcaccccagtgacaggccagtctcaggggaatgcagcagtggaatctgtgatgaggcctcgtgcatccatggtggcacctgcacagcaatcaaagccgactcctacatttgcctctgtccccttgggtttaaaggtcgacactgtgaagatgctttcaccttgaccattcctcagttcagagagtctctgagatcttacgctgcaactccctggccactggagccccagcattacctttccttcatggaatttgagatcacatttcggccagactcaggagatggtgtcctcctgtacagctatgacacaggcagcaaagacttcctgtccatcaacttggcagggggccacgtggagttccgctttgactgtggctctgggaccggtgtcctcaggagtgaagatcccctcaccctgggcaactggcacgagcttcgtgtatctcgcacagcaaagaatggaatcttacaggtggataagcagaagatagtggagggaatggcccgaagggaggcttcacaccagattaagtggcagcacccgacacttctgcattggcgggagtcccccactactgatgatggtgcaagaacgactcgggtgtccgaaagcttagagggagcacccgaaacatatctgatgacgcgacctcccgtgagatgacttcacccccgcggaagtgggaagcgccccccctgtgagctttgccctgtggcatctccccgaacagacacacatggacccgcatcgtccccaacatgaacttcaaaacaa

SEQ ID NO: 39989 - DNA, 175 bp, Homo sapiens
taaggaaactgcactctgagttgcaaagaacttttgccctgagaatcgtctgtgaaccgtgtctgcttatgcctcagtgttttattctgttctctgtcttcttcttctccaatgccttagctataacctgggcagtggtgtggcatccatcatggtgaatggctccttcaacgat

SEQ ID NO: 39990 - DNA, 415 bp, Homo sapiens
aataaaagacaggttgtatgtgctatttccaaataaggggaatattggatggtgtagtagaactgtggatgatttgcaacagtttcggtcaagtatcacctaagataatttaatagcaaatatttatagattacaatgaaaacaaccttttgaattggagctgcatgaccactccattttcttattttttaacatatggtaaaggttaagatggcattttctctttatattttgggtttttgttacctgtctcattcacacattttttaaggcagtatgagaagaaaagggaacataaagaattgaaacatatttcttctccctttacaaaaagtgcctccattttgtttcttgacctttaaaataacaaagatccgtaatttcaagcactggcttgaataactctcaacattta

SEQ ID NO: 39991 - DNA, 343 bp, Homo sapiens
gacatgtgcattgcaggattgttttaatagcaaaaaactgggaaatacttaaatatccatttttaaaaatggggtaaataaattatggcacatccctacaatagaattccaagttgccgctaaaatgaggtacaaccatatttcttgatctagacaaaagtctgtaatatattaagtgtctttaaaagttataaaataataggtttgctatgtccccattttttgtaaaaacaaagagaaacaaaaactctgtgtgtgtgtgtgtgtgtgtgtgtgtgtgtgtgtgtgtgtgaatgtacaggtaaaaaaaaagtccagaccatatgttttctctcaatagtgg

SEQ ID NO: 39992 - DNA, 1082 bp, Homo sapiens
aaaagatctggtatgatgaacttaattgtaaagtcctggaagactgttgtgttggctgctaggcttggctgtatttgatggagcctccaaataagtgatttaagcaaggtagacatttatttttctttcacacagaagtgaaccaatatggcagttctgctatacgaaatctgacctctcttgtttctccagcattcctggggtgttgccctcatatgcctggcccaagatgattcactcccacttttacatctagccagcaagcagggggaaaatgcctgatctggaagttgtgtctgttatttccagtcacttcccattgttcagaatttagtcacctggtcatatcctagctataaatttgggttggaaatgtgtttcttctgggcagttgtatgcccagctaaaaatctattatatagcaggagggagaaattaatattgggggaacaaccagacatctctgccacaatcaagactttgttttgtatttctttgagtgctacacagtacttaacactgtggcttatccctgaagtctgaataaattcttctcattagttctttgtatgaaagactgaaggtctttggatcttggatttacctgctgctggggcaataagaaccctaagagattattcacagaagtgtttcctttttaatccaggcaataacaggaaagaaaagtattagtatacattgattacaatgatagcatgacatttaacctatatttataacttgttttccaatagtctgcaaaaacttaaaaagtaggaagaagccagccacagtggctatcatccacattcacagtggcctatcatcccagcattctgggaggctgaggtgagaggatcactagagcccaggagtttgagactaatgtgggccacataatgagacccccatctctacaaaaaaattaaaaaattagccaggcatggtggcacacacctgtactgccagctactctggtggctgaggtgggaggattgcttgaacccaggagtttgaggctgcagtaagctagggttgcaccactgcattccagcctgtgtgccagagccaaatactgtttc

SEQ ID NO: 39993 - DNA, 468 bp, Homo sapiens
ttttcaaaaatacaatataccagagttggattacttaataacatacattaaccagaggaatacactatctttatcatctggcttgttttattaatagctgctaattttagttacgtgttaaattttattgcagattaattactaagaaatagcatattgatctatcttttatccatttaaattgttagatatacataattcaaattcgcccttggttacttttagtaatcttataggatgtattttataatctagttctctgtgaagtggcttttaaaacttttgtttgaattttaaaatgaggcgggcggatcacaaggtcaggagatcgagaccatcctggctaacacagtgaaaccccgtctctactaaaaatacaaaaaattagccaggcgtggtggcaggtgcctgtagtcccagcactttgggaggccgaggcaggtggatcacgaggtcaggagatcgaga

SEQ ID NO: 39994 - DNA, 245 bp, Homo sapiens
aaatgttctatggatgagtgaagaaccaattttcttcagaccccaccatttgcatctggtcagctttagacctaaagaacaattcaattcaacacagtataatgccgtatatatttattgacaatctaccttgtgtcagacatgtgcaaagtcttgggaatacaatgacatgacaagagatagcacctgccctgcagaagcggatgagatacagtgtgataaatgttctcagaggtttaagggca

SEQ ID NO: 39995 - DNA, 374 bp, Homo sapiens
tctttgagggaattggcctttctccactatcagtccatgtgtggttccagggataggcatgtggctcgggccttagacagagtcaccatgattaattaagaggtggacacttgaccaagctgggccaatctggctcagccctggaacgtttgctggaattattctttttccacaagcactgctaagctgaaacaatgtaaattagatctactagtagccttatttgtcaccttgaagacagaagtggatttaaaatgagcgagcacagaggaaccaagaaatggagagagacagatccttcatggcgtgatttgaacatctggatctgtccatgcccgaagccaaatactcctgactttcaaattaagtgagcc

SEQ ID NO: 39996 - DNA, 418 bp, Homo sapiens
acaaagtactttatataattaaaagtgtgcatcatcatttatagtgattactgtgctgaaaataatgtgttaattttaaattttgaaacaattctaaacaaaagttacaagtacagtatataacttttttaaagatatttgagacggatgcttctcttttgtccctctaaataccttagtatatttctcttctttaaggatattctcctatatagccataatataccatcaatatcagaaagtaacaaatgtatgttatacacacacagacacacacatttacatatatatgtctgtgtgtgtgtgtgtgtgtgtgtgtgtattgaaaaatataagtgtacacttcaatctccaatttcagttcatcattagaggggccctaattttcatccctcctatatttgtattgtctttctga

SEQ ID NO: 39997 - DNA, 745 bp, Homo sapiens
tgacatcaaaaaatgtacattcagtgaatgcagaacaaatgaagggaaaagtgcctttaaaattacctcactgtgggctggaagaagcgaaaatctctgcccagcttccgtatcatagagagccctattcatcgctgcccaggccttcccaggaaaatcattttttctgggctgatgttgtattctgccatggcgcatatgttcttacagaaattttattgcttttgtcttgggtgctacaaaattcacagcaagccattttggttacatatctactggttgcaaggcaggaaatattggtgaaatgctagcaaagtcacaatttctactctgaacatgatttgcagtgttcatcagtatttttctgaaccctgctttaccattttctatattgccaagttgaatcatgtgggctgatgcagggaagctctgaagcagtgaataaaggtgtttcgggccctgtaagtgtttccatggtttctggtgtctgccagcagtagtgaacaaagctgcagcttctttgaaccgcgactactggaagtggcctttgctctcagggaacatggtgatggagggttgcatcagctccacccatggccaacagcccttgttgagtgacgggagtcggaatgtgctaccccgttgtgggaatcaggcaattcgctttattttcttgcattaagacttcattttcccagtattgaaatagccatacttttcctttacatacctctatactttccag

SEQ ID NO: 39998 - DNA, 671 bp, Homo sapiens
gggtgggtaggagggaaggaccatcgggttggggtgaggctaggcgtttctgacctctcactctccttgggcgggtcttgctatgggttaagtaggtgacattcccaggtcactggtgttgtgtaccaaggaggattatggttgcttctgctgagtcatgcaggttgtcagggaagtgggggaaagctggcagtcacaggcctcacccagctcccctgcaaaacgaagggccggtctcactcccaccatgcccaccacaacagcccccagaccatttccaggtggagagcgataggggcttgaaaacctgccccagactatccgcctcccagctgccaaagaagagggtttagttcgtgccgccgctgtggagtctgcacactggatttgcaccctcccctgagttctggccaggaggcttcttaccctgttcaaattgttacacagttcagctagagatttgcttctccctgtggagttttagcccttgctcctacccattggatccccgtggtgccagacaggaatgggctgctgggggacccagtgagctcccagggccttgctgctgcttcctctacgcctgtattttgcttggctttccaaattgactcagcgccagataaagttggaaacttctcctgcaaacagaccttcagcttcccccgtga

SEQ ID NO: 39999 - DNA, 424 bp, Homo sapiens
aagatgatctcccactcagaattggctttatttttgctactttttagcactctgactttgggtagtcttcagcctcttggaccctttgttttctcttcagaaaaatgaagagtctaaggtgctatttctagcaccagaaaaattgtacactcttaaaaaatagctaaaggaaaaatatgaataaggtctgtgggttgtaccaatgtcaatttcctggttttgtattatagttatgtaaaatgttgccatttgagaacactggataaagggtacatgaggctttctctgtactacttttgcaacttgctgtgaatctataattagcactttgggaggtaaaggagggagaatcacttgagcccaggagtttgagaccagcctgggcaacatggcaagaccctgtctctatataataaagtaattt

SEQ ID NO: 40000 - DNA, 417 bp, Homo sapiens
tgttaagctttatcagtagaggacactggagagacactgcaggaggaaagagttatgctgcctggttccagtatgttcattcaatagactcctgcaagaacacggcttctcccacacccagctcctacagaaccggtagcttctgcagtgtctggttcctccagcacggagttcttcagcaccggccttatgcagtacatggcagctagatgcagccagatgccagcaacttcccccagcaccttgctaaggcagttttgtactggagtgcattcagagagacacccctccatgaggctccctaaaagtaatttccagaaagttccagagagtgaagtaccaacaggttttgctggcacagcaccacagataatttcctgccattcaataagccacgctatgtcctccaacaaggtc

SEQ ID NO: 40001 - DNA, 330 bp, Homo sapiens
gtggttcaacatatgaaaatcaatcagtgtgatataccacgttaaggacaaaaaccatacgatcatctctgcacaaaaagcgtctgacaaaagtcattacccttttgtgataaaaacacagtacaaactaggtatagaaggagattacctcaacataagaaccgtatgtgaaaagcccacagctaacatcatactcaatggtgaaagactgaaagcttttcctctaagctcatgaagaagacaaggaggcttggttttgtggcttctatttaacatggtaatggaagttctagccaaaggaagtaagcaaaaaaaaaaaaaatcgaaatt

SEQ ID NO: 40002 - DNA, 387 bp, Homo sapiens
agctactcaggaggctgaggtcagagaatcacttgagcccaggaggttgaggctgcagtgagctgtgattgcaccactgcacttcaccctgggcgacagggcaagaccatgtctgtctgtctgtctgtctgcctgcctgtctgtctgtctctctctctctctctctctctctctccccccacaacacacaatgttattatatattttatttctagacagtgtcctatgatgagtatttcagcaaaaaaatctgttattgtgctgggcacagtggcccattcctgtagtcccaggtactcaagagactgaggcaagaggatctcttgagcccaggattttgaggccagcctgggcacatcgtgagaccctatctcaaaaaaaaaaaaa

SEQ ID NO: 40003 - DNA, 880 bp, Homo sapiens
ccagggatctgagcagctccttctagcatccttcatccttcaggtaccagccatccagacagtgcttgagctgcagaaactgagaccagacctctggcctggccctccccaggggcctcctttcctatagtcactgcttctgcatcagatactttcagctgcaactccctactgggtggggcacccatttcaggcagaaggttttggtaccctccactgaccctacacccagggctgctactgccgcttgtggcttcaggatgaaaggtgagaccccggtgaacagcactatgagtattgggcaagcacgcaagatggtggaacagcttaagattgaagccagcttgtgtcggataaaggtgtccaaggcagcagcagacctgatgacttactgtgatgcccacgcctgtgaggatcccctcatcacccctgtgcccacttcggagaaccccttccgggagaagaagttcttctgtgctctcctctgagctcccctgtcccttctcacaactcctcccttttccctctcctgggcccttccttaggtcagtaattgttgtgagccccttaggctccttgcatcccatccctaacccttgcctgaccatgtgaggttatctgaagcacaaggcccaccctcacctatctgtcgaccccatttcctaccacctttgtggccgaccccaagcaccccagagatatgaggcaccctttgctccacccacagcagggccccgtcagactctgccagcgcgtcctgcccgcttccctcggtgacctgctcagacaatggagagggatgggccaggttcttgctctcagtctcacctggagctactgggagggtaaagccatttgaagaataaagtcatccagagcc

SEQ ID NO: 40004 - DNA, 928 bp, Homo sapiens
ccagggatctgagcagctccttctagcatccttcatccttcaggtaccagccatccagacagtgcttgagctgcagaaactgagaccagacctctggcctggccctccccaggggcctcctttcctatagtcactgcttctgcatcagatactttcagctgcaactccctactgggtggggcacccatttcaggcagaaggttttggtaccctccactgaccctacacccagggctgctactgccgcttgtggcttcaggatgaaaggtgagaccccggtgaacagcactatgagtattgggcaagcacgcaagatggtggaacagcttaagattgaagccagcttgtgtcggataaaggtgtccaaggcagcagcagacctgatgacttactgtgatgcccacgcctgtgaggatcccctcatcacccctgtgcccacttcggagaaccccttccgggagaagaagttcttctgtgctctcctctgagctcccctgtcccttctcacaactcctcccttttccctctcctgggcccttccttaggtcagtaattgttgtgagccccttaggctccttgcatcccatccctaacccttgcctgaccatgtgaggttatctgaagcacaaggcccaccctcacctatctgtcgaccccatttcctaccacctttgtggccgaccccaagcaccccagagatatgaggcaccctttgctccacccacagcagggccccgtcagactctgccagcgcgtcctgcccgcttccctcggtgacctgctcagacaatggagagggatgggccaggttcttgctctcagtctcacctggagctactgggagggtaaagccatttgaagaataaagtcatccagagccaaaaaaaaaaaaatcggggatatagagggggggaaaagaggttgatgg

SEQ ID NO: 40005 - DNA, 4459 bp, Homo sapiens
gcaagaactgaaacgaatggggattgaactgctttgcctgttctttctatttctaggaaggaatgatcacgtacaaggtggctgtgccctgggaggtgcagaaacctgtgaagactgcctgcttattggacctcagtgtgcctggtgtgctcaggagaattttactcatccatctggagttggcgaaaggtgtgataccccagcaaaccttttagctaaaggatgtcaattaaacttcatcgaaaaccctgtctcccaagtagaaatacttaaaaataagcctctcagtgtaggcagacagaaaaatagttctgacattgttcagattgcgcctcaaagcttgatccttaagttgagaccaggtggtgcgcagactctgcaggtgcatgtccgccagactgaggactacccggtggatttgtattacctcatggacctctccgcctccatggatgacgacctcaacacaataaaggagctgggctcccggctttccaaagagatgtctaaattaaccagcaactttagactgggcttcggatcttttgtggaaaaacctgtatcccctttcgtgaaaacaacaccagaagaaattgccaacccttgcagtagtattccatacttctgtttacctacatttggattcaagcacattttgccattgacaaatgatgctgaaagattcaatgaaattgtgaagaatcagaaaatttctgctaatattgacacacccgaaggtggatttgatgcaattatgcaagctgctgtgtgtaaggaaaaaattggctggcggaatgactccctccacctcctggtctttgtgagtgatgctgattctcattttggaatggacagcaaactagcaggcatcgtcattcctaatgacgggctctgtcacttggacagcaagaatgaatactccatgtcaactgtcttggaatatccaacaattggacaactcattgataaactggtacaaaacaacgtgttattgatcttcgctgtaacccaagaacaagttcatttatatgagaattacgcaaaacttattcctggagctacagtaggtctacttcagaaggactccggaaacattctccagctgatcatctcagcttatgaagaactgcggtctgaggtggaactggaagtattaggagacactgaaggactcaacttgtcatttacagccatctgtaacaacggtaccctcttccaacaccaaaagaaatgctctcacatgaaagtgggagacacagcttccttcagcgtgactgtgaatatcccacactgcgagagaagaagcaggcacattatcataaagcctgtggggctgggggatgccctggaattacttgtcagcccagaatgcaactgcgactgtcagaaagaagtggaagtgaacagctccaaatgtcaccacgggaacggctctttccagtgtggggtgtgtgcctgccaccctggccacatggggcctcgctgtgagtgtggcgaggacatgctgagcacagattcctgcaaggaggccccagatcatccctcctgcagcggaaggggtgactgctactgtgggcagtgtatctgccacttgtctccctatggaaacatttatgggccttattgccagtgtgacaatttctcctgcgtgagacacaaagggctgctctgcggaggtaacggcgactgtgactgtggtgaatgtgtgtgcaggagcggctggactggcgagtactgcaactgcaccaccagcacggactcctgcgtctctgaagatggagtgctctgcagcgggcgcggggactgtgtttgtggcaagtgtgtttgcacaaaccctggagcctcaggaccaacctgtgaacgatgtcctacctgtggtgacccctgtaactctaaacggagctgcattgagtgccacctgtcagcagctggccaagcccgagaagaatgtgtggacaagtgcaaactagctggtgcgaccatcagtgaagaagaagatttctcaaaggatggttctgtttcctgctctctgcaaggagaaaatgaatgtcttattacattcctaataactacagataatgaggggaaaaccatcattcacagcatcaatgaaaaagattgtccgaagcctccaaacattcccatgatcatgttaggggtttccctggctattcttctcatcggggttgtcctactgtgcatctggaagctactggtgtcatttcatgatcgtaaagaagttgccaaatttgaagcagaacgatcaaaagccaagtggcaaacgggaaccaatccactctacagaggatccacaagtacttttaaaaatgtaacttataaacacagggaaaaacaaaaggtagacctttccacagattgctagaactactttatgcatgaaaaaagtctgtttcactgatatgaaatgttaatgcactatttaatttttttctctttgttgcttcaaaatgaggttggtttaagataataataggacatctgcagataagtcatcctctacatgaaggtgacagactgttggcagtttcaaaataatcaagaagagaaatatccttagcaaagagatgactttggggatcatttgaggaatactaactctgttgcattaatgcttcaaaaaatcatcaaatgattcatgggggcctgatttgcatttgaaaaatgtttgaaattagagtctcatttgtttcaggaatgcagctacctgagttttttgtctcggcaaagtcacaaagcccatatactcacattgtgtgtctatacttgccaattaattctaaacttgtaggaaatatgccctctcttaaaggagaattttttttaaatctctgagaaatgagattctgagtttatttcagctaaaaggttgcaattcttctgaagatatctcaaatataaggttgaaagttaagtgttaataatttttgtgaatttatacacacctaaacgttaagtacacaaatattttatttgttttacaaataaggaataagtaatttataaattaagaagttacctataaaaataaaaagataacaaccctatcatatagcttatttttaaattacctgaaaaacgatattctacactgtttcctttttgactctgagttttcaaactgttacttctcccatatttctcaatccatttcactcagttgcacagtcttttaaaccctgtaattgtcataccaaagtttctttttaaaaaaaaattactttaaatgcttagtttattcaaagagcgatccaataatataaaaggaacatgtgttaaacacaataaaattttaaatggctctaaatcaagcacatcaagagtatacaagtcttaaaggctttttaatacatactcttttcccatctatgtaacccaacttgcacatttcagctgcatgtggtgaatatgcatcatatatttactttaagaggtaagattttacttgcaaaatacatgtgcaaattaggatccatcagttgatggaagagatggactctagaatattatttcttgtggttattactcctttacaaagcactttcgtctcacttgatcctcataaggaaactaaggctcagaatgagtagagctgggttcagaatctagctcttctaactccaagccatctcctctttccactgcaggaaactgcctcttttgtcagtgaaataatagaaagattgtgttagttaagtgataactgtcatttgtttgaaaatgttcgagactgaacaaatagcatttaaactgctggcatatagatgagatattgtacttttgtgcaatgtttattacctttgattaaattgtaatgtgaagcttttactaggtgaatagttcattatgtagtggaggcttcgtggttgtccattgaattgtcacagcaaaatctataagtttcttcaattctacaagatagatccatatacctttgatcacttggagactctttttttgctggtttctagataactcaggtaaatcagacctttacagagtacagggctaggtgaaagaattactgaaaaatcaccttgaaaatccgaagggctgatataccctttatgttcctgactgatgcgcagaacctgggggaaatctacagcaatatacaggttgcaatgctgataacacaacagcaatcctctcctctacgtggacttactgttgtttttttaattattattggaatgggattttagaaaatagaagttacctttgtgtgtgttttagggaaggtagagaagaatctgctctttctctgaatactgttttgaccccaggcaggaccttggaaaggccaaaacattaacagtagtacttctgttcactgaagagttatgttacatgaagataaaatggttttgtcgtgtttattattgtattttgtgttgatataaataaacatggtaatttaaacaatgaaccttaaaaaaaa

SEQ ID NO: 40006 - DNA, 4386 bp, Homo sapiens
gcaagaactgaaacgaatggggattgaactgctttgcctgttctttctatttctaggaaggaatgatcacgtacaaggtggctgtgccctgggaggtgcagaaacctgtgaagactgcctgcttattggacctcagtgtgcctggtgtgctcaggagaattttactcatccatctggagttggcgaaaggtgtgataccccagcaaaccttttagctaaaggatgtcaattaaacttcatcgaaaaccctgtctcccaagtagaaatacttaaaaataagcctctcagtgtaggcagacagaaaaatagttctgacattgttcagattgcgcctcaaagcttgatccttaagttgagaccaggtggtgcgcagactctgcaggtgcatgtccgccagactgaggactacccggtggatttgtattacctcatggacctctccgcctccatggatgacgacctcaacacaataaaggagctgggctcccggctttccaaagagatgtctaaattaaccagcaactttagactgggcttcggatcttttgtggaaaaacctgtatcccctttcgtgaaaacaacaccagaagaaattgccaacccttgcagtagtattccatacttctgtttacctacatttggattcaagcacattttgccattgacaaatgatgctgaaagattcaatgaaattgtgaagaatcagaaaatttctgctaatattgacacacccgaaggtggatttgatgcaattatgcaagctgctgtgtgtaaggaaaaaattggctggcggaatgactccctccacctcctggtctttgtgagtgatgctgattctcattttggaatggacagcaaactagcaggcatcgtcattcctaatgacgggctctgtcacttggacagcaagaatgaatactccatgtcaactgtcttggaatatccaacaattggacaactcattgataaactggtacaaaacaacgtgttattgatcttcgctgtaacccaagaacaagttcatttatatgagaattacgcaaaacttattcctggagctacagtaggtctacttcagaaggactccggaaacattctccagctgatcatctcagcttatgaagaactgcggtctgaggtggaactggaagtattaggagacactgaaggactcaacttgtcatttacagccatctgtaacaacggtaccctcttccaacaccaaaagaaatgctctcacatgaaagtgggagacacagcttccttcagcgtgactgtgaatatcccacactgcgagagaagaagcaggcacattatcataaagcctgtggggctgggggatgccctggaattacttgtcagcccagaatgcaactgcgactgtcagaaagaagtggaagtgaacagctccaaatgtcaccacgggaacggctctttccagtgtggggtgtgtgcctgccaccctggccacatggggcctcgctgtgagtgtggcgaggacatgctgagcacagattcctgcaaggaggccccagatcatccctcctgcagcggaaggggtgactgctactgtgggcagtgtatctgccacttgtctccctatggaaacatttatgggccttattgccagtgtgacaatttctcctgcgtgagacacaaagggctgctctgcggaggtaacggcgactgtgactgtggtgaatgtgtgtgcaggagcggctggactggcgagtactgcaactgcaccaccagcacggactcctgcgtctctgaagatggagtgctctgcagcgggcgcggggactgtgtttgtggcaagtgtgtttgcacaaaccctggagcctcaggaccaacctgtgaacgatgtcctacctgtggtgacccctgtaactctaaacggagctgcattgagtgccacctgtcagcagctggccaagcccgagaagaatgtgtggacaagtgcaaactagctggtgcgaccatcagtgaagaagaagatttctcaaaggatggttctgtttcctgctctctgcaaggagaaaatgaatgtcttattacattcctaataactacagataatgaggggaaaaccatcattcacagcatcaatgaaaaagattgtccgaagcctccaaacattcccatgatcatgttaggggtttccctggctattcttctcatcggggttgtcctactgtgcatctggaagctactggtgtcatttcatgatcgtaaagaagttgccaaatttgaagcagaacgatcaaaagccaagtggcaaacgggaaccaatccactctacagaggatccacaagtacttttaaaaatgtaacttataaacacagggaaaaacaaaaggtagacctttccacagattgctagaactactttatgcatgaaaaaagtctgtttcactgatatgaaatgttaatgcactatttaatttttttctctttgttgcttcaaaatgaggttggtttaagataataataggacatctgcagataagtcatcctctacatgaaggtgacagactgttggcagtttcaaaataatcaagaagagaaatatccttagcaaagagatgactttggggatcatttgaggaatactaactctgttgcattaatgcttcaaaaaatcatcaaatgattcatgggggcctgatttgcatttgaaaaatgtttgaaattagagtctcatttgtttcaggaatgcagctacctgagttttttgtctcggcaaagtcacaaagcccatatactcacattgtgtgtctatacttgccaattaattctaaacttgtaggaaatatgccctctcttaaaggagaattttttttaaatctctgagaaatgagattctgagtttatttcagctaaaaggttgcaattcttctgaagatatctcaaatataaggttgaaagttaagtgttaataatttttgtgaatttatacacacctaaacgttaagtacacaaatattttatttgttttacaaataaggaataagtaatttataaattaagaagttacctataaaaataaaaagataacaaccctatcatatagcttatttttaaattacctgaaaaacgatattctacactgtttcctttttgactctgagttttcaaactgttacttctcccatatttctcaatccatttcactcagttgcacagtcttttaaaccctgtaattgtcataccaaagtttctttttaaaaaaaaattactttaaatgcttagtttattcaaagagcgatccaataatataaaaggaacatgtgttaaacacaataaaattttaaatggctctaaatcaagcacatcaagagtatacaagtcttaaaggctttttaatacatactcttttcccatctatgtaacccaacttgcacatttcagctgcatgtggtgaatatgcatcatatatttactttaagaggtaagattttacttgcaaaatacatgtgcaaattaggatccatcagttgatggaagagatggactctagaatattatttcttgtggttattactcctttacaaagcactttcgtctcacttgatcctcataaggaaactaaggctcagaatgagtagagctgggttcagaatctagctcttctaactccaagccatctcctctttccactgcaggaaactgcctcttttgtcagtgaaataatagaaagattgtgttagttaagtgataactgtcatttgtttgaaaatgttcgagactgaacaaatagcatttaaactgctggcatatagatgagatattgtacttttgtgcaatgtttattacctttgattaaattgtaatgtgaagcttttactaggtgaatagttcattatgtagtggaggcttcgtggttgtccattgaattgtcacagcaaaatctataagtttcttcaattctacaagatagatccatatacctttgatcacttggagactctttttttgctggtttctagataactcaggtaaatcagacctttacagagtacagggctaggtgaaagaattactgaaaaatcaccttgaaaatccgaagggctgatataccctttatgttcctgactgatgcgcagaacctgggggaaatctacagcaatatacaggttgcaatgctgataacacaacagcaatcctctcctctacgtggacttactgttgtttttttaattattattggaatgggattttagaaaatagaagttacctttgtgtgtgttttagggaaggtagagaagaatctgctctttctctgaatactgttttgaccccaggcaggaccttggaaaggccaaaacattaacagtagtacttctgttcactgaagagttatgcccctaccgcggtcccggctca

SEQ ID NO: 40007 - DNA, 870 bp, Homo sapiens
ctgcccagattatccctggcaggtggaaatcaggatagctcttctaactccaagccatctcctctttccactgcaggaaactgcctcttttgtcagtgaaataatagaaagattgtgttagttaagtgataactgtcatttgtttgaaaatgttcgagactgaacaaatagcatttaaactgctggcatatagatgagatattgtacttttgtgcaatgtttattacctttgattaaattgtaatgtgaagcttttactaggtgaatagttcattatgtagtggaggcttcgtggttgtccattgaattgtcacagcaaaatctataagtttcttcaattctacaagatagatccatatacctttgatcacttggagactctttttttgctggtttctagataactcaggtaaatcagacctttacagagtacagggctaggtgaaagaattactgaaaaatcaccttgaaaatccgaagggctgatataccctttatgttcctgactgatgcgcagaacctgggggaaatctacagcaatatacaggttgcaatgctgataacacaacagcaatcctctcctctacgtggacttactgttgtttttttaattattattggaatgggattttagaaaatagaagttacctttgtgtgtgttttagggaaggtagagaagaatctgctctttctctgaatactgttttgaccccaggcaggaccttggaaaggccaaaacattaacagtagtacttctgttcactgaagagttatgttacatgaagataaaatggttttgtcgtgtttattattgtattttgtgttgatataaataaacatggtaatttaaacaatgaaccttaaaaaaaa

SEQ ID NO: 40008 - DNA, 463 bp, Homo sapiens
tgtaacaacggtaccctcttccaacaccaaaagaaatgctctcacatgaaagtgggagacacagtaagtagctggccagtagatagtctgaataaatacctggatgggtcagaaattagctgagctcactgaagctggatttctttcaagaattttaaaagcaattttcaaagattttctagtaaatgcttttggcaaagctgatttccgtgaagccttgtttcacctcgtgcattttggtggatggagggagataattagtattttcttttccaggcttccttcagcgtgactgtgaatatcccacactgcgagagaagaagcaggcacattatcataaagcctgtggggctgggggatgccctggaattacttgtcagcccagaatgcaactgcgactgtcagaaagaagtggaagtgaacagctccaaatgtcaccacgggaacggctctttccagtgtg

SEQ ID NO: 40009 - DNA, 3902 bp, Homo sapiens
gcaagaactgaaacgaatggggattgaactgctttgcctgttctttctatttctaggaaggaatgatcacgtacaaggtggctgtgccctgggaggtgcagaaacctgtgaagactgcctgcttattggacctcagtgtgcctggtgtgctcaggagaattttactcatccatctggagttggcgaaaggtgtgataccccagcaaaccttttagctaaaggatgtcaattaaacttcatcgaaaaccctgtctcccaagtagaaatacttaaaaataagcctctcagtgtaggcagacagaaaaatagttctgacattgttcagattgcgcctcaaagcttgatccttaagttgagaccaggtggtgcgcagactctgcaggtgcatgtccgccagactgaggactacccggtggatttgtattacctcatggacctctccgcctccatggatgacgacctcaacacaataaaggagctgggctcccggctttccaaagagatgtctaaattaaccagcaactttagactgggcttcggatcttttgtggaaaaacctgtatcccctttcgtgaaaacaacaccagaagaaattgccaacccttgcagtagtattccatacttctgtttacctacatttggattcaagcacattttgccattgacaaatgatgctgaaagattcaatgaaattgtgaagaatcagaaaatttctgctaatattgacacacccgaaggtggatttgatgcaattatgcaagctgctgtgtgtaaggaaaaaattggctggcggaatgactccctccacctcctggtctttgtgagtgatgctgattctcattttggaatggacagcaaactagcaggcatcgtcattcctaatgacgggctctgtcacttggacagcaagaatgaatactccatgtcaactgtcttggaatatccaacaattggacaactcattgataaactggtacaaaacaacgtgttattgatcttcgctgtaacccaagaacaagttcatttatatgagaattacgcaaaacttattcctggagctacagtaggtctacttcagaaggactccggaaacattctccagctgatcatctcagcttatgaagaactgcggtctgaggtggaactggaagtattaggagacactgaaggactcaacttgtcatttacagccatctgtaacaacggtaccctcttccaacaccaaaagaaatgctctcacatgaaagtgggagacacagcttccttcagcgtgactgtgaatatcccacactgcgagagaagaagcaggcacattatcataaagcctgtggggctgggggatgccctggaattacttgtcagcccagaatgcaactgcgactgtcagaaagaagtggaagtgaacagctccaaatgtcaccacgggaacggctctttccagtgtggggtgtgtgcctgccaccctggccacatggggcctcgctgtgagtgtggcgaggacatgctgagcacagattcctgcaaggaggccccagatcatccctcctgcagcggaaggggtgactgctactgtgggcagtgtatctgccacttgtctccctatggaaacatttatgggccttattgccagtgtgacaatttctcctgcgtgagacacaaagggctgctctgcggaggtaacggcgactgtgactgtggtgaatgtgtgtgcaggagcggctggactggcgagtactgcaactgcaccaccagcacggactcctgcgtctctgaagatggagtgctctgcagcgggcgcggggactgtgtttgtggcaagtgtgtttgcacaaaccctggagcctcaggaccaacctgtgaacgatgtcctacctgtggtgacccctgtaactctaaacggagctgcattgagtgccacctgtcagcagctggccaagcccgagaagaatgtgtggacaagtgcaaactagctggtgcgaccatcagtgaagaagaagatttctcaaaggatggttctgtttcctgctctctgcaaggagaaaatgaatgtcttattacattcctaataactacagataatgaggggaaaaccatcattcacagcatcaatgaaaaagattgtccgaagcctccaaacattcccatgatcatgttaggggtttccctggctattcttctcatcggggttgtcctactgtgcatctggaagctactggtgtcatttcatgatcgtaaagaagttgccaaatttgaagcagaacgatcaaaagccaagtggcaaacgggaaccaatccactctacagaggatccacaagtacttttaaaaatgtaacttataaacacagggaaaaacaaaaggtagacctttccacagattgctagaactactttatgcatgaaaaaagtctgtttcactgatatgaaatgttaatgcactatttaatttttttctctttgttgcttcaaaatgaggttggtttaagataataataggacatctgcagataagtcatcctctacatgaaggtgacagactgttggcagtttcaaaataatcaagaagagaaatatccttagcaaagagatgactttggggatcatttgaggaatactaactctgttgcattaatgcttcaaaaaatcatcaaatgattcatgggggcctgatttgcatttgaaaaatgtttgaaattagagtctcatttgtttcaggaatgcagctacctgagttttttgtctcggcaaagtcacaaagcccatatactcacattgtgtgtctatacttgccaattaattctaaacttgtaggaaatatgccctctcttaaaggagaattttttttaaatctctgagaaatgagattctgagtttatttcagctaaaaggttgcaattcttctgaagatatctcaaatataaggttgaaagttaagtgttaataatttttgtgaatttatacacacctaaacgttaagtacacaaatattttatttgttttacaaataaggaataagtaatttataaattaagaagttacctataaaaataaaaagataacaaccctatcatatagcttatttttaaattacctgaaaaacgatattctacactgtttcctttttgactctgagttttcaaactgttacttctcccatatttctcaatccatttcactcagttgcacagtcttttaaaccctgtaattgtcataccaaagtttctttttaaaaaaaaattactttaaatgcttagtttattcaaagagcgatccaataatataaaaggaacatgtgttaaacacaataaaattttaaatggctctaaatcaagcacatcaagagtatacaagtcttaaaggctttttaatacatactcttttcccatctatgtaacccaacttgcacatttcagctgcatgtggtgaatatgcatcatatatttactttaagaggtaagattttacttgcaaaatacatgtgcaaattaggatccatcagttgatggaagagatggactctagaatattatttcttgtggttattactcctttacaaagcactttcgtctcacttgatcctcataaggaaactaaggctcagaatgagtagagctgggttcagaatctagctcttctaactccaagccatctcctctttccactgcaggaaactgcctcttttgtcagtgaaataatagaaagattgtgttagttaagtgataactgtcatttgtttgaaaatgttcgagactgaacaaatagcatttaaactgctggcatatagatgagatattgtacttttgtgcaatgtttattacctttgattaaattgtaatgtgaagcttttactaggtgaatagtttatgctgtaatagttatgctgtatagttatgctgtggtccgc

SEQ ID NO: 40010 - DNA, 519 bp, Homo sapiens
tcctaatcattgagaaacagaatgggatcatcaatagttaattaattagtctcatcatcagggttgagatgaatgttgagcaattaatcatcattacaagtattccatgtaccatgatttatttaactaatttcctattaaggtttaatatcaaattttcatgataataaataatgttgttaggtatatctttgttccatataattttgtatacttgtgcaaaggtttttgtagactagattacttgagtaacattcctagatcaaaggaagttaacagacactgtcaaactaaagttataatttgaagaatatgtatatacccccatacatattcctaccaatagagtgtaggtttccctgactccccatcaggcctctttacctcttatcaatctaccagggctgctacctacagggatctgctaagggggcagactgtgcactatagtagcttcatctgatttctaagaggaggcgtaagccttggccatgaatttttaagtctcaattatagaac

SEQ ID NO: 40011 - DNA, 442 bp, Homo sapiens
ctttaggactccaaagacgctgtcacttacatggtattcagggaggacacagaggatctgtgagcagcctgcagccaagctttgagatcatattgagatttttttgtaatatatgaggagtgttctggctccttttattactttcttcatagcaaaaattgggggtccaagttgtcgttaaattgaaactctctcacttaccctgaaaaagatttgactgtgagcataacattgttacttcattcaagacatggaagcaaaagggttaattagtgctgctcacaaaatagttctactttttcttcttccaattatatgattggataacccttccctcccttgaagtcagggttgccatgtggcttactttggtcaataaaatatgattgagagcaatactgtggtacatccatacagtggaatattatccagtgataaaaaa

SEQ ID NO: 40012 - DNA, 336 bp, Homo sapiens
cagggcgggtgaggaaagctatcagtagttgtcatctccagcatccacacataaggaactaatgtaacatgtcatattcttcaccttgaaagttccaccaaatagctaggcttgtatcaatttgcaaggtgctagaaaattattgaatgctctgtgcatatttagagatattgaataagacagcctgaaaaatttttactattagataatgtatgtaattcttatttgggaaaatttggtttttggggaggttaaaactgggaattaataaggctaagtaattttgctttgactcactgttcactctcaatacatactgaagttctccggggaagg

SEQ ID NO: 40013 - DNA, 3004 bp, Homo sapiens
ctgaggacttggctgcaaccccagagcccccagggtgtcccggagccctggaccgtgctggcagctggacggagctccctggctgagggccaggtgggtggcagagcaaaagaggaatggactgtgggccacctgctaccctccagccccacctgactgggccacctggcactgcccaccaccctgtagcagtgtgccagcaggagagtctgtcctttgcagagctgcccgccctgaagcccccgagcccagtgtgtctggaccttttccctgttgccccagaggagcttcgggctcctggcagccgctggtccctggggacccctgcccctctccaagggttgctatggccattatccccaggaggctcagatacagagatcaccagcggggggatgcggcccagcagggctggcagctggccacactgtcctggtgcccagcccccagctctggagggaccctggagtccccgacacacacagccacagcgccgggccagccacggctcggagaagaagtctgcctggcgcaagatgcgggtgtaccagcgtgaagaggtccccggctgccccgaggcccacgctgtcttcctagagcctggccaggtagtgcaagagcaggccctgagcacagaggagcccagggtggagttgtctgggtccacccgagtgagcctcgaaggtcctgagcggaggcgcttctcggcatcggagctgatgacccggctgcactcttctctgcgcctggggcggaattcagcagcccgggcactcatctctgggtcaggcaccggagcagcccgggaagggaaagcatctggaatggaggctcgaagtgtagagatgagcggggaccgggtgtcgcggccagcccctggtgactcacgagagggcgattggtccgagcccaggctagacacacaggaagagccgcctttggggtccaggagcaccaacgagcggcgccagtctcgattcctccttaactccgtcctctatcaggaatacagcgacgtggccagcgcccgcgaactgcggcggcagcagcgcgaggaggagggcccgggggacgaggccgagggcgcagaggaggggccggggccgccgcgggccaacctctcccccagcagctccttccgggcgcagcgctcggcgcgaggctccaccttctcgctgtggcaggatatccccgacgtacgcggcagcggcgtcctggccacgctgagcctgcgggactgcaagctgcaggaggccaagtttgagctgatcacctccgaggcctcctacatccacagcctgtcggtggctgtgggccacttcttaggctctgccgagctgagcgagtgtctgggggcgcaggacaagcagtggctgttttccaaactgcccgaggtcaagagcaccagcgagaggttcctgcaggacctggagcagcggctggaggcagatgtgctgcgcttcagcgtgtgcgacgtggtgctggaccactgcccggccttccgcagagtctacctgccctatgtcaccaaccaggcctaccaggagcgcacctaccagcgcctgctcctggagaaccccaggttccctggcatcctggctcgcctggaggagtctcctgtgtgccagcgtctgccccttacctccttccttatcctgcccttccagaggatcacccgcctcaagatgttggtggagaacatcctgaagcggacagcacagggctctgaagacgaagacatggccaccaaggccttcaatgcgctcaaggagctggtgcaggagtgcaatgctagtgtacagtccatgaagaggacagaggaactcatccacctgagcaagaagatccactttgagggcaagattttcccgctgatctctcaggcccgctggctggttcggcatggagagttggtagagctggcaccactgcctgcagcaccccctgccaagctgaagctgtccagcaaggcagtctacctccacctcttcaatgactgcttgctgctctctcggcggaaggagctagggaagtttgccgttttcgtccatgccaagatggctgagctgcaggtgcgggacctgagcctgaagctgcagggcatccccggccacgtgttcctcctccagctcctccacgggcagcacatgaagcaccagttcctgctgcgggcccggacggaaagtgagaagcagcgatggatctcagccttgtgcccctccagcccccaggaggacaaggaggtcatcagtgagggggaagattgcccccaggttcagtgtgttaggacatacaaggcactgcacccagatgagctgaccttggagaagactgacatcctgtcagtgaggacctggaccagtgacggctggctggaaggggtccgcctggcagatggtgagaaggggtgggtgccccaggcctatgtggaagagatcagcagcctcagcgcccgcctccgaaacctccgggagaataagcgagtcacaagtgccaccagcaaactgggggaggctcctgtgtgatgggcagccatggcctaggaccccacctccatgcctggctcctggatggtcctggaggggcctgcagtgtctccattccccaagctgctcctgctggcacttcgcttctgtggccttggcattgagggcacaggctggacacaggaatgggggcgcctccagagggtctctccgtcctcatgctcctcagtgtccacacttcaaggccaaggatagtttcttcctctgacatggggaccataacaggtgatcactgatacctggcaaagactggggccctctcctttctatgtcctcaatcctgcctgactcttggtccttctggcagggacctggctggggaacgttctggtgctgatggtgctgggacctatatgtatatttatatatatctggggtcttgtctaccacctcccctggtcagagcctgagtgggtgctggttgctgtgtcttgtctgtaaataaactcctatcatgc

SEQ ID NO: 40014 - DNA, 2992 bp, Homo sapiens
  misc_feature (2984)..(2984): n is a, c, g, or t
ctgaggacttggctgcaaccccagagcccccagggtgtcccggagccctggaccgtgctggcagctggacggagctccctggctgagggccaggtgggtggcagagcaaaagaggaatggactgtgggccacctgctaccctccagccccacctgactgggccacctggcactgcccaccaccctgtagcagtgtgccagcaggagagtctgtcctttgcagagctgcccgccctgaagcccccgagcccagtgtgtctggaccttttccctgttgccccagaggagcttcgggctcctggcagccgctggtccctggggacccctgcccctctccaagggttgctatggccattatccccaggaggctcagatacagagatcaccagcggggggatgcggcccagcagggctggcagctggccacactgtcctggtgcccagcccccagctctggagggaccctggagtccccgacacacacagccacagcgccgggccagccacggctcggagaagaagtctgcctggcgcaagatgcgggtgtaccagcgtgaagaggtccccggctgccccgaggcccacgctgtcttcctagagcctggccaggtagtgcaagagcaggccctgagcacagaggagcccagggtggagttgtctgggtccacccgagtgagcctcgaaggtcctgagcggaggcgcttctcggcatcggagctgatgacccggctgcactcttctctgcgcctggggcggaattcagcagcccgggcactcatctctgggtcaggcaccggagcagcccgggaagggaaagcatctggaatggaggctcgaagtgtagagatgagcggggaccgggtgtcgcggccagcccctggtgactcacgagagggcgattggtccgagcccaggctagacacacaggaagagccgcctttggggtccaggagcaccaacgagcggcgccagtctcgattcctccttaactccgtcctctatcaggaatacagcgacgtggccagcgcccgcgaactgcggcggcagcagcgcgaggaggagggcccgggggacgaggccgagggcgcagaggaggggccggggccgccgcgggccaacctctcccccagcagctccttccgggcgcagcgctcggcgcgaggctccaccttctcgctgtggcaggatatccccgacgtacgcggcagcggcgtcctggccacgctgagcctgcgggactgcaagctgcaggaggccaagtttgagctgatcacctccgaggcctcctacatccacagcctgtcggtggctgtgggccacttcttaggctctgccgagctgagcgagtgtctgggggcgcaggacaagcagtggctgttttccaaactgcccgaggtcaagagcaccagcgagaggttcctgcaggacctggagcagcggctggaggcagatgtgctgcgcttcagcgtgtgcgacgtggtgctggaccactgcccggccttccgcagagtctacctgccctatgtcaccaaccaggcctaccaggagcgcacctaccagcgcctgctcctggagaaccccaggttccctggcatcctggctcgcctggaggagtctcctgtgtgccagcgtctgccccttacctccttccttatcctgcccttccagaggatcacccgcctcaagatgttggtggagaacatcctgaagcggacagcacagggctctgaagacgaagacatggccaccaaggccttcaatgcgctcaaggagctggtgcaggagtgcaatgctagtgtacagtccatgaagaggacagaggaactcatccacctgagcaagaagatccactttgagggcaagattttcccgctgatctctcaggcccgctggctggttcggcatggagagttggtagagctggcaccactgcctgcagcaccccctgccaagctgaagctgtccagcaaggcagtctacctccacctcttcaatgactgcttgctgctctctcggcggaaggagctagggaagtttgccgttttcgtccatgccaagatggctgagctgcaggtgcgggacctgagcctgaagctgcagggcatccccggccacgtgttcctcctccagctcctccacgggcagcacatgaagcaccagttcctgctgcgggcccggacggaaagtgagaagcagcgatggatctcagccttgtgcccctccagcccccaggaggacaaggaggtcatcagtgagggggaagattgcccccaggttcagtgtgttaggacatacaaggcactgcacccagatgagctgaccttggagaagactgacatcctgtcagtgaggacctggaccagtgacggctggctggaaggggtccgcctggcagatggtgagaaggggtgggtgccccaggcctatgtggaagagatcagcagcctcagcgcccgcctccgaaacctccgggagaataagcgagtcacaagtgccaccagcaaactgggggaggctcctgtgtgatgggcagccatggcctaggaccccacctccatgcctggctcctggatggtcctggaggggcctgcagtgtctccattccccaagctgctcctgctggcacttcgcttctgtggccttggcattgagggcacaggctggacacaggaatgggggcgcctccagagggtctctccgtcctcatgctcctcagtgtccacacttcaaggccaaggatagtttcttcctctgacatggggaccataacaggtgatcactgatacctggcaaagactggggccctctcctttctatgtcctcaatcctgcctgactcttggtccttctggcagggacctggctggggaacgttctggtgctgatggtgctgggacctatatgtatatttatatatatctggggtcttgtctaccacctcccctggtcagagctttattggtttttttttttttttttttttttntttttttt

SEQ ID NO: 40015 - DNA, 3201 bp, Homo sapiens
  misc_feature (3197)..(3201): n is a, c, g, or t
ctgaggacttggctgcaaccccagagcccccagggtgtcccggagccctggaccgtgctggcagctggacggagctccctggctgagggccaggtgggtggcagagcaaaagaggaatggactgtgggccacctgctaccctccagccccacctgactgggccacctggcactgcccaccaccctgtagcagtgtgccagcaggagagtctgtcctttgcagagctgcccgccctgaagcccccgagcccagtgtgtctggaccttttccctgttgccccagaggagcttcgggctcctggcagccgctggtccctggggacccctgcccctctccaagggttgctatggccattatccccaggaggctcagatacagagatcaccagcggggggatgcggcccagcagggctggcagctggccacactgtcctggtgcccagcccccagctctggagggaccctggagtccccgacacacacagccacagcgccgggccagccacggctcggagaagaagtctgcctggcgcaagatgcgggtgtaccagcgtgaagaggtccccggctgccccgaggcccacgctgtcttcctagagcctggccaggtagtgcaagagcaggccctgagcacagaggagcccagggtggagttgtctgggtccacccgagtgagcctcgaaggtcctgagcggaggcgcttctcggcatcggagctgatgacccggctgcactcttctctgcgcctggggcggaattcagcagcccgggcactcatctctgggtcaggcaccggagcagcccgggaagggaaagcatctggaatggaggctcgaagtgtagagatgagcggggaccgggtgtcgcggccagcccctggtgactcacgagagggcgattggtccgagcccaggctagacacacaggaagagccgcctttggggtccaggagcaccaacgagcggcgccagtctcgattcctccttaactccgtcctctatcaggaatacagcgacgtggccagcgcccgcgaactgcggcggcagcagcgcgaggaggagggcccgggggacgaggccgagggcgcagaggaggggccggggccgccgcgggccaacctctcccccagcagctccttccgggcgcagcgctcggcgcgaggctccaccttctcgctgtggcaggatatccccgacgtacgcggcagcggcgtcctggccacgctgagcctgcgggactgcaagctgcaggaggccaagtttgagctgatcacctccgaggcctcctacatccacagcctgtcggtggctgtgggccacttcttaggctctgccgagctgagcgagtgtctgggggcgcaggacaagcagtggctgttttccaaactgcccgaggtcaagagcaccagcgagaggttcctgcaggacctggagcagcggctggaggcagatgtgctgcgcttcagcgtgtgcgacgtggtgctggaccactgcccggccttccgcagagtctacctgccctatgtcaccaaccaggcctaccaggagcgcacctaccagcgcctgctcctggagaaccccaggttccctggcatcctggctcgcctggaggagtctcctgtgtgccagcgtctgccccttacctccttccttatcctgcccttccagaggatcacccgcctcaagatgttggtggagaacatcctgaagcggacagcacagggctctgaagacgaagacatggccaccaaggccttcaatgcgctcaaggagctggtgcaggagtgcaatgctagtgtacagtccatgaagaggacagaggaactcatccacctgagcaagaagatccactttgagggcaagattttcccgctgatctctcaggcccgctggctggttcggcatggagagttggtagagctggcaccactgcctgcagcaccccctgccaagctgaagctgtccagcaaggcagtctacctccacctcttcaatgactgcttgctgctctctcggcggaaggagctagggaagtttgccgttttcgtccatgccaagatggctgagctgcaggtgcgggacctgagcctgaagctgcagggcatccccggccacgtgttcctcctccagctcctccacgggcagcacatgaagcaccagttcctgctgcgggcccggacggaaagtgagaagcagcgatggatctcagccttgtgcccctccagcccccaggaggacaaggaggtcatcagtgagggggaagattgcccccaggttcagtgtgttaggacatacaaggcactgcacccagatgagctgaccttggagaagactgacatcctgtcagtgaggacctggaccagtgacggctggctggaaggggtccgcctggcagatggtgagaaggggtgggtgccccaggcctatgtggaagagatcagcagcctcagcgcccgcctccgaaacctccgggagaataagcgagtcacaagtgccaccagcaaactgggggaggctcctgtgtgatgggcagccatggcctaggaccccacctccatgcctggctcctggatggtcctggaggggcctgcagtgtctccattccccaagctgctcctgctggcacttcgcttctgtggccttggcattgagggcacaggctggacacaggaatgggggcgcctccagagggtctctccgtcctcatgctcctcagtgtccacacttcaaggccaaggatagtttcttcctctgacatggggaccataacaggtgatcactgatacctggcaaagactggggccctctcctttctatgtcctcaatcctgcctatatgtatatttatatatatctggggtcttgtctaccacctcccctggtcagagcctgagtgggtgctggttgctgtgtcttgtctgtaaataaactcctatcatgcctttgcttggagtctgtgatccatctgatgctgcccccacccccacagtcctattttcccagctaaagaccaggagagtctccggctggctcccaactggggctttgcatttctctagagttcatctctgagctgtaagggtgaccagggggcagggggacgattgtgtatcagctaggctgcttttggctgcaagtaacaaaatatcagatacaaataggcttaaacattaaagagatttgattagttcttaaaaannnnn

SEQ ID NO: 40016 - DNA, 2752 bp, Homo sapiens
ctgaggacttggctgcaaccccagagcccccagggtgtcccggagccctggaccgtgctggcagctggacggagctccctggctgagggccaggtgggtggcagagcaaaagaggaatggactgtgggccacctgctaccctccagccccacctgactgggccacctggcactgcccaccaccctgtagcagtgtgccagcaggagagtctgtcctttgcagagctgcccgccctgaagcccccgagcccagtgtgtctggaccttttccctgttgccccagaggagcttcgggctcctggcagccgctggtccctggggacccctgcccctctccaagggttgctatggccattatccccaggaggctcagatacagagatcaccagcggggggatgcggcccagcagggctggcagctggccacactgtcctggtgcccagcccccagctctggagggaccctggagtccccgacacacacagccacagcgccgggccagccacggctcggagaagaagtctgcctggcgcaagatgcgggtgtaccagcgtgaagaggtccccggctgccccgaggcccacgctgtcttcctagagcctggccaggtagtgcaagagcaggccctgagcacagaggagcccagggtggagttgtctgggtccacccgagtgagcctcgaaggtcctgagcggaggcgcttctcggcatcggagctgatgacccggctgcactcttctctgcgcctggggcggaattcagcagcccgggcactcatctctgggtcaggcaccggagcagcccgggaagggaaagcatctggaatggaggctcgaagtgtagagatgagcggggaccgggtgtcgcggccagcccctggtgactcacgagagggcgattggtccgagcccaggctagacacacaggaagagccgcctttggggtccaggagcaccaacgagcggcgccagtctcgattcctccttaactccgtcctctatcaggaatacagcgacgtggccagcgcccgcgaactgcggcggcagcagcgcgaggaggagggcccgggggacgaggccgagggcgcagaggaggggccggggccgccgcgggccaacctctcccccagcagctccttccgggcgcagcgctcggcgcgaggctccaccttctcgctgtggcaggatatccccgacgtacgcggcagcggcgtcctggccacgctgagcctgcgggactgcaagctgcaggaggccaagtttgagctgatcacctccgaggcctcctacatccacagcctgtcggtggctgtgggccacttcttaggctctgccgagctgagcgagtgtctgggggcgcaggacaagcagtggctgttttccaaactgcccgaggtcaagagcaccagcgagaggttcctgcaggacctggagcagcggctggaggcagatgtgctgcgcttcagcgtgtgcgacgtggtgctggaccactgcccggccttccgcagagtctacctgccctatgtcaccaaccaggcctaccaggagcgcacctaccagcgcctgctcctggagaaccccaggttccctggcatcctggctcgcctggaggagtctcctgtgtgccagcgtctgccccttacctccttccttatcctgcccttccagaggatcacccgcctcaagatgttggtggagaacatcctgaagcggacagcacagggctctgaagacgaagacatggccaccaaggccttcaatgcgctcaaggagctggtgcaggagtgcaatgctagtgtacagtccatgaagaggacagaggaactcatccacctgagcaagaagatccactttgagggcaagattttcccgctgatctctcaggcccgctggctggttcggcatggagagttggtagagctggcaccactgcctgcagcaccccctgccaagctgaagctgtccagcaaggcagtctacctccacctcttcaatgactgcttgctgctctctcggcggaaggagctagggaagtttgccgttttcgtccatgccaagatggctgagctgcaggtgcgggacctgagcctgaagctgcagggcatccccggccacgtgttcctcctccagctcctccacgggcagcacatgaagcaccagttcctgctgcgggcccggacggaaagtgagaagcagcgatggatctcagccttgtgcccctccagcccccaggaggacaaggaggtcatcagtgagggggaagattgcccccaggttcagtgtgttaggacatacaaggcactgcacccagatgagctgaccttggagaagactgacatcctgtcagtgaggacctggaccagtgacggctggctggaaggggtccgcctggcagatggtgagaaggggtgggtgccccaggcctatgtggaagagatcagcagcctcagcgcccgctcctcagtgtccacacttcaaggccaaggatagtttcttcctctgacatggggaccataacaggtgatcactgatacctggcaaagactggggccctctcctttctatgtcctcaatcctgcctgactcttggtccttctggcagggacctggctggggaacgttctggtgctgatggtgctgggacctatatgtatatttatatatatctggggtcttgtctaccacctcccctggtcagagcctgagtgggtgctggttgctgtgtcttgtctgtaaataaactcctatcatgc

SEQ ID NO: 40017 - DNA, 3232 bp, Homo sapiens
  misc_feature (3228)..(3232): n is a, c, g, or t
ctgaggacttggctgcaaccccagagcccccagggtgtcccggagccctggaccgtgctggcagctggacggagctccctggctgagggccaggtgggtggcagagcaaaagaggaatggactgtgggccacctgctaccctccagccccacctgactgggccacctggcactgcccaccaccctgtagcagtgtgccagcaggagagtctgtcctttgcagagctgcccgccctgaagcccccgagcccagtgtgtctggaccttttccctgttgccccagaggagcttcgggctcctggcagccgctggtccctggggacccctgcccctctccaagggttgctatggccattatccccaggaggctcagatacagagatcaccagcggggggatgcggcccagcagggctggcagctggccacactgtcctggtgcccagcccccagctctggagggaccctggagtccccgacacacacagccacagcgccgggccagccacggctcggagaagaagtctgcctggcgcaagatgcgggtgtaccagcgtgaagaggtccccggctgccccgaggcccacgctgtcttcctagagcctggccaggtagtgcaagagcaggccctgagcacagaggagcccagggtggagttgtctgggtccacccgagtgagcctcgaaggtcctgagcggaggcgcttctcggcatcggagctgatgacccggctgcactcttctctgcgcctggggcggaattcagcagcccgggcactcatctctgggtcaggcaccggagcagcccgggaagggaaagcatctggaatggaggctcgaagtgtagagatgagcggggaccgggtgtcgcggccagcccctggtgactcacgagagggcgattggtccgagcccaggctagacacacaggaagagccgcctttggggtccaggagcaccaacgagcggcgccagtctcgattcctccttaactccgtcctctatcaggaatacagcgacgtggccagcgcccgcgaactgcggcggcagcagcgcgaggaggagggcccgggggacgaggccgagggcgcagaggaggggccggggccgccgcgggccaacctctcccccagcagctccttccgggcgcagcgctcggcgcgaggctccaccttctcgctgtggcaggatatccccgacgtacgcggcagcggcgtcctggccacgctgagcctgcgggactgcaagctgcaggaggccaagtttgagctgatcacctccgaggcctcctacatccacagcctgtcggtggctgtgggccacttcttaggctctgccgagctgagcgagtgtctgggggcgcaggacaagcagtggctgttttccaaactgcccgaggtcaagagcaccagcgagaggttcctgcaggacctggagcagcggctggaggcagatgtgctgcgcttcagcgtgtgcgacgtggtgctggaccactgcccggccttccgcagagtctacctgccctatgtcaccaaccaggcctaccaggagcgcacctaccagcgcctgctcctggagaaccccaggttccctggcatcctggctcgcctggaggagtctcctgtgtgccagcgtctgccccttacctccttccttatcctgcccttccagaggatcacccgcctcaagatgttggtggagaacatcctgaagcggacagcacagggctctgaagacgaagacatggccaccaaggccttcaatgcgctcaaggagctggtgcaggagtgcaatgctagtgtacagtccatgaagaggacagaggaactcatccacctgagcaagaagatccactttgagggcaagattttcccgctgatctctcaggcccgctggctggttcggcatggagagttggtagagctggcaccactgcctgcagcaccccctgccaagctgaagctgtccagcaaggcagtctacctccacctcttcaatgactgcttgctgctctctcggcggaaggaatggctgagctgcaggtgcgggacctgagcctgaagctgcagggcatccccggccacgtgttcctcctccagctcctccacgggcagcacatgaagcaccagttcctgctgcgggcccggacggaaagtgagaagcagcgatggatctcagccttgtgcccctccagcccccaggaggacaaggaggtcatcagtgagggggaagattgcccccaggttcagtgtgttaggacatacaaggcactgcacccagatgagctgaccttggagaagactgacatcctgtcagtgaggacctggaccagtgacggctggctggaaggggtccgcctggcagatggtgagaaggggtgggtgccccaggcctatgtggaagagatcagcagcctcagcgcccgcctccgaaacctccgggagaataagcgagtcacaagtgccaccagcaaactgggggaggctcctgtgtgatgggcagccatggcctaggaccccacctccatgcctggctcctggatggtcctggaggggcctgcagtgtctccattccccaagctgctcctgctggcacttcgcttctgtggccttggcattgagggcacaggctggacacaggaatgggggcgcctccagagggtctctccgtcctcatgctcctcagtgtccacacttcaaggccaaggatagtttcttcctctgacatggggaccataacaggtgatcactgatacctggcaaagactggggccctctcctttctatgtcctcaatcctgcctgactcttggtccttctggcagggacctggctggggaacgttctggtgctgatggtgctgggacctatatgtatatttatatatatctggggtcttgtctaccacctcccctggtcagagcctgagtgggtgctggttgctgtgtcttgtctgtaaataaactcctatcatgcctttgcttggagtctgtgatccatctgatgctgcccccacccccacagtcctattttcccagctaaagaccaggagagtctccggctggctcccaactggggctttgcatttctctagagttcatctctgagctgtaagggtgaccagggggcagggggacgattgtgtatcagctaggctgcttttggctgcaagtaacaaaatatcagatacaaataggcttaaacattaaagagatttgattagttcttaaaaannnnn

SEQ ID NO: 40018 - DNA, 2201 bp, Homo sapiens
  misc_feature (2197)..(2201): n is a, c, g, or t
aggaaaggcttgcacaatttcccgcggcgggacgtgggtcgccgggcccgcccggcgccagattaggagtggggctagagaaggggcgaggacgcgaggtgtggcgtcctggggtctggggatgtgaggccagggcctccgaggtgaactggtcctgccctttcgaccccgtgtgtgccctccctcaggccaagtttgagctgatcacctccgaggcctcctacatccacagcctgtcggtggctgtgggccacttcttaggctctgccgagctgagcgagtgtctgggggcgcaggacaagcagtggctgttttccaaactgcccgaggtcaagagcaccagcgagaggttcctgcaggacctggagcagcggctggaggcagatgtgctgcgcttcagcgtgtgcgacgtggtgctggaccactgcccggccttccgcagagtctacctgccctatgtcaccaaccaggcctaccaggagcgcacctaccagcgcctgctcctggagaaccccaggttccctggcatcctggctcgcctggaggagtctcctgtgtgccagcgtctgccccttacctccttccttatcctgcccttccagaggatcacccgcctcaagatgttggtggagaacatcctgaagcggacagcacagggctctgaagacgaagacatggccaccaaggccttcaatgcgctcaaggagctggtgcaggagtgcaatgctagtgtacagtccatgaagaggacagaggaactcatccacctgagcaagaagatccactttgagggcaagattttcccgctgatctctcaggcccgctggctggttcggcatggagagttggtagagctggcaccactgcctgcagcaccccctgccaagctgaagctgtccagcaaggcagtctacctccacctcttcaatgactgcttgctgctctctcggcggaaggagctagggaagtttgccgttttcgtccatgccaagatggctgagctgcaggtgcgggacctgagcctgaagctgcagggcatccccggccacgtgttcctcctccagctcctccacgggcagcacatgaagcaccagttcctgctgcgggcccggacggaaagtgagaagcagcgatggatctcagccttgtgcccctccagcccccaggaggacaaggaggtcatcagtgagggggaagattgcccccaggttcagtgtgttaggacatacaaggcactgcacccagatgagctgaccttggagaagactgacatcctgtcagtgaggacctggaccagtgacggctggctggaaggggtccgcctggcagatggtgagaaggggtgggtgccccaggcctatgtggaagagatcagcagcctcagcgcccgcctccgaaacctccgggagaataagcgagtcacaagtgccaccagcaaactgggggaggctcctgtgtgatgggcagccatggcctaggaccccacctccatgcctggctcctggatggtcctggaggggcctgcagtgtctccattccccaagctgctcctgctggcacttcgcttctgtggccttggcattgagggcacaggctggacacaggaatgggggcgcctccagagggtctctccgtcctcatgctcctcagtgtccacacttcaaggccaaggatagtttcttcctctgacatggggaccataacaggtgatcactgatacctggcaaagactggggccctctcctttctatgtcctcaatcctgcctgactcttggtccttctggcagggacctggctggggaacgttctggtgctgatggtgctgggacctatatgtatatttatatatatctggggtcttgtctaccacctcccctggtcagagcctgagtgggtgctggttgctgtgtcttgtctgtaaataaactcctatcatgcctttgcttggagtctgtgatccatctgatgctgcccccacccccacagtcctattttcccagctaaagaccaggagagtctccggctggctcccaactggggctttgcatttctctagagttcatctctgagctgtaagggtgaccagggggcagggggacgattgtgtatcagctaggctgcttttggctgcaagtaacaaaatatcagatacaaataggcttaaacattaaagagatttgattagttcttaaaaannnnn

SEQ ID NO: 40019 - DNA, 2071 bp, Homo sapiens
  misc_feature (2067)..(2071): n is a, c, g, or t
aggaaaggcttgcacaatttcccgcggcgggacgtgggtcgccgggcccgcccggcgccagattaggagtggggctagagaaggggcgaggacgcgaggtgtggcgtcctggggtctggggatgtgaggccagggcctccgaggtgaactggtcctgccctttcgaccccgtgtgtgccctccctcaggccaagtttgagctgatcacctccgaggcctcctacatccacagcctgtcggtggctgtgggccacttcttaggctctgccgagctgagcgagtgtctgggggcgcaggacaagcagtggctgttttccaaactgcccgaggtcaagagcaccagcgagaggttcctgcaggacctggagcagcggctggaggcagatgtgctgcgcttcagcgtgtgcgacgtggtgctggaccactgcccggccttccgcagagtctacctgccctatgtcaccaaccaggcctaccaggagcgcacctaccagcgcctgctaacatcctgaagcggacagcacagggctctgaagacgaagacatggccaccaaggccttcaatgcgctcaaggagctggtgcaggagtgcaatgctagtgtacagtccatgaagaggacagaggaactcatccacctgagcaagaagatccactttgagggcaagattttcccgctgatctctcaggcccgctggctggttcggcatggagagttggtagagctggcaccactgcctgcagcaccccctgccaagctgaagctgtccagcaaggcagtctacctccacctcttcaatgactgcttgctgctctctcggcggaaggagctagggaagtttgccgttttcgtccatgccaagatggctgagctgcaggtgcgggacctgagcctgaagctgcagggcatccccggccacgtgttcctcctccagctcctccacgggcagcacatgaagcaccagttcctgctgcgggcccggacggaaagtgagaagcagcgatggatctcagccttgtgcccctccagcccccaggaggacaaggaggtcatcagtgagggggaagattgcccccaggttcagtgtgttaggacatacaaggcactgcacccagatgagctgaccttggagaagactgacatcctgtcagtgaggacctggaccagtgacggctggctggaaggggtccgcctggcagatggtgagaaggggtgggtgccccaggcctatgtggaagagatcagcagcctcagcgcccgcctccgaaacctccgggagaataagcgagtcacaagtgccaccagcaaactgggggaggctcctgtgtgatgggcagccatggcctaggaccccacctccatgcctggctcctggatggtcctggaggggcctgcagtgtctccattccccaagctgctcctgctggcacttcgcttctgtggccttggcattgagggcacaggctggacacaggaatgggggcgcctccagagggtctctccgtcctcatgctcctcagtgtccacacttcaaggccaaggatagtttcttcctctgacatggggaccataacaggtgatcactgatacctggcaaagactggggccctctcctttctatgtcctcaatcctgcctgactcttggtccttctggcagggacctggctggggaacgttctggtgctgatggtgctgggacctatatgtatatttatatatatctggggtcttgtctaccacctcccctggtcagagcctgagtgggtgctggttgctgtgtcttgtctgtaaataaactcctatcatgcctttgcttggagtctgtgatccatctgatgctgcccccacccccacagtcctattttcccagctaaagaccaggagagtctccggctggctcccaactggggctttgcatttctctagagttcatctctgagctgtaagggtgaccagggggcagggggacgattgtgtatcagctaggctgcttttggctgcaagtaacaaaatatcagatacaaataggcttaaacattaaagagatttgattagttcttaaaaannnnn

SEQ ID NO: 40020 - DNA, 554 bp, Homo sapiens
gaaagaaacaaggatacagaagacctacgtcacatatcaacagggtataatgaactggcatacatagatctctataccctgaaaacagagaatatgctcttttcagtgtccatgatatacttttaaaaactggccaaactgatcccttaataagtccaataggtctttcttctgggggtgggggggaacaaagcaaattattaaataatctaatcaaaaaagaaaaacacaaatatccaaaataagaaataagagcagaaatactagaaaaatggaggtaattaaaagataatattcaacactattcaactgtatataagtaaatttgaaaagctgactaagtgaattatttttctgggaaaatataatttatccaaaatcactccaagggagacatgaaatccaagcaaatcaatcatcatagaaaaaataaagttctaaataaggcccccaaacccgacagcttcacaggagatcattccctgaatttttctgtgtgaagaacagaaaattccactataaaactattagaaagcaacgaacttaaaaaaaaa

SEQ ID NO: 40021 - DNA, 367 bp, Homo sapiens
gggaatgaattcctccaaaaacaccccgtttccctgcctgtggagccaattaagccaagcaaggctgtacctttaattactgctgccctcatttgcatctggctgccctcattatagtgctattagcagagtgcaggggtcctcctgctggcccatcaggagtggtgcgtgcacagttgtggggccttgctttggtggtctttgctgccttctgggcaaaatgaaggatttggagtagacagcaagcaggcatacatcctgggccagaagcagcctgcggagctcatcgtggcttgccttaaattgtttctcaacaataaagttgttgaaaaacaatttgtgttttctttctccttattaaaaaccc

SEQ ID NO: 40022 - DNA, 155 bp, Homo sapiens
aagaatggggtgaggaggatgagggggagaaaatttgtcagaggagatcctaggctttttggcttaagtgaaagacagctagtgaccttaatgagcagttttggtagaggtgagttcagaagagaatgggaaatggcattttactgtaaaaggca

SEQ ID NO: 40023 - DNA, 233 bp, Homo sapiens
taaaaagtaaaacagaaacatttatgtttctcaccaagcagtaaattagtactcaactaataaatttcttaaactccctaataacagaatatggaaacaaaaaataaatctttccaaaagaagagctcatggacacatttcctcatatatgtatacataatatagtagaacacatgataaataacctataaaaatgataccaatatcattcatcaagagacgaggctcttctt

SEQ ID NO: 40024 - DNA, 392 bp, Homo sapiens
gttatgttgatcacaactcatcatggcccacaaaggagctgtaaccaatgtttgagaaacacaagacactattctgtgtcaatcagtgtatcactgccctggagctagaaaatagtaaccactaacccctgagtggtacagtgtacttaatactgttttagcactttacatgcattgttttatgtaatcctccccagcagccctgtgaggcaagtattacctccattctgcaaaaactgaagcatcgagaagttaccaagattcaaactgattgactccaaagcctgcactcttagctgctcccccacctattaccgcccaaataggcaggaggaaaagagctctgtgacagttttaataggctccaaacagagatgagattgagggtggcg

SEQ ID NO: 40025 - DNA, 384 bp, Homo sapiens
aacctgggaatggcaaatatttagaggaattctaatacaatggcagaaggagaaggaaattaaagtttggtgggttcttctcttctctgcgttagatttaaaagtatttttgtctagaaatattacaaatttgcaggttaatttaaagggacatttttctctttgtaactttatgaataaatggagaaaaatattctctgtatgtttcctttgttccagttttaaattttcctttattatatgttttacttttaggtcatttcccatttttctgacttggttttgtatggaatttgacagaacaaagaaagcatttaatgatggagttatataaattctttatcttctatgacaggctaaacttactggaaataaatgttgatg

SEQ ID NO: 40026 - DNA, 799 bp, Homo sapiens
ggcagctactgctacttttaaaagtggtaaacagtaccatttcgttcaagtttagccagtatgacctaaagtgtcacaaaagcatcaccgtaagaataatgtaagaatgctatcattttataaatcccattgttctgcctatatgcccgtggcacgtgttcagtgattatttacaaatgtttgacctgccctgctccctactgagattcttgaggaagtcctggctcatttttatggccacatctctactgctttccctcagctcactgcctttcacgtatttgtgggtttgcctgggtgccatggatctccaagggttctgtgaatagagttcaggggttgatgaattgggacagggggaaaaaaatgcattttcagtgactctgatatttagcatttccttcaattatggatgtaggccagaaacttcagtagtatttgtagtgcctgtcactttgtcaccagtagaattcacagatattgtcatcacacatcacggttacttagctacctcaaaataccacttatgctcatcacaactttgaaattacagtggttattagacctgccgctagggtttgttgcttgaagtgttaacaaagaagtacatgcatcactatctcataaattgctttataatattttgataacaggctgggcaaggtggctcacgcctgtaatccttaacactttgggaggctgaggtgggaggatggcctgagcctaggagtttgaggctgcagtgagccacgatggtgccactgcactgcagcctggatgacagggtgaaacccttctc

SEQ ID NO: 40027 - DNA, 192 bp, Homo sapiens
tccttaacctaatggcatcttttgtcttgtaatatttactcttttaaaaaactatatgtgtgtgtgtgtgtgtatagatacatatataagtgcaccctactactcacaggttatggggaatccaatgtgtgtatattggggggctactgtaccatcagcctgctccaccgtgttacctgccccacagtaggt

SEQ ID NO: 40028 - DNA, 952 bp, Homo sapiens
aatttcaacagaagcaatgccttcaaacttgtgaaagaaatttccaacctaaaattctgtatctgactaaatgtaacataaaagtcaaatgaagagtataaaaaaatttgcctcctatatatcctttctcaagaagctactaaaggatgtgcttcataaaaagggcataaaccaaacaaaatgacataggatgcaggaaatgggatttagcacaggagagaaatgaaagaaatccccagatgatgaggatggaatatccaaggatgaccactacaccaggcatagagagtatattgaagcatatcagaagatcctggccacatgtttttagaaagattaataaaatatccaatgtatctcagtatcttaagagtgaggcaaccagcaaactacgaggttcttcctgaaacaaagcctgagtcaagaacgtgggttagtttattttagagatcccagaaactaggagtgagggacttgtgatattgcgaaggagaaaggggaaagtcagtataaaacatggtgtattattgaggtcatttctgtgtagacagtgggagcttgattccaccaggtcctcaaagaagctatgtgatagctccctgaattgcctcctgaaagacaagtggctggagcatttaaccgtacgctgtcatttttcactcatcaagttgctgccaagggcatcatctccttgcacatggggcagtttgcacatgggcacagtaggctccttaagtgtcaaagaagaccctgagacagaaagctgaaagagtaggaaatgggtcttcagttcccatggagctgtccactgatactggctggaatcagaaggtgggtggaggagatgcttttcaaggctccagggttcaatcagaggtgacagtgattctggagaaaaaccaaccaagccaaacaaaaaactggcagttaactccaggaaagcaaaatgggc

SEQ ID NO: 40029 - DNA, 338 bp, Homo sapiens
gaggtagagtctcactctgtcacccaaggtggagtgcagtagcgcgatctcagctcactgcaacctccacctcctgggtttaagcattttcccctgccttgtgcctcccgagtagctgggattacaggcatgaaccaccacacctggctaatttttttgtatttttagtagggacgggtttcaccatgttggccaggctggtctcaaactcctgacctcaggcaatccacctgcctcggcctcccaaagtgctgggattacaggtgtgagccaccacacccagtcttgtttttacatattaaaaatacccaatctgggcctggcctggtgtaaaaaaa

SEQ ID NO: 40030 - DNA, 982 bp, Homo sapiens
aaggacaaatatccaagtgaccgtgacggggcctagctcaccaagtcctcttgctgtggtacagccaatggcagttaatatttccgcaaatggttttggatttgctatttgtcagctcaatgttgtatataatgtgaaggcttctgggtcttctagaagacgaagatctatccaaaatcaagaagcctttgatttagatgttgctgtaaaagaaaataaagatgatctcaatcatgtggatttgaatgtgtgtacaagcttttcgggcccgggtaggagtggcatggctcttatggaagttaacctattaagtggctttatggtgccttcagaagcaatttctctgagcgagacagtgaagaaagtggaatatgatcatggaaaactcaacctctatttagattctgtaaatgaaacccagttttgtgttaatattcctgctgtgagaaactttaaagtttcaaatacccaagatgcttcagtgtccatagtggattactatgagccaaggagacaggcggtgagaagttacaactctgaagtgaagctgtcctcctgtgacctttgcagtgatgtccagggctgccgtccttgtgaggatggagcttcaggctcccatcatcactcttcagtcatttttattttctgtttcaagcttctgtactttatggaactttggctgtgatttatttttaaaggactctgtgtaacactaacatttccagtagtcacatgtgattgttttgttttcgtagaagaatactgcttctattttgaaaaaagagttttttttctttctatggggttgcagggatggtgtacaacaggtcctagcatgtatagctgcatagatttcttcacctgatctttgtgtggaagatcagaatgaatgcagttgtgtgtctatattttcccctctcaaaatcttttagaatttttttggaggtgtttgttttctccagaataaaggtattactttaga

SEQ ID NO: 40031 - DNA, 1221 bp, Homo sapiens
aaggacaaatatccaagtgaccgtgacggggcctagctcaccaagtcctgtaaagtttctgattgacacacacaaccgcttactccttcagacagcagagcttgctgtggtacagccaatggcagttaatatttccgcaaatggttttggatttgctatttgtcagctcaatgttgtatataatgtgaaggcttctgggtcttctagaagacgaagatctatccaaaatcaagaagcctttgatttagatgttgctgtaaaagaaaataaagatgatctcaatcatgtggatttgaatgtgtgtacaagcttttcgggcccgggtaggagtggcatggctcttatggaagttaacctattaagtggctttatggtgccttcagaagcaatttctctgagcgagacagtgaagaaagtggaatatgatcatggaaaactcaacctctatttagattctgtaaatgaaacccagttttgtgttaatattcctgctgtgagaaactttaaagtttcaaatacccaagatgcttcagtgtccatagtggattactatgagccaaggagacaggcggtgagaagttacaactctgaagtgaagctgtcctcctgtgacctttgcagtgatgtccagggctgccgtccttgtgaggatggagcttcaggctcccatcatcactcttcagtcatttttattttctgtttcaagcttctgtactttatggaactttggctgtgatttatttttaaaggactctgtgtaacactaacatttccagtagtcacatgtgattgttttgttttcgtagaagaatactgcttctattttgaaaaaagagttttttttctttctatggggttgcagggatggtgtacaacaggtcctagcatgtatagctgcatagatttcttcacctgatctttgtgtggaagatcagaatgaatgcagttgtgtgtctatattttcccctctcaaaatcttttagaatttttttggaggtgtttgttttctccagaataaaggtattactttagaataggtattctcctcattttgtgaaagaaatgaacctagattcttaagcattattacacatccatgtttgcttaaagatggatttccctgggaatgggagaaaacagccagcaggaggagcttcatctgttcccttcccacctccaacctagccctactgcccaccccaccccggacacggatacgga

SEQ ID NO: 40032 - DNA, 500 bp, Homo sapiens
tctgtagccttggggaggaatggaggaggaaggaggagaagaccatgcccatctttactctgtctcctactttagtttgtgagtgggacggttaagtcaaaacagtgacgagagattaacttatttgctgagttctatttacattcagaatatagtgctagaaaaggcccagataacaccatgtgctagtagtatacatgtgcacattaggaatctaaagtgtcttttactgactcagactttaataatagtcctgtccacccccaccttttcgccctctctctccccttctctctctccctctctcgtccaagtttaaattccttactggaaagacaggaaaggaaaagttcgtagtagattttccaaatacaaaccttgcttttataatatggttatggcaaccatctctattttggtaaaattggcctattatatgaatgacattttgcaagttagatttttgcaatttaggaaaaccacaagccatcgtaaacagt

SEQ ID NO: 40033 - DNA, 730 bp, Homo sapiens
gagcaggaaaagttagtagcccaagaaattgttcttggattctatgcttcagacctgtcagtctgagtcaaggtaaaaactcttaactttattgatggtactagtgcttcagcgtcaataaaaatatgttggtaattccacaaatattttcagatttcatatgtttttgcatttcatgaactccttaacgcctaagcccagttcttatttgcccttatatcattgcagataacctcagtgccttgagcataataaatattctgtacatgtttgatttgttgttaagcacttgacagatacctgtaaggcaccatagtttctaacttaagctgactagtcactatggatctcgacaggaccctgaacaaaactccattgttgatcctattttgcacctagacacaattattctttggtagattcacataataaaggttatgtttgcaatcctatttctaaccaaagcattaaactgagtctttaacttatcgatcactataacttgataatgaacctctgtgtgtgtgtttgtctgtgtgtgtctgtgtgtgtgtgtgtgaaaggatggagaaaactagaaataggcatgtgtgtttttctgtgctatttgctagaatggcaaatttttcttcattatttttctgcaaaacaatttgtagaaaaacatttttcattatttttctacaaaacagttctcggccaaataggtttgctttaagttaagattaaa

SEQ ID NO: 40034 - DNA, 339 bp, Homo sapiens
ctgacccacgatggtgggtcagggtaggcctgattgagagggtcatgtctgagcaaagatttgcaggttaaggagttagccaagggggtatttggggaaaaagtgttccaggaagagccacacatctagagtgaaggctaaattaggagtggagcatgcagaacttttaggccatttaaaggacttcattagttgtgcctggtggtgcacacctatagttggaggtatgggagaggctgaggtggaggaattgcttgagcccagcactgcagtgagctgaggtggtgctactgcactccagctactgcactcacagagtgagaccctgtctctgttaga

SEQ ID NO: 40035 - DNA, 177 bp, Homo sapiens
aaaggcgaggggaggcaggtctgaggcagaggagccagggcaggtgcggcgcttccgcctctggtcccaaagcaaagactcccctgtgactgacagcccgtgttatgttaaatacattttgttggtttgtaattcaaatcccataaagcaggaggtagagagccaaccattctggag

SEQ ID NO: 40036 - DNA, 461 bp, Homo sapiens
cattatcttcatttcataacatttttttccattaaagatatttggattatattcctacttctgaattgctctttgaatcacagacgtttttctgaggttcagcttaacgtattgctacttgaatctgattttatcaagtactaataggatatgaagcattaataggaattatcattagtgaaataggccaggctcagtggctcatgcctgtaattccaacactttgggaggccgaggcaggcagattgcttgagcccaggggtttgagaccagcctagacaacagggcgagaccctgtctctacaaaaaataagaaaaagccgagtgtggtggcggcatgcacctgcagtcccagctacttgggaggctgaggtgggagaatcctgggagatggaggttgcagtgagttgagatcacgccactgcactccactccaggcaaaaaagctagatcctgtctca

SEQ ID NO: 40037 - DNA, 417 bp, Homo sapiens
gaactatattatatgcctctttgtcattattttatcagttggcaccctgttttgttttgtttttactgctgaggtatcagtaccctcacccactacttgttgtccatttaaaatctgcttaccctagaacttcacctctggctcacttgttcccaaataagccctggtactgcttctcatttttcctttctcctcagtttagaaataaaattttaacagaaaatttaaaaattggttccacactcagtattataatgatctcaaccaaccattaaagggtctgaatgacttattactatatatctgaattattgtattcttcttggtgtaattattattatagtattattatctgaatagctttttactgtaactcagaatgatggccttaattttctccaggtgaatttactttaa

SEQ ID NO: 40038 - DNA, 474 bp, Homo sapiens
ggagatgtggctatgagattgacacaagttttcttaagagcttcatcaaacatatggaagcagttccaaaaagtttcccaaatatttttgggcagtggcagcagtaactcagagttttaaaattcaaatcagaattttaagaaaccttagagattattcctttattacaaatgaagaacctaaggttcaggaaaacttttgacgcatcagttggttcagatagtcagtggcagaactgcaaagaactcgccctctgactcccagttgagttttagcctgaacccccattcactcccatccaaaaacaagtgggggtgggggttgcagggagggaaacaagtttcccacaaactgaattttaaaatattgcagaattttgctgggtgttctctgcaggtttaccagtctgtggaaaccagaatcagatgtcagacatacatgttccttatgtgcagtcttccaccatcttccttt

SEQ ID NO: 40039 - DNA, 316 bp, Homo sapiens
gatcacttgagctcaggagtttgagctgtggtttgccactgcactgcagcctgggtgacagagcaaaactgcattacaaaaaaatgtgggagcagtaggatgtgctgaaggtacccaggtgaatatgtgggtaaaggacaaaggtgagggtgcctctagggttttgggttttagttcatttttgagacagagtcttgctctgtcaccaaggctggaatgcagtggcgtgatctcagctcactgcaacccctgcctcccgggttcaagcaattctagtgcttcagcctcccaagtagctgggattacaggtgcctgc

SEQ ID NO: 40040 - DNA, 328 bp, Homo sapiens
tccaggtacataaatggcactcagtaagactttgctattagacacatcattttaagactgcccacagagtaaacaacaggaggagctctgctgtaatagttgacataaagcagaaagactctgtgtccagttgatagtactatcagttccttggccaatttccaacttacgttcttcccacgtaagtagccagatcctccccactctggtgaaaggaattggctcttataaaactaatgaggaacatcacaggcctgcataatgaaagaggtcattctgtccttccttagcgtgcctgtgtggcacaatgctattaagttagaggggc

SEQ ID NO: 40041 - DNA, 217 bp, Homo sapiens
cagtcctcaatgagcacaaatgccaagctgcctcaagggcagagtctcatgagattttacaaaacacaagggccaaggagactagggagttccctcacctcattttctcattttaaagataggggccaggcacggtgactcatacctataaccccagcactctgggtggctgaggtagaagaaatgcttgagtccatgagttcaagaccagcctgag

SEQ ID NO: 40042 - DNA, 279 bp, Homo sapiens
gcaaacatctggcagtggcaaaatctttattttatttagctgtatgaaatacttagttttgaagtaaaaaatagggaagctagaatttatttaataagtaaaatgagtatcacatagtctcttactacatacagaaagaagtaaagaattcaacaattcttgccaggcaccagtggctcacacctgtaatcctagcactttgggaggctgaggcaggaggattgcttgagttgagttcaagaccagcctgggcaacatagtgagacccctcatctctac

SEQ ID NO: 40043 - DNA, 434 bp, Homo sapiens
tacttaagtaagtatgatgttgagtaattacacttagtacttgagttagtttctctgtactctggtgtaggatgtttatgtgggtaaagtcaaaatcactttaatagtacaatttcagccttgtacaccctcaaatgtgtgtgagtgttaaagagtatgccctgtattgtgtttctacatgcctctttcttgtgtgccaaataagaactatggtgtgcaccttcattttcatgcagcaaaaatatatagtaatatgacaaatattaggaaataaagtatgggttgagggcaaaaatactgtaacatggccgggcctggtggctcacgcctgtaatctcagcactttgggaggctgcattgggtggatcacgaggtcaggagattgaggccatcctggtcaacatggtgaaaccttgtctctactaaaaatacaa

SEQ ID NO: 40044 - DNA, 458 bp, Homo sapiens
gataacaatattatgcttctccaagctcagtatctttctgattttatatcaaagtaccgcaacaatgcatcattgtagttaatttatttcaagaataaattcctcatatgtcctcaatagtacaattctaattttcttctattcataagatgaaagaaatggtttggagcatagaatagaaagtgcacaaattgagtacataaaatgggaagcaactgatttctcagctaagaaaggctcatttatcacagaacacaattgcttttctccccccactacgcttcccataattgaaaaagtgagtccctatttttcacactcatataaatctatgcgatttggatgctagtcttattgtattattttgtaaaactttctctttggctcataatccttcctaattgtaaattgataaactttgcggatgacatctgctcgtagaataaacacttcttcca

SEQ ID NO: 40045 - DNA, 421 bp, Homo sapiens
ctccctggtgccatctactcttagtacactttttactactgctaaatatgaaattaaaatagacttactgtagggactcccagatgctcttgaaaagatgaactttatatttaaagaaacctttcgatttcgctcaaatgcaggaaattagggagaatagtccagttttgactttcaagaaaagggtgttattttaaaaatctaagacaaagattagaggagtcttagctttccactggttaagtcctgttgaggcaagctgtattccagtgttgagtctgcagcggccgaagcagccccgaagcagctgtgcctgccgtgggcagtcagtctcggtgcggccatccctctctacacccaggaaggattctgcagaggcgtcactggggtgaattcatgccaagggttgagtccatttgtg

SEQ ID NO: 40046 - DNA, 140 bp, Homo sapiens
gtagcttaagcagtagagcaaactggaataactagtattcatgcataggtcattgtgacaccagagtccctgttattaaacactactcaatattgtctcctatcagaacatatgaggttgtccaggcgctcagagatgag

SEQ ID NO: 40047 - DNA, 512 bp, Homo sapiens
tggagctggaggccattattctaagtgaggtgatggaatggaaaaccaaatactgtatgttctcacttataggtgggagctaagatattagtactcaaaggcatacagagtgatataacggattatggagactcagaaaggagagggacggaggagggggagtaaaaacctatgtattgggtacaatgtacactactcagacgaagagtgcactaaagtctcagattttgccattatataattcatccatgtaaccaaaaaccacttgtaccccaaaagctattgaaataaaaacaaattaaaaagaaaaatacatttaatattttcaaaactttagtgcctattaaacattcattcagcagtggagtgtaaggtgtgggccaggtatctgtcctaggtcctgggaactcagcagtgagcaagacagacacaaatccctacactagtggagcttgcattctaattgatacacctgtaattactaaacaaaatgaggacttgaaaaagagaaa

SEQ ID NO: 40048 - DNA, 178 bp, Homo sapiens
caggtgtgcacttaagaaaccaaaataatctaagtgaaatacctaatatataaggccgggtatagatgcttctcagcttacgatgaggttatgtccctcatcataagttgaaactattataaacctaaaatgcatttactacacctgacctactgaacttcatagcttagcctagcct

SEQ ID NO: 40049 - DNA, 361 bp, Homo sapiens
tattcactatggtaaacagtaatccacattatggttgtgaaaatatttaacacaattccatctttggtcagttctggtttactgacaagtttctttaaaattttgacttaaaggccttcttgactcaacctcttcatcaaagtttagcaggaataatgtaaaaactagacgaaaatttatctgtaaatatacacatatcatgcaaatatatattctaaattccaaaattatataagaagtaaaacctgcttgtcaaaagaaatcttatttggataaaatgtggttaaaaataagttaattatgatattgaataaaattgtcaatttcaatttaaataagtacagaatagaaactacagtaa

SEQ ID NO: 40050 - DNA, 132 bp, Homo sapiens
aaaagaccattgctgacacccgcgtcctcccacccacaccttccgcctgcagggggagctggatggggaagcgaatggggtccctgtgcttatggaggataaacacatggaggcttgcacctcttatttgaa

SEQ ID NO: 40051 - DNA, 777 bp, Homo sapiens
ccatatttcagggacttattttgaattaaatgggtaataaactgactaatatttctgctcagtgggtaggtgtgctttattctgtttgaaatgggagaacttagttcagagaactttttccatagatgcatgatcctttttggtacatactcgaattaggctgttgtgcagctaattcagctttgctgtatttcttttgaagtaagcatcctgatttaatggcttttccaaggactgcctttagtgtgggccttgctaacctgatagatgtcactttactcaacataggttgtagctcagcctgggctttagaagtttgggattgaaaatgagactgtaagatcccagttggcccaaggaaggcgagtccgtttactcatgattcatcttgaggaagaagagatgctgagacagctggcacctggcgttattccaggggccacattactttccgccagccatggcttccaggtgttagatcctttcatgaataccaggaaagcagtgatctattaataactttaccccagctacagttcatgcttctagagttaccattgtgtggatttccagaacttcttttcctttgacacttatctttatcattgtggaattatgcccatgggccacccagctctcacacacccaaagccatggactctaggaagacactcagtttggcggttaatcccttcccttgggaacttttggaattatcactttatttatctaatcctcttcaaataagagtttgtatacttttcactgcatgcttaa

SEQ ID NO: 40052 - DNA, 374 bp, Homo sapiens
taatacaaacttacacaaatataaaatcattcaaacttaatacaaataatactaatttccaaatacatttcatttactttgtatttgttaaaatttttacgtttgctttatcaggacctttctctctccccctctggtacccccctctctttctctttctctttctacacacacacacaccacagtctgtttttctggaaccaattaacagtagctgtagacatgatctcccattacccctaaataactgagcatacattttctaagacaaggacactctcttagataatcacagcgtaaccatcaagtttatgaaatcagtgctttcaccttactcacattctgccagttttctcaattatgccccttatggc

SEQ ID NO: 40053 - DNA, 409 bp, Homo sapiens
tgaacccgggaggtggagcttgcagtgagccgagatcacaccactgcaccccagcctgggcaacagagtgagactctgtctcaaaaaaaaaaaaaaaatagaaaagaaaaataattaaacacatacatgtccataggcaacagcactaacgcatgcctgaacaaaccctctctaacacatgtgttttctctgtaacgtagtcactcctgccttgctctcactgcacacgggggtcattcttaacatcgacacgaccgcagaaagcacaaaaatgggaaaaatttggcactaagtagaccatgaaaaggatacttgtttgcgatgtgagagctgagatcggaaggcagtgtgagatcttctgaaacctcagctgggaacatgcccctcagacagtggaaatttttttgcc

SEQ ID NO: 40054 - DNA, 189 bp, Homo sapiens
actcctgtggactggggtaaacagggtgggtttcccaggggaggtgagatttcagaggggtcttaaattatgaagataaagatcattgacctaagtgtccatcaacagtggattggctaaagaaaatgtggaaccatatataccatggaatactatgcagccataaaaaagaatgaaataatgtccttt

SEQ ID NO: 40055 - DNA, 556 bp, Homo sapiens
ccacatacacgagataacagaaaaaagctatgtatgctttggtccaaataagcaagcattacagactgggggctgggcctctcttgtgctgcagacctgtgctgccatctgcctccctgatgtttccaatgggccttttattccttgccaccaaacattcttccagggttcctcatctcaataaacagcacccctgtccacccagtggctcctgccaggaacctagttgggagcaattcttgacaccttccttgacctcctcagaacctgtcaccaagtcctgccgccaaagctgccaattctacctcagaaatatttcatctgtccacagcactgtatcatcacggccaacagccctgtccaggtcccctttactcagatcacatatttacgggcatctttactccagcagaaagagcgcagccttgctggttttccctccccctacacacattctggcccctttcattccttcaccctccactgatgtcaggagtgatcattgtattgcgtcactgcactccaacctgggcaacagtgagaccctgtctcaaaa

SEQ ID NO: 40056 - DNA, 357 bp, Homo sapiens
caaaaaaaaaaaaaaaagaattactagatgttcgtcacaggaggtggttcagattatatcatccccagtattgctgagccagatcctcctatttattctcaggaacaagttcccaaatgctcacagccacagtagaaaaaaatgtttttccatacgactgcttaaagccattctctctgaaaggaacctggggaaagtgctgtcagtagttaactagagatcgcagcatcctcaggaaaatatccaggggtcaacagttttgggcccactacaacactgccctccagggtctactgtccttcacagttctgggcacagagtcaggccagggatctccggaacatggtgaaaggaagg

SEQ ID NO: 40057 - DNA, 808 bp, Homo sapiens
tggcacacacagccagccttaggctagcatcttaaccagagaagatacatgctactttgtctgggtgttatctcattacctttatgtcactgttgtcttcaaacttaattatgtagtaagctggtgaaataaaacagctttaatcaagagttcaactggagagcttcttagccagccaggcccctccctaaactgaagcccataatccacacagtccatcctccctgcagagcttcctacagtcatcagctatttactcatgatgacacacttgtttggccttcttcttaactttccacttttttaacagatgatagtagaaagatggtcagagagcccatttctcttttctggttttatataatgctacatattagagctcaaaagggcctagggaaagtgcttcagcctctgcagtgggtaaggaaggggttattctcctcattttataaatgaggcctttgagacccagagaggctatataacttgcccagaccactccactaaggggttgttggggcacttcatatttctctgcttctatcagtaaccagcctttctttttgttggtctttccactctgactcctccagggcctcctcttgagcctgtttattgtcttagcctgaggccccaccacagtggcatcagagggttaagagcgttttcagattgagggcaagtcttttccatacctaaataacaggggaaaagtactcctccttaaagttaggagtaacgaaatgatggatgcaaagtgctgactaccacatgtggcataaatgctcattaactgtgatgatgacgt

SEQ ID NO: 40058 - DNA, 483 bp, Homo sapiens
taaacctgtatggcttggtatgcctcagactgacccaagaaaggaaagtcaggatgaatcctgtggaaaggaagtgtctttccttgcctgtccctgcacccactgcctttggaggtgcctccttgcatcgtgtcttaggatgtgaattaatgctgaggtttagaatacacatttacatgatgacccacctgaagtgaccacaatcagagcaagtacagtctttggaagcatgtactgtgtgctgaagccctccaatgtggaagggcttagttaggtatgtagttaggttttgatgttggagaagagataatggacacagaagttgttccaaaaggagaatgagtgcattgctgatggtgccggtgactttttgcctcccaacagttgtcccccaaccccatttcttcttccctcctagagatggtcaattgggtcaggaggcagaaagagatcccatgtacttagggagagtacattgttctg

SEQ ID NO: 40059 - DNA, 1879 bp, Homo sapiens
gggacttcccactgcctctttagcacaaatcggacttgaacaaaaacaactctttttccatgggaccaattataaaaagaatggctttgcactgagcagctcagtctactggtctcatcagtgaaaggcttgtgaaaatttctggaaagagcattggctggcttgttcatctctctgtttggtcagttgctgtgtttctgccggatcagatgagcagattggttagtgaaggtcagtgtgagaagaagattgtttctgagcttgagaagcttctggaggattgaagagtatttgaagtctgtgtcaaacatccatatcataagtggaattttggagatattcaaagaatgctgtcagaagggtatctcagtggacttgagtactggaatgacatccactggagttgtgcctcttataatgagcaggtggctggggaaaaggaagaggagacaaattctgttgctaccctttcctattcctctgtggatgaaacacaagtcagaagtctctacgtgagctgcaaatcatctggcaagtttatctcttcagtgcattcaagagagagccaacatagcagaagtcagagagtcacagtgctgcagacaaaccccaatcctgtgtttgaaagcccaaacttggctgcagttgaaatatgtagagatgccagcagagagacctacttggttccatcttcttgcaaaagtatttgcaagaattataatgacttacagattgcagggggccaggtgatggccattaattcagtgacaacagattttccctctgagagcagttttgaatatggccctttgctgaagtcatctgagattcctttacccatggaggattccatttctactcagcccagtgactttccccaaaaacctatccagcggtactcatcctattggagaataacaagcatcaaagagaaaagcagcttgcaaatgcagaatcctatttctaatgcagtgctgaatgagtacctggagcagaaggttgtggagttatataaacagtacattatggacaccgtgtttcatgacagttctcctacccagattctggcgtctgaactcatcatgacaagtgtagaccaaatcagtcttcaagtgtctagagagaagaatctggagacctcaaaagccagagatatagtctttagccgcctattgcaattgatgtcaactgaaattactgaaattagcactcctagtctccatatttctcagtatagcaatgtaaatccatagagaggatgcttccattactgtctcgcatttacttaaacatgaagcaacactttatccatttattctgagaatgtgcaggaggggttagtgaaggggaattaagggctagagaagtaaagatcagctggaagtcatgtgtgaatcatggagaaatctcataatattacacttgatgaaggaatatggtaagaggagccataaggaatgatttcaaagagaggtgtgtacagcaaggaagcaaaaataaaaatgatcaaaaaagaaacggttaattcatttgaagaaacataggaattaaaaaagaagacagtcaaatgagatgaaacaaaaaggccaaaaggtagccgggtgtagtggctcacgcctgtaatcccagcatttgggaggctgatgtgggtggattacctgacgtcaggaattcgagaccggcctggccaatatggtgaaaccccatctctactaaaaatacaaaaaattagctggacatggtggtgggtacctgtaatcccagctactagggaggctgaggcaggagaatctcttgaacctgagaggcagaggttgcagtgagccgaggtcgctccattgcactccagcctgggcaacaagagtgagactcccgtctc

SEQ ID NO: 40060 - DNA, 401 bp, Homo sapiens
tttttttttttagacagggtcccactctgtcccaggctggcatgcagtaggatcatctcagctcactgcagcctctgcctcccaggctcaagtgatcctcccacctaggcctcccaagtagctgggactataggcacatgccatcatgcccagctaatttttgtagagaaaatataattattataacaggtataaacatatccttctaaattaatgtgaagcataagcaaagctgggaaaagtatatcactatccacagtatgtcatcctttatttcttagaaatgtattactgagataaagaaattttaatttggaagtttttttaaataataaaagactgaagtttttattttaaaaaatgaggtccaataaatgtcttctaaactacaaaacttatgt

SEQ ID NO: 40061 - DNA, 456 bp, Homo sapiens
gcacccccacctcataagctcctgacctacaggataagagctgtttcctgtgaggggggcctggggctgccctggcagtggctcttgggcctcctggcccaccagaacgtcctggcaagctcacaaaactcacaaacactgaactccacttctagagattcgaatttgggagctctggggcatgagccagagatctgcaggtgattctgacaggcagccaggtggagacatgggggtgagagatgagttttctttgcagcccacccagagaggaaaggcctttcctttcaaagagcctcagaaagcaatggtccaggtccttcctgcttcctgggagatgccacatggctctacttctgaggggtctgtgcagtgggtgtgggagcacctggggctcttgggtgtcaggtgtcctatgtcctctcccatggtctggggagagcatgcacttttggt

SEQ ID NO: 40062 - DNA, 412 bp, Homo sapiens
gctacacggtgaaaccccgtctctactaaaaatacaaaaacaaaagtagcctgtcgtggtggcaggcacctgtagtcccagctactcgggaggctgaggcgtgagaatgtcgtgaatccgggttgcagagcttgcagtgagccgagatcgtgccactgcactccagcctggccgacagagcagactccatctcaaaaaaaaaaaaaaaaaaaaaacgcaaacgcatactatcgtgattccacagttgtggtaacatgcagaatactttgactggtccaaataatgcccacgtgcttcacctattaaacctcctcactgaatcttttgccagatcatttacttttttaggaagtaatattcccttatatgacgtatcacagttttttttttttccattcatcaattatgagac

SEQ ID NO: 40063 - DNA, 3083 bp, Homo sapiens
caatgccggcgttcgggaggcgcaacgtcggcggtcgctgagtatccagcccgcagcagtgacggccggcaggagcgtgctcttccccgcggctcgtgctctccaggagtccggagcatggtcctgggtcaccgttggtgtagcgtgttggtggaacgtggacgcctagagggaggatggtgggctgtggggtggcagttttatgtttgtgggtttcctgcggcgctgcagcgggacagctcgagtactcagtgccggaggagacggagcggggcgtagccgtaggcaatctctccgcggacttgaggctgccagcggccgctatgtcctcgcggaactttcgcttcctttccagccaccgcgagctctacttcggggtggatctacccagcggcaatttggtggtcagagagccggcggaccgcgaacagctgtgcagggccaaagctgcctgcgtcttgacctacgacctggtgctcgaggacccgctggagctgcacaagattcggattcacgtcctggacaccaatgacaactcacctctctttcctgccggcgacgtgcagctgcacatccccgagttcctgacgcccggagcccgctttactctcccgaatgcccaagatgacgacgagggaagcaatgggatactaagctacagcctaagccccagtcagcactttcgcctggacatgggatcgcgggttgacggcagcgaatacccggagttggtgttggagaaagcactggatcgcgaacagcgcgccacccacctgctggtgcttacagctcgggacggcgggctacctgcccgctcaggagacgcacaagtcaccatcattgtggtggacacaaatgacaacgcgcctgtatttgagcgctccgtataccgcaccaaggttccagagactgcacccaatgggactgtgttattccgagttcaagccttggatccagatgaagggtccaatggggaagtccagtactccctaagcaacagcacgcaagcagagctgcgacaccgctttcacgtgcaccctaaaagtggggaggtgcaagtagctgcttcactaggtccgcctgaaacgctcttggaggcatacattgaggcgagggacgaaggtgtctttggtttagctagcaccgctaaactgctggtggaggtgactgacgtgaacgatcatgcccccgaactggacttcctgactctttcgaacccagtacctgaggacgctgcccctggcacagtgattgctctctttagtgtaaaggatgaagacctcgattctaatggtagggtcatttgtggcatgtctagtgcaggcccttttcagctgacggcttcctttgacaactactacagcctgctgattgatgggcccctggaccgggagcagatcagtgaataccaagtcctgatcacggcctcagatagtggctcacccccacttagcacccgaagacaatcactgtgtcagttgctgatgtgaatgacaatacaccaaactttcctcaaccccagcaggaacttttcgttgctgaaaacaatggccctggggcctctctaggccgagtgtttgcccaggaccccgacctggggaagaatggccttgtctcttatgagctgttggatgttatctctgaagggccatcagcctctagcttgctggcagtggaatcatccagtggggccatcactgccaaaacttcctttgactttgagcagctcagggggtttcatttccaagtagaaggccgggatggtggcattcctcccagaagtgcaacagtgactataaacttgtttgtggtagataggaatgacaattatccggttatcttgtttcccttgcccagaaatggttctgtcccagtggaaattgtgccccgctctgccaggactggacacttggtcacaaaagtggtagcagaggatgctgacagtggttctaatgcctggctttcctaccacatctcccgggcgtctgactctagtctctttagaatttcagccaatataggtgagctccgtactgctcgcttagttcttcccactgatgcagttaagcagagggtggtggtagtggttcgggaccatggagacccaccactttcctcctctgtcactctgggtgtgctgttgagcaactctgtccctcagttacttccagactttgaagatgtctgggaaccaggagggcagctttctgcccagaacttgtatttagtaattgccttggcttgtatttcctttttatttctggggtgcttacttttcttcgtgtgtaccaagttgcaccagagcccaggctgttgcgctcagagctgctgtcgctctacagaggatctgaggtatggaagtaagatggtttcaaatccttgcatgacatcagccaccatagatgtcactacagttgagagactttctcagacttatctctatcgggcctctctgggacttggttctgataataacagtttgctgttgcgtggggagtacaatgctgccgacctgcgaaatcttgccactggggtaggactgaatttgccaatatcctgtattcagattcggaataggaaaggggatcacgctaatgtcaatgccatggtaagcaaattttatggaatttgattcctttggcccggagatggctgctagctgtgttttgaaatatttcttagacaagcctttcacaacatttcatcaattgaactaaacactccttcttagcacttcctgtgccaagaaatctggaagtatagaagtattagaagattgccctaggcctcaagggacttatagtttatttttgagaaacaagggcaaaaattaaaacctatttaagaacaataaaagtaatatgacataaaggtctaaaattaaaaataaaataccaaaatattttataagcaacagatgtgtaaggcactctaatatttaaagtgaagaatgaaaaatatgtaagagtctgctttatatgaatataatatggaaggtgaaacatttacttaaactattgcaatgcattattaaaagatgacgataaccacaaaagatgtaaaaataaattacaatgggggtt

SEQ ID NO: 40064 - DNA, 821 bp, Homo sapiens
tgcggatagcgaggctgcggcaggaggagcgggagcaggagcagcggcaggcgttggagcaggcccgcaaggccgaagaggtgcaggcggagctcatggactttgaacgggatgaggagcgctcagccaacggtggctccgaatctgacggggaggagaacatcggctggagcacggtgaacctggacgaggagaagcagcagcaggatttctctgcttcctccaccaccatcctggacgaggaaccgatcgtgaatagggggctggcagctgccctgctcctgtgtcagaacaaagggctgctggagaccacagtgcagaaggtggcccgggtgaaggcccccaacaagtcgctgccctcagccgtgtactgcatcgaggataagatggccatcgatgacaagtacagccggagggaggaataccgaggcttcacacaggacttcaaggagaaggacggctacaaacccgacgttaagatcgaatacgtggatgagacgggccggaaactcacacccaaggaggctttccggcagctgtcgcaccgcttccatggcaagggctcaggcaagatgaagacagagcggcggatgaagaagctggacgaggaggcgctcctgaagaagatgagctccagcgacacgcccctgggcaccgtggccctgctccaggagaagcagaaggctcagaagaccccctacatcgtgctcagcggcagcggcaagagcatgaacgcgaacaccatcaccaagtgacagcgccctcccgccccggccctgcctcaaccttcatattaaataaagctccctccttattttttc

SEQ ID NO: 40065 - DNA, 410 bp, Homo sapiens
ggcctggcattggggtcaatcaacacccgccctgttattatacaccttgtgggcacaggtggctccggccccacccagggccctgcatctcctctcatgccccgcgtccccaggctttccggcagctgtcgcaccgcttccatggcaagggctcaggcaagatgaagacagagcggcggatgaagaagctggacgaggaggcgctcctgaagaagatgagctccagcgacacgcccctgggcaccgtggccctgctccaggagaagcagaaggctcagaagaccccctacatcgtgctcagcggcagcggcaagagcatgaacgcgaacaccatcaccaagtgacagcgccctcccgccccggccctgcctcaaccttcatattaaataaagctccctccttattttttc

SEQ ID NO: 40066 - DNA, 2649 bp, Homo sapiens
ggcacgaggctgggctcggcggcagccgggctcggagtggacgtgccactatggggtcgtccaagaagcatcgcggagagaaggaggcggccgggacgacggcggcggccggcaccgggggtgccaccgagcagccgccgcggcaccgggaacacaaaaaacacaagcaccggagtggcggcagtggcggtagcggtggcgaacgacggaagcggagccgggaacgtgggggcgagcgcgggagcgggcggcgcggggccgaagctgaggcccggagcagcacgcacgggcgggagcgcagccaggcagagccctccgagcggcgcgtgaagcgggagaagcgcgatgacggctacgaggccgctgccagctccaaaactagctcaggcgatgcctcctcactcagcatcgaggagactaacaaactccgggcaaagttggggctgaaacccttggaggttaatgccatcaagaaggaggcgggcaccaaggaggagcccgtgacagctgatgtcatcaaccctatggccttgcgacagcgagaggagctgcgggagaagctggcggctgccaaggagaagcgcctgctgaaccaaaagctggggaagataaagaccctaggagaggatgacccctggctggacgacactgcagcctggatcgagaggagccggcagctgcagaaggagaaggacctggcagagaagagggccaagttactggaggagatggaccaagagtttggtgtcagcactctggtggaggaggagttcgggcagaggcggcaggacctgtacagtgcccgggacctgcagggcctcactgtggagcatgccattgattccttccgagaaggggagacaatgattcttaccctcaaggacaaaggcgtgctgcaggaggaggaggacgtgctggtgaacgtgaacctggtggataaggagcgggcagagaaaaatgtggagctgcggaagaagaagcctgactacctgccctatgccgaggacgagagcgtggacgacctggcgcagcaaaaacctcgctctatcctgtccaagtatgacgaagagcttgaaggggagcggccacattccttccgcttggagcagggcggcacggctgatggcctgcgggagcgggagctggaggagatccgggccaagctgcggctgcaggctcagtccctgagcacagtggggccccggctggcctccgaatacctcacgcctgaggagatggtgacctttaaaaagaccaagcggagggtgaagaaaatccgcaagaaggagaaggaggtagtagtgcgggcagatgacttgctgcctctcggggaccagactcaggatggggactttggttccagactgcggggacggggtcgccgccgagtgtccgaagtggaggaggagaaggagcctgtgcctcagcccctgccgtcggacgacacccgagtggagaacatggacatcagtgatgaggaggaaggtggagctccaccgccggggtccccgcaggtgctggaggaggacgaggcggagctggagctgcagaagcagctggagaagggacgccggctgcgacagttacagcagctacagcagctgcgagacagtggcgagaaggtggtggagattgtgaagaagctggagtctcgccagcggggctgggaggaggatgaggatcccgagcggaagggggccatcgtgttcaacgccacgtccgagttctgccgcaccttgggggagatccccacctacgggctggctggcaatcgcgaggagcaggaggagctcatggactttgaacgggatgaggagcgctcagccaacggtggctccgaatctgacggggaggagaacatcggctggagcacggtgaacctggacgaggagaagcagcagcaggatttctctgcttcctccaccaccatcctggacgaggaaccgatcgtgaatagggggctggcagctgccctgctcctgtgtcagaacaaagggctgctggagaccacagtgcagaaggtggcccgggtgaaggcccccaacaagtcgctgccctcagccgtgtactgcatcgaggataagatggccatcgatgacaagtacagccggagggaggaataccgaggcttcacacaggacttcaaggagaaggacggctacaaacccgacgttaagatcgaatacgtggatgagacgggccggaaactcacacccaaggaggctttccggcagctgtcgcaccgcttccatggcaagggctcaggcaagatgaagacagagcggcggatgaagaagctggacgaggaggcgctcctgaagaagatgagctccagcgacacgcccctgggcaccgtggccctgctccaggagaagcagaaggctcagaagaccccctacatcgtgctcagcggcagcggcaagagcatgaacgcgaacaccatcaccaagtgacagcgccctcccgccccggccctgcctcaaccttcatattaaataaagctccctccttattttttctttcctccctggtcgtggtacagattccagggttggatctttggttgggtgtggcacagagtctggctcctgctaggtgagacctggccgtcaaatgacacaaacaactaaacgatggaagagagagcga

SEQ ID NO: 40067 - DNA, 2575 bp, Homo sapiens
ggcacgaggctgggctcggcggcagccgggctcggagtggacgtgccactatggggtcgtccaagaagcatcgcggagagaaggaggcggccgggacgacggcggcggccggcaccgggggtgccaccgagcagccgccgcggcaccgggaacacaaaaaacacaagcaccggagtggcggcagtggcggtagcggtggcgaacgacggaagcggagccgggaacgtgggggcgagcgcgggagcgggcggcgcggggccgaagctgaggcccggagcagcacgcacgggcgggagcgcagccaggcagagccctccgagcggcgcgtgaagcgggagaagcgcgatgacggctacgaggccgctgccagctccaaaactagctcaggcgatgcctcctcactcagcatcgaggagactaacaaactccgggcaaagttggggctgaaacccttggaggttaatgccatcaagaaggaggcgggcaccaaggaggagcccgtgacagctgatgtcatcaaccctatggccttgcgacagcgagaggagctgcgggagaagctggcggctgccaaggagaagcgcctgctgaaccaaaagctggggaagataaagaccctaggagaggatgacccctggctggacgacactgcagcctggatcgagaggagccggcagctgcagaaggagaaggacctggcagagaagagggccaagttactggaggagatggaccaagagtttggtgtcagcactctggtggaggaggagttcgggcagaggcggcaggacctgtacagtgcccgggacctgcagggcctcactgtggagcatgccattgattccttccgagaaggggagacaatgattcttaccctcaaggacaaaggcgtgctgcaggaggaggaggacgtgctggtgaacgtgaacctggtggataaggagcgggcagagaaaaatgtggagctgcggaagaagaagcctgactacctgccctatgccgaggacgagagcgtggacgacctggcgcagcaaaaacctcgctctatcctgtccaagtatgacgaagagcttgaaggggagcggccacattccttccgcttggagcagggcggcacggctgatggcctgcgggagcgggagctggaggagatccgggccaagctgcggctgcaggctcagtccctgagcacagtggggccccggctggcctccgaatacctcacgcctgaggagatggtgacctttaaaaagaccaagcggagggtgaagaaaatccgcaagaaggagaaggaggtagtagtgcgggcagatgacttgctgcctctcggggaccagactcaggatggggactttggttccagactgcggggacggggtcgccgccgagtgtccgaagtggaggaggagaaggagcctgtgcctcagcccctgccgtcggacgacacccgagtggagaacatggacatcagtgatgaggaggaaggtggagctccaccgccggggtccccgcaggtgctggaggaggacgaggcggagctggagctgcagaagcagctggagaagggacgccggctgcgacagttacagcagctacagcagctgcgagacagtggcgagaaggtggtggagattgtgaagaagctggagtctcgccagcggggctgggaggaggatgaggatcccgagcggaagggggccatcgtgttcaacgccacgtccgagttctgccgcaccttgggggagatccccacctacgggctggctggcaatcgcgaggagcaggaggagctcatggactttgaacgggatgaggagcgctcagccaacggtggctccgaatctgacggggaggagaacatcggctggagcacggtgaacctggacgaggagaagcagcagcaggatttctctgcttcctccaccaccatcctggacgaggaaccgatcgtgaatagggggctggcagctgccctgctcctgtgtcagaacaaagggctgctggagaccacagtgcagaaggtggcccgggtgaaggcccccaacaagtcgctgccctcagccgtgtactgcatcgaggataagatggccatcgatgacaagtacagccggagggaggaataccgaggcttcacacaggacttcaaggagaaggacggctacaaacccgacgttaagatcgaatacgtggatgagacgggccggaaactcacacccaaggaggctttccggcagctgtcgcaccgcttccatggcaagggctcaggcaagatgaagacagagcggcggatgaagaagctggacgaggaggcgctcctgaagaagatgagctccagcgacacgcccctgggcaccgtggccctgctccaggagaagcagaaggctcagaagaccccctacatcgtgctcagcggcagcggcaagagcatgaacgcgaacaccatcaccaagtgacagcgccctcccgccccggccctgcctcaaccttcatattaaataaagctccctccttattttttcaaaaaaaaataacaaaaaaactcttcgggggccactatggggggggggaaaaaacg

SEQ ID NO: 40068 - DNA, 2650 bp, Homo sapiens
ggcacgaggctgggctcggcggcagccgggctcggagtggacgtgccactatggggtcgtccaagaagcatcgcggagagaaggaggcggccgggacgacggcggcggccggcaccgggggtgccaccgagcagccgccgcggcaccgggaacacaaaaaacacaagcaccggagtggcggcagtggcggtagcggtggcgaacgacggaagcggagccgggaacgtgggggcgagcgcgggagcgggcggcgcggggccgaagctgaggcccggagcagcacgcacgggcgggagcgcagccaggcagagccctccgagcggcgcgtgaagcgggagaagcgcgatgacggctacgaggccgctgccagctccaaaactagctcaggcgatgcctcctcactcagcatcgaggagactaacaaactccgggcaaagttggggctgaaacccttggaggttaatgccatcaagaaggaggcgggcaccaaggaggagcccgtgacagctgatgtcatcaaccctatggccttgcgacagcgagaggagctgcgggagaagctggcggctgccaaggagaagcgcctgctgaaccaaaagctggggaagataaagaccctaggagaggatgacccctggctggacgacactgcagcctggatcgagaggagccggcagctgcagaaggagaaggacctggcagagaagagggccaagttactggaggagatggaccaagagtttggtgtcagcactctggtggaggaggagttcgggcagaggcggcaggacctgtacagtgcccgggacctgcagggcctcactgtggagcatgccattgattccttccgagaaggggagacaatgattcttaccctcaaggacaaaggcgtgctgcaggaggaggaggacgtgctggtgaacgtgaacctggtggataaggagcgggcagagaaaaatgtggagctgcggaagaagaagcctgactacctgccctatgccgaggacgagagcgtggacgacctggcgcaggcacggcctgggcaggctgggtggcgggggctgaggtggagaatgtcgggaatgggggctctgaggaggtggtggctcagtggcttttcaggagccagcctgggtcccaacctgtacctcttgccttgcagcaaaaacctcgctctatcctgtccaagtatgacgaagagcttgaaggggagcggccacattccttccgcttggagcagggcggcacggctgatggcctgcgggagcgggagctggaggagatccgggccaagctgcggctgcaggctcagtccctgagcacagtggggccccggctggcctccgaatacctcacgcctgaggagatggtgacctttaaaaagaccaagcggagggtgaagaaaatccgcaagaaggagaaggaggtagtagtgcgggcagatgacttgctgcctctcggggaccagactcaggatggggactttggttccagactgcggggacggggtcgccgccgagtgtccgaagtggaggaggagaaggagcctgtgcctcagcccctgccgtcggacgacacccgagtggagaacatggacatcagtgatgaggaggaaggtggagctccaccgccggggtccccgcaggtgctggaggaggacgaggcggagctggagctgcagaagcagctggagaagggacgccggctgcgacagttacagcagctacagcagctgcgagacagtggcgagaaggtggtggagattgtgaagaagctggagtctcgccagcggggctgggaggaggatgaggatcccgagcggaagggggccatcgtgttcaacgccacgtccgagttctgccgcaccttgggggagatccccacctacgggctggctggcaatcgcgaggagcaggaggagctcatggactttgaacgggatgaggagcgctcagccaacggtggctccgaatctgacggggaggagaacatcggctggagcacggtgaacctggacgaggagaagcagcagcaggatttctctgcttcctccaccaccatcctggacgaggaaccgatcgtgaatagggggctggcagctgccctgctcctgtgtcagaacaaagggctgctggagaccacagtgcagaaggtggcccgggtgaaggcccccaacaagtcgctgccctcagccgtgtactgcatcgaggataagatggccatcgatgacaagtacagccggagggaggaataccgaggcttcacacaggacttcaaggagaaggacggctacaaacccgacgttaagatcgaatacgtggatgagacgggccggaaactcacacccaaggaggctttccggcagctgtcgcaccgcttccatggcaagggctcaggcaagatgaagacagagcggcggatgaagaagctggacgaggaggcgctcctgaagaagatgagctccagcgacacgcccctgggcaccgtggccctgctccaggagaagcagaaggctcagaagaccccctacatcgtgctcagcggcagcggcaagagcatgaacgcgaacaccatcaccaagtgacagcgccctcccgccccggccctgcctcaaccttcatattaaataaagctccctccttattttttc

SEQ ID NO: 40069 - DNA, 2038 bp, Homo sapiens
tcagcatcaaagttagtataggctttgacagacccatatgcacttgggggtgtagagtgatcaccctccaagctgagcttgcacaggatttcgtgaacagtagacattttgaaggaagctggggaagataaagaccctaggagaggatgacccctggctggacgacactgcagcctggatcgagaggagccggcagctgcagaaggagaaggacctggcagagaagagggccaagttactggaggagatggaccaagagtttggtgtcagcactctggtggaggaggagttcgggcagaggcggcaggacctgtacagtgcccgggacctgcagggcctcactgtggagcatgccattgattccttccgagaaggggagacaatgattcttaccctcaaggacaaaggcgtgctgcaggaggaggaggacgtgctggtgaacgtgaacctggtggataaggagcgggcagagaaaaatgtggagctgcggaagaagaagcctgactacctgccctatgccgaggacgagagcgtggacgacctggcgcagcaaaaacctcgctctatcctgtccaagtatgacgaagagcttgaaggggagcggccacattccttccgcttggagcagggcggcacggctgatggcctgcgggagcgggagctggaggagatccgggccaagctgcggctgcaggctcagtccctgagcacagtggggccccggctggcctccgaatacctcacgcctgaggagatggtgacctttaaaaagaccaagcggagggtgaagaaaatccgcaagaaggagaaggaggtagtagtgcgggcagatgacttgctgcctctcggggaccagactcaggatggggactttggttccagactgcggggacggggtcgccgccgagtgtccgaagtggaggaggagaaggagcctgtgcctcagcccctgccgtcggacgacacccgagtggagaacatggacatcagtgatgaggaggaaggtggagctccaccgccggggtccccgcaggtgctggaggaggacgaggcggagctggagctgcagaagcagctggagaagggacgccggctgcgacagttacagcagctacagcagctgcgagacagtggcgagaaggtggtggagattgtgaagaagctggagtctcgccagcggggctgggaggaggatgaggatcccgagcggaagggggccatcgtgttcaacgccacgtccgagttctgccgcaccttgggggagatccccacctacgggctggctggcaatcgcgaggagcaggaggagctcatggactttgaacgggatgaggagcgctcagccaacggtggctccgaatctgacggggaggagaacatcggctggagcacggtgaacctggacgaggagaagcagcagcaggatttctctgcttcctccaccaccatcctggacgaggaaccgatcgtgaatagggggctggcagctgccctgctcctgtgtcagaacaaagggctgctggagaccacagtgcagaaggtggcccgggtgaaggcccccaacaagtcgctgccctcagccgtgtactgcatcgaggataagatggccatcgatgacaagtacagccggagggaggaataccgaggcttcacacaggacttcaaggagaaggacggctacaaacccgacgttaagatcgaatacgtggatgagacgggccggaaactcacacccaaggaggctttccggcagctgtcgcaccgcttccatggcaagggctcaggcaagatgaagacagagcggcggatgaagaagctggacgaggaggcgctcctgaagaagatgagctccagcgacacgcccctgggcaccgtggccctgctccaggagaagcagaaggctcagaagaccccctacatcgtgctcagcggcagcggcaagagcatgaacgcgaacaccatcaccaagtgacagcgccctcccgccccggccctgcctcaaccttcatattaaataaagctccctccttattttttc

SEQ ID NO: 40070 - DNA, 2282 bp, Homo sapiens
ggcacgaggctgggctcggcggcagccgggctcggagtggacgtgccactatggggtcgtccaagaagcatcgcggagagaaggaggcggccgggacgacggcggcggccggcaccgggggtgccaccgagcagccgccgcggcaccgggaacacaaaaaacacaagcaccggagtggcggcagtggcggtagcggtggcgaacgacggaagcggagccgggaacgtgggggcgagcgcgggagcgggcggcgcggggccgaagctgaggcccggagcagcacgcacgggcgggagcgcagccaggcagagccctccgagcggcgcgtgaagcgggagaagcgcgatgacggctacgaggccgctgccagctccaaaactagctcaggcgatgcctcctcactcagcatcgaggagactaacaaactccgggcaaagttggggctgaaacccttggaggttaatgccatcaagaaggaggcgggcaccaaggaggagcccgtgacagctgatgtcatcaaccctatggccttgcgacagcgagaggagctgcgggagaagctggcggctgccaaggagaagcgcctgctgaaccaaaagctggggaagataaagaccctaggagaggatgacccctggctggacgacactgcagcctggatcgagaggagccggcagctgcagaaggagaaggacctggcagagaagagggccaagttactggaggagatggaccaagagtttggtgtcagcactctggtggaggaggagttcgggcagaggcggcaggacctgtacagtgcccgggacctgcagggcctcactgtggagcatgccattgattccttccgagaaggggagacaatgattcttaccctcaaggacaaaggcgtgctgcaggaggaggaggacgtgctggtgaacgtgaacctggtggataaggagcgggcagagaaaaatgtggagctgcggaagaagaagcctgactacctgccctatgccgaggacgagagcgtggacgacctggcgcagcaaaaacctcgctctatcctgtccaagtatgacgaagagcttgaaggggagcggccacattccttccgcttggagcagggcggcacggctgatggcctgcgggagcgggagctggaggagatccgggccaagctgcggctgcaggctcagtccctgagcacagtggggccccggctggcctccgaatacctcacgcctgaggagatggtgacctttaaaaagaccaagcggagggtgaagaaaatccgcaagaaggagaaggaggtagtagtgcgggcagatgacttgctgcctctcggggaccagactcaggatggggactttggttccagactgcggggacggggtcgccgccgagtgtccgaagtggaggaggagaaggagcctgtgcctcagcccctgccgtcggacgacacccgagtggagaacatggacatcagtgatgaggaggaaggtggagctccaccgccggggtccccgcaggtgctggaggaggacgaggcggagctggagctgcagaagcagctggagaagggacgccggctgcgacagttacagcagctacagcagctgcgagacagtggcgagaaggtggtggagattgtgaagaagctggagtctcgccagcggggctgggaggaggatgaggatcccgagcggaagggggccatcgtgttcaacgccacgtccgagttctgccgcaccttgggggagatccccacctacgggctggctggcaatcgcgaggagcaggaggagctcatggactttgaacgggatgaggagcgctcagccaacggtggctccgaatctgacggggaggagaacatcggctggagcacggtgaacctggacgaggagaagcagcagcaggatttctctgcttcctccaccaccatcctggacgaggaaccgatcgtgaatagggggctggcagctgccctgctcctgtgtcagaacaaagggctgctggagaccacagtgcagaaggtggcccgggtgaaggcccccaacaagtcgctgccctcagccgtgtactgcatcgaggataagatggcagccatgtcagccaggacagtaatgacgacaggcagagctttcgcacagtgcttcaaggagaaggacggatgcacatacgacgttaagatcgactcccttggatgagacgggccggaaactctcattcaagtaggctttacgagctatctgtcgcaccgcttgcatgattaagggctggcgggtgctctactc

SEQ ID NO: 40071 - DNA, 2519 bp, Homo sapiens
ggcacgaggctgggctcggcggcagccgggctcggagtggacgtgccactatggggtcgtccaagaagcatcgcggagagaaggaggcggccgggacgacggcggcggccggcaccgggggtgccaccgagcagccgccgcggcaccgggaacacaaaaaacacaagcaccggagtggcggcagtggcggtagcggtggcgaacgacggaagcggagccgggaacgtgggggcgagcgcgggagcgggcggcgcggggccgaagctgaggcccggagcagcacgcacgggcgggagcgcagccaggcagagccctccgagcggcgcgtgaagcgggagaagcgcgatgacggctacgaggccgctgccagctccaaaactagctcaggcgatgcctcctcactcagcatcgaggagactaacaaactccgggcaaagttggggctgaaacccttggaggttaatgccatcaagaaggaggcgggcaccaaggaggagcccgtgacagctgatgtcatcaaccctatggccttgcgacagcgagaggagctgcgggagaagctggcggctgccaaggagaagcgcctgctgaaccaaaagctggggaagataaagaccctaggagaggatgacccctggctggacgacactgcagcctggatcgagaggagccggcagctgcagaaggagaaggacctggcagagaagagggccaagttactggaggagatggaccaagagtttggtgtcagcactctggtggaggaggagttcgggcagaggcggcaggacctgtacagtgcccgggacctgcagggcctcactgtggagcatgccattgattccttccgagaaggggagacaatgattcttaccctcaaggacaaaggcgtgctgcaggaggaggaggacgtgctggtgaacgtgaacctggtggataaggagcgggcagagaaaaatgtggagctgcggaagaagaagcctgactacctgccctatgccgaggacgagagcgtggacgacctggcgcagcaaaaacctcgctctatcctgtccaagtatgacgaagagcttgaaggggagcggccacattccttccgcttggagcagggcggcacggctgatggcctgcgggagcgggagctggaggagatccgggccaagctgcggctgcaggctcagtccctgagcacagtggggccccggctggcctccgaatacctcacgcctgaggagatggtgacctttaaaaagaccaagcggagggtgaagaaaatccgcaagaaggagaaggaggtagtagtgcgggcagatgacttgctgcctctcggggaccagactcaggatggggactttggttccagactgcggggacggggtcgccgccgagtgtccgaagtggaggaggagaaggagcctgtgcctcagcccctgccgtcggacgacacccgagtggagaacatggacatcagtgatgaggaggaaggtggagctccaccgccggggtccccgcaggtgctggaggaggacgaggcggagctggagctgcagaagcagctggagaagggacgccggctgcgacagttacagcagctacagcagctgcgagacagtggcgagaaggtggtggagattgtgaagaagctggagtctcgccagcggggctgggaggaggatgaggatcccgagcggaagggggccatcgtgttcaacgccacgtccgagttctgccgcaccttgggggagatccccacctacgggctggctggcaatcgcgaggagcaggaggagctcatggactttgaacgggatgaggagcgctcagccaacggtggctccgaatctgacggggaggagaacatcggctggagcacggtgaacctggacgaggagaagcagcagcaggatttctctgcttcctccaccaccatcctggacgaggaaccgatcgtgaatagggggctggcagctgccctgctcctgtgtcagaacaaagggctgctggagaccacagtgcagaaggtggcccgggtgaaggcccccaacaagtcgctgccctcagccgtgtactgcatcgaggataagatggccatcgatgacaagtacagccggagggaggaataccgaggcttcacacaggacttcaaggagaaggacggctacaaacccgacgttaagatcgaatacgtggatgagacgggccggaaactcacacccaaggaggctttccggcagctgtcgcaccgcttccatggcaagggctcaggcaagatgaagacagagcggcggatgaagaagctggacgaggaggcgctcctgaagaagatgagctccagcgacacgcccctgggcaccgtggccctgctccaggagaagcagaaggctcagaagaccccctacatcgtgctcagcggcagcggcaagagcatgaacgcgaacaccatcaccaagtgacagcgccctcccgccccggccctgcctcaaccttcatattaaataaagctccctccttattttttc

SEQ ID NO: 40072 - DNA, 2853 bp, Homo sapiens
ggcacgaggctgggctcggcggcagccgggctcggagtggacgtgccactatggggtcgtccaagaagcatcgcggagagaaggaggcggccgggacgacggcggcggccggcaccgggggtgccaccgagcagccgccgcggcaccgggaacacaaaaaacacaagcaccggagtggcggcagtggcggtagcggtggcgaacgacggaagcggagccgggaacgtgggggcgagcgcgggagcgggcggcgcggggccgaagctgaggcccggagcagcacgcacgggcgggagcgcagccaggcagagccctccgagcggcgcgtgaagcgggagaagcgcgatgacggctacgaggccgctgccagctccaaaactagctcaggcgatgcctcctcactcagcatcgaggagactaacaaactccgggcaaagttggggctgaaacccttggaggttaatgccatcaagaaggaggcgggcaccaaggaggagcccgtgacagctgatgtcatcaaccctatggccttgcgacagcgagaggagctgcgggagaagctggcggctgccaaggagaagcgcctgctgaaccaaaagctggggaagataaagaccctaggagaggatgacccctggctggacgacactgcagcctggatcgagaggagccggcagctgcagaaggagaaggacctggcagagaagagggccaagttactggaggagatggaccaagagtttggtgtcagcactctggtggaggaggagttcgggcagaggcggcaggacctgtacagtgcccgggacctgcagggcctcactgtggagcatgccattgattccttccgagaaggggagacaatgattcttaccctcaaggacaaaggcgtgctgcaggaggaggaggacgtgctggtgaacgtgaacctggtggataaggagcgggcagagaaaaatgtggagctgcggaagaagaagcctgactacctgccctatgccgaggacgagagcgtggacgacctggcgcagcaaaaacctcgctctatcctgtccaagtatgacgaagagcttgaaggggagcggccacattccttccgcttggagcagggcggcacggctgatggcctgcgggagcgggagctggaggagatccgggccaagctgcggctgcaggctcagtccctgagcacagtggggccccggctggcctccgaatacctcacgcctgaggagatggtgacctttaaaaagaccaagcggagggtgaagaaaatccgcaagaaggagaaggaggtagtagtgcgggcagatgacttgctgcctctcggggaccagactcaggatggggactttggttccagactgcggggacggggtcgccgccgagtgtccgaagtggaggaggagaaggagcctgtgcctcagcccctgccgtcggacgacacccgagtggagaacatggacatcagtgatgaggaggaaggtggagctccaccgccggggtccccgcaggtgctggaggaggacgaggcggagctggagctgcagaagcagctggagaagggacgccggctgcgacagttacagcagctacagcagctgcgagacagtggcgagaaggtggtggagattgtgaagaagctggagtctcgccagcggggctgggaggaggatgaggatcccgagcggaagggggccatcgtgttcaacgccacgtccgagttctgccgcaccttgggggagatccccacctacgggctggctggcaatcgcgaggagcaggaggagctcatggactttgaacgggatgaggagcgctcagccaacggtggctccgaatctgacggggaggagaacatcggctggagcacggtgaacctggacgaggagaagcagcagcaggatttctctgcttcctccaccaccatcctggacgaggaaccgatcgtgaatagggggctggcagctgccctgctcctgtgtcagaacaaagggctgctggagaccacagtgcagaaggtggcccgggtgaaggcccccaacaagtcgctgccctcagccgtgtactgcatcgaggataagatggccatcgatgacaagtacagccggagggaggaataccgaggcttcacacaggacttcaaggagaaggacggctacaaacccgacgttaagatcgaatacgtggatgagacgggccggaaactcacacccaaggaggctttccggcagctgtcgcaccgcttccatggcaagggctcaggcaagatgaagacagagcggcggatgaagaagctggacgaggaggcgctcctgaagaagatgagctccagcgacacgcccctgggcaccgtggccctgctccaggagaagcagaaggctcagaagaccccctacatcgtgctcagcggcagcggcaagagcatgaacgcgaacaccatcaccaagtgacagcgccctcccgccccggccctgcctcaaccttcatattaaataaagctccctccttattttttcaaaaaaaaaaaaaaaaaaaaaaaaaaaaaaaaaaaaaaaaaaaaaaaaaaaaaaaaaaaaaaaaaaaaaaaaaaaaaaaaaaaaaaggggggggggggctaataaattatattccccgggggggagcaccacgactattagtaccccaccatcttttttttaaacagggggcccccatcaatagagcacttcattataagacagccagcggacggggcgcgataaaacagagcggtgcgagaaacacgctgctcgtggatcatttgtggagaaacccaccccggggggggcaacattaggggcaccctcctcaaatatagccgggggaaataat

SEQ ID NO: 40073 - DNA, 2553 bp, Homo sapiens
  misc_feature (2533)..(2533): n is a, c, g, or t
  misc_feature (2538)..(2538): n is a, c, g, or t
  misc_feature (2542)..(2542): n is a, c, g, or t
ggcacgaggctgggctcggcggcagccgggctcggagtggacgtgccactatggggtcgtccaagaagcatcgcggagagaaggaggcggccgggacgacggcggcggccggcaccgggggtgccaccgagcagccgccgcggcaccgggaacacaaaaaacacaagcaccggagtggcggcagtggcggtagcggtggcgaacgacggaagcggagccgggaacgtgggggcgagcgcgggagcgggcggcgcggggccgaagctgaggcccggagcagcacgcacgggcgggagcgcagccaggcagagccctccgagcggcgcgtgaagcgggagaagcgcgatgacggctacgaggccgctgccagctccaaaactagctcaggcgatgcctcctcactcagcatcgaggagactaacaaactccgggcaaagttggggctgaaacccttggaggttaatgccatcaagaaggaggcgggcaccaaggaggagcccgtgacagctgatgtcatcaaccctatggccttgcgacagcgagaggagctgcgggagaagctggcggctgccaaggagaagcgcctgctgaaccaaaagctggggaagataaagaccctaggagaggatgacccctggctggacgacactgcagcctggatcgagaggagccggcagctgcagaaggagaaggacctggcagagaagagggccaagttactggaggagatggaccaagagtttggtgtcagcactctggtggaggaggagttcgggcagaggcggcaggacctgtacagtgcccgggacctgcagggcctcactgtggagcatgccattgattccttccgagaaggggagacaatgattcttaccctcaaggacaaaggcgtgctgcaggaggaggaggacgtgctggtgaacgtgaacctggtggataaggagcgggcagagaaaaatgtggagctgcggaagaagaagcctgactacctgccctatgccgaggacgagagcgtggacgacctggcgcagcaaaaacctcgctctatcctgtccaagtatgacgaagagcttgaaggggagcggccacattccttccgcttggagcagggcggcacggctgatggcctgcgggagcgggagctggaggagatccgggccaagctgcggctgcaggctcagtccctgagcacagtggggccccggctggcctccgaatacctcacgcctgaggagatggtgacctttaaaaagaccaagcggagggtgaagaaaatccgcaagaaggagaaggaggtagtagtgcgggcagatgacttgctgcctctcggggaccagactcaggatggggactttggttccagactgcggggacggggtcgccgccgagtgtccgaagtggaggaggagaaggagcctgtgcctcagcccctgccgtcggacgacacccgagtggagaacatggacatcagtgatgaggaggaaggtggagctccaccgccggggtccccgcaggtgctggaggaggacgaggcggagctggagctgcagaagcagctggagaagggacgccggctgcgacagttacagcagctacagcagctgcgagacagtggcgagaaggtggtggagattgtgaagaagctggagtctcgccagcggggctgggaggaggatgaggatcccgagcggaagggggccatcgtgttcaacgccacgtccgagttctgccgcaccttgggggagatccccacctacgggctggctggcaatcgcgaggagcaggaggagctcatggactttgaacgggatgaggagcgctcagccaacggtggctccgaatctgacggggaggagaacatcggctggagcacggtgaacctggacgaggagaagcagcagcaggatttctctgcttcctccaccaccatcctggacgaggaaccgatcgtgaatagggggctggcagctgccctgctcctgtgtcagaacaaagggctgctggagaccacagtgcagaaggtggcccgggtgaaggcccccaacaagtcgctgccctcagccgtgtactgcatcgaggataagatggccatcgatgacaagtacagccggagggaggaataccgaggcttcacacaggacttcaaggagaaggacggctacaaacccgacgttaagatcgaatacgtggatgagacgggccggaaactcacacccaaggaggctttccggcagctgtcgcaccgcttccatggcaagggctcaggcaagatgaagacagagcggcggatgaagaagctggacgaggaggcgctcctgaagaagatgagctccagcgacacgcccctgggcaccgtggccctgctccaggagaagcagaaggctcagaagaccccctacatcgtgctcagcggcagcggcaagagcatgaacgcgaacaccatcaccaagtgacagcgccctcccgccccggccctgcctcaaccttcatattaaataaagctccctccttattttttcataggggggggggnggggngggnggccagccgct

SEQ ID NO: 40074 - DNA, 1301 bp, Homo sapiens
ggacgcgtgggtcgacccacgtgacctttaaaaagaccaagcggagggtgaagaaaatccgcaagaaggagaaggaggtagtagtgcgggcagatgacttgctgcctctcggggaccagactcaggatggggactttggttccagactgcggggacggggtcgccgccgagtgtccgaagtggaggaggagaaggagcctgtgcctcagcccctgccgtcggacgacacccgagtggagaacatggacatcagtgatgaggaggaaggtggagctccaccgccggggtccccgcaggtgctggaggaggacgaggcggagctggagctgcagaagcagctggagaagggacgccggctgcgacagttacagcagctacagcagctgcgagacagtggcgagaaggtggtggagattgtgaagaagctggagtctcgccagcggggctgggaggaggatgaggatcccgagcggaagggggccatcgtgttcaacgccacgtccgagttctgccgcaccttgggggagatccccacctacgggctggctggcaatcgcgaggagcaggaggagctcatggactttgaacgggatgaggagcgctcagccaacggtggctccgaatctgacggggaggagaacatcggctggagcacggtgaacctggacgaggagaagcagcagcaggatttctctgcttcctccaccaccatcctggacgaggaaccgatcgtgaatagggggctggcagctgccctgctcctgtgtcagaacaaagggctgctggagaccacagtgcagaaggtggcccgggtgaaggcccccaacaagtcgctgccctcagccgtgtactgcatcgaggataagatggccatcgatgacaagtacagccggagggaggaataccgaggcttcacacaggacttcaaggagaaggacggctacaaacccgacgttaagatcgaatacgtggatgagacgggccggaaactcacacccaaggaggctttccggcagctgtcgcaccgcttccatggcaagggctcaggcaagatgaagacagagcggcggatgaagaagctggacgaggaggcgctcctgaagaagatgagctccagcgacacgcccctgggcaccgtggccctgctccaggagaagcagaaggctcagaagaccccctacatcgtgctcagcggcagcggcaagagcatgaacgcgaacaccatcaccaagtgacagcgccctcccgccccggccctgcctcaaccttcatattaaataaagctccctccttattttttc

SEQ ID NO: 40075 - DNA, 1126 bp, Homo sapiens
cagagaatgtgggctgtgcgggtgagagcagacagcaggggatctgttgtcatggggagggaaggcgcaaaggggaatggagacagcgtggaaggagagcgtcttgaagatatgggcgctaaggagggaggaggacgaggcggagctggagctgcagaagcagctggagaagggacgccggctgcgacagttacagcagctacagcagctgcgagacagtggcgagaaggtggtggagattgtgaagaagctggagtctcgccagcggggctgggaggaggatgaggatcccgagcggaagggggccatcgtgttcaacgccacgtccgagttctgccgcaccttgggggagatccccacctacgggctggctggcaatcgcgaggagcaggaggagctcatggactttgaacgggatgaggagcgctcagccaacggtggctccgaatctgacggggaggagaacatcggctggagcacggtgaacctggacgaggagaagcagcagcaggatttctctgcttcctccaccaccatcctggacgaggaaccgatcgtgaatagggggctggcagctgccctgctcctgtgtcagaacaaagggctgctggagaccacagtgcagaaggtggcccgggtgaaggcccccaacaagtcgctgccctcagccgtgtactgcatcgaggataagatggccatcgatgacaagtacagccggagggaggaataccgaggcttcacacaggacttcaaggagaaggacggctacaaacccgacgttaagatcgaatacgtggatgagacgggccggaaactcacacccaaggaggctttccggcagctgtcgcaccgcttccatggcaagggctcaggcaagatgaagacagagcggcggatgaagaagctggacgaggaggcgctcctgaagaagatgagctccagcgacacgcccctgggcaccgtggccctgctccaggagaagcagaaggctcagaagaccccctacatcgtgctcagcggcagcggcaagagcatgaacgcgaacaccatcaccaagtgacagcgccctcccgccccggccctgcctcaaccttcatattaaataaagctccctccttattttttc

SEQ ID NO: 40076 - DNA, 1064 bp, Homo sapiens
ctgggacaccacgcacggggcaagcacagctgtgtggccagcggcatgctgacagggctagacacgcactgggccgcttaatgccgaccttggcctgtgagtctgtgaccaggactcttggtgagcggccagctgggggctgttggtgctgagttcagctttgtagccaaaaaggttccagctgatttccagacagacccggcttccgttttcaatgccaagatgagctgggcgaatgagtgggagcggacagaggcttttggccgactgtgatcgctattgtctggagtccccttgaccctctggaggtactgcctctcctttcatttgtacacactggtttttctgcacggtttcgcctcttgtcagctctggggacaccagcttttccgtttcccatactgccagatggctttgagcaaacaagaggaagtccccagcgtgggtgcagcctgtggctgcgttgtcctgcctgtttaccctgggggtgaagcggaaagggagcaggctttgcaggaacccaggtggcaccccttctcgtccctgccacttgttctctttgtggccctgggatggtccccaaacttctctgaagtggtgctgaaaactgtgttgatagcacggacctcactgagctgttaggagtagctgtcgacactgtgtacccgaggttctttccagtggaaaccaggttagccttcgattccttttctttcatctgtggttggtcacccttttgagagctctgaccccaaaagaagtgtttttcagattggcccaagttcctccacgttgggccccccaagacagactgactgagaagggagtggagctgtgggcctcctgattccttcccaggctatgtcccttccagagtggtccaggtgggacgctgactaccagaggcctggccctctgttctgaggcccagttagccatggccttcatctgctcacattctgtgggattgggttgtgtaattttcgttgtatctctctgtcctcattaaatctgaattcctccaaggacaagaaggctgctgctgcttaaaaaaaaaaagaaag

SEQ ID NO: 40077 - DNA, 244 bp, Homo sapiens
ataaaatggctaacaagaggcagaatgaatcttatgtcaatatgctcccattctcaacaatcaatctatttatgtaagtttttcaaactccagcatcagaaatccacatgtagccctggggccatcacattttcttgcaggatggcataaggtttaacacttttgagttatttgaatatacgggcaaccaacagtaggcaagagggttctacagaatgccaagaaatcaaacacagaatttaga

SEQ ID NO: 40078 - DNA, 842 bp, Homo sapiens
agcccagcaacagactgggtgttcagtgtgcccctgtcggtctccacgggggccctgcaagaaggagccaccccggttttacggggggttcagggcttgtggccagatgtgcagctaggcctggatcaggctcccgtccggccccagtgcgtctgccgtgcccgtgaccccaggctgtgtctctcagaatccgccaagattccagggcaggtaactgcagagctcccccgagtcctgtgcacgcctcggctcacactgcagctcagcagcagcaacgcgggtgacagaaaccagctctgtgtctgtgagcctctgcctcaccttctgggggatggcacagtattgctccaagacatgcaaacagctgcgggcagcagagacagtgaggcaaccctgccacactctccaaccatgccctcctcaggcatgcggagaaagcaccccttcatctgtgcaaggaatcctcaagcagcagacaaaattcatgcactgttaattcagatgttacagtcacatccagtgctaagggctgtcctttgaaaacagctgaggtagacacatcttccaagaacaaatcatagaaatgttaccaggcgattgtcttcacaacctctgcatcagtgatggggacttgggggtaagcttttggttggcgttgtgaacagtgccagctccctaaagcaagcttgcttttctgttgtttgaaatactgcaggagaactgaaattctcttaaaatataccggtttctggttcaagagaaatacttttttgcaccaatttaattcaggtttctaaagccgaggcagggatggcatcacagtctgttgaatgaattccagc

SEQ ID NO: 40079 - DNA, 395 bp, Homo sapiens
tggtctgaggatggtattaagcaatcctaatttctaatattactatgcacatataaaggaattcggctaattttttttaatgaatgcatgctgagaaaatggaattccttttttgaacatcattatatgcttctgtgaactctgcaggataatttttgagtttgaaatatatattttgcatattcaagtctaattgcctgtgtttcagggtttgtgatgatatactttttaggtttattactatgtgaatcatatagataagttcatcatcataaataggtacactgatctttgtatacttattgccctctagtggctgtagttatctcaataaggatgtaggaatgaggggaggagtgtatgtatgtgtgtatttgtagaaaagagaagataat

SEQ ID NO: 40080 - DNA, 451 bp, Homo sapiens
gcatctgctgggcttctggggaggccttcaggagcttttacttttggcaaaagggtgcaggcacaccacatgcctagagcaggagcaaaagagagaggagtgtggggaggtgccacatacttttttttttttttttttttttgagaggaagtctcgctctgtcgcccaggctggagtgcagtggcgccatctcggctcactgcaagctctgcctcccgggttcacgccattctcctgcctcagcctcccgagtagctgggactacaggcgcccgccaccacgcccggctaatgtttttgcatttttagtagagacggggtttcaccgtgttagccaggatggtctcgatctcctgacctcgtgatccgcccacctcagcctcccaaagtgctgcgattacaggcgtgagccaccgcgcccagccagtgccacatacttttaaacaactaga

SEQ ID NO: 40081 - DNA, 2807 bp, Homo sapiens
attcttgtttcgtactgaggctttcgggacggcggcgggaagatggcggcctccaggaatgggtttgaagccgtggaggcagagggcagcgcagggtgccggggaagctcgggaatggaggtggtgcttcctttggatcctgccgtccccgccccgctgtgccctcacggacccactcttctgtttgtaaaggtgacccaagggaaagaagaaactcggaggttttatgcctgttcagcctgtagagatagaaaagactgtaatttttttcagtgggaagatgaaaagttgtcaggagctagacttgctgcccgagaagctcataaccgaagatgtcagcctcccctgtcccgaacgcagtgtgtggaaaggtacttgaagtttattgagttgcccttgactcagagaaagttttgtcaaacatgtcagcagttgttgttaccagatgactgggggcaacatagtgagcatcaggttctgggtaatgtgtccattacccagttaagaaggcccagtcaactcctttatccactggaaaacaagaagacaaatgcccagtatctgtttgctgatcggagctgtcagttcttggtagacttactttctgccctcggattcagaagagtactgtgtgttggaacaccaaggttgcatgagctgatcaagttgacagcatcaggtgacaagaagtctaacattaaaagccttttattggatattgattttcggtattcacagttttatatggaagatagcttttgccattataatatgtttaaccatcatttctttgatggaaagactgcccttgaagtatgcagagcatttttacaggaagataaaggcgaaggaatcattatggtgacggatcctccgtttggtggcttggttgaacctctggctattacattcaagaagttaattgctatgtggaaagaaggtcaaagccaagatgacagtcacaaagaactacccattttctggattttcccctatttttttgaatcccgaatttgtcagttttttccaagcttccagatgctggattaccaggtagattatgataatcatgcactttataaacacggaaagacaggtcgaaaacagtctcccgtgcgtattttcaccaacattccgcccaacaaaataatccttcctactgaagaagggtacagattttgctctccgtgtcaacggtatgtttctctagagaatcaacactgtgagcactgtaattcttgcacatccaaggatggcaggaaatggaaccattgctttctctgtaaaaagtgtgtaaagccttcctggatccactgtagcatctgcaatcactgtgctgttccagatcattcttgtgagggccccaaacatggctgctttatttgtggtgaactggatcataaacgcagtacttgtcctaacattgctacatctaagagagctaacaaagctgtcagaaagcagaagcaaagaaaaagtaataagatgaaaatggagaccacgaaaggacaatccatgaatcatacatctgctacaaggagaaagaaaaggagggaaagagcccatcaatatcttggctcttaaatgtccagtgactggagaataagaaagatttatggtccaacctttgatgccattttctgaaagtgccacactggacttaaattcagctgcttccagaggtgtgcacctttctgagctagataacaggcaggtggcatttgctggtttacagtcccttatctgcctctctggagacttggggagttgttccatcttcagccagtttactagttctttcagcattcatttttcctcactttaagtctctcccagtcacattgttctatttttatgttttcattttttttgagatggagtcttgctctgtctcccaggctagagtgcaatggcacaacctcagctcactgcaacctctgcctcccgggttcaagcaattctcctgccttagcctcctgagtagctggaattataggcacatgccaccacgactggctaatttttgtatttttagtagagacggggtttcaccatgttggccaggctggtctcgaactcctggcctcaagtgatttgcctgccttggcctcccaaagtgctgggattacaggcatgagccacctcacccagctccggtcacattattctagcctttttatccaaaaaatgggcagaccattcttttgcagaagatgtcagaagaaaatgaaagtgaaaacctatgcagtttgtttaccgtgaacataaaagtatgttaatttaaataggaaaatattttatgttaaatatgaaacaatagtttaaaccccacttgaaaagtatagcgtacaattatttttagactgaatttgaagatgatggaaagggtttttacaaaggcactgtttagatatacagattataattataattacattattattaaatatttattcttcaagtactttttgcagttgtcctctgacggtctagaatcacttaaatgcttgttgaatgagtgagatgtttagaactacgacttgctctgtcattccagtgtcgtttaacctatgcagtaagattctgtctttgtaaaagtagttcgtagcagaagccaggatagtttggtaattaaacgcccaaactaaactcctcattcctacccttaatatttcctggctgtatgatcttggccaggtcactctctaaaagccccggtttcttcattattatcattattataatggggagaataacagctatacctgaggtttgttttgtgattaaattaaatgagacccaagtgc

SEQ ID NO: 40082 - DNA, 2482 bp, Homo sapiens
attcttgtttcgtactgaggctttcgggacggcggcgggaagatggcggcctccaggaatgggtttgaagccgtggaggcagagggcagcgcagggtgccggggaagctcgggaatggaggtggtgcttcctttggatcctgccgtccccgccccgctgtgccctcacggacccactcttctgtttgtaaaggtgacccaagggaaagaagaaactcggaggttttatgcctgttcagcctgtagagatagaaaagactgtaatttttttcagtgggaagatgaaaagttgtcaggagctagacttgctgcccgagaagctcataaccgaagatgtcagcctcccctgtcccgaacgcagtgtgtggaaaggtacttgaagtttattgagttgcccttgactcagagaaagttttgtcaaacatgtcagcagttgttgttaccagatgactgggggcaacatagtgagcatcaggttctgggtaatgtgtccattacccagttaagaaggcccagtcaactcctttatccactggaaaacaagaagacaaatgcccagtatctgtttgctgatcggagctgtcagttcttggtagacttactttctgccctcggattcagaagagtactgtgtgttggaacaccaaggttgcatgagctgatcaagttgacagcatcaggtgacaagaagtctaacattaaaagccttttattggatattgattttcggtagattatgataatcatgcactttataaacacggaaagacaggtcgaaaacagtctcccgtgcgtattttcaccaacattccgcccaacaaaataatccttcctactgaagaagggtacagattttgctctccgtgtcaacggtatgtttctctagagaatcaacactgtgagcactgtaattcttgcacatccaaggatggcaggaaatggaaccattgctttctctgtaaaaagtgtgtaaagccttcctggatccactgtagcatctgcaatcactgtgctgttccagatcattcttgtgagggccccaaacatggctgctttatttgtggtgaactggatcataaacgcagtacttgtcctaacattgctacatctaagagagctaacaaagctgtcagaaagcagaagcaaagaaaaagtaataagatgaaaatggagaccacgaaaggacaatccatgaatcatacatctgctacaaggagaaagaaaaggagggaaagagcccatcaatatcttggctcttaaatgtccagtgactggagaataagaaagatttatggtccaacctttgatgccattttctgaaagtgccacactggacttaaattcagctgcttccagaggtgtgcacctttctgagctagataacaggcaggtggcatttgctggtttacagtcccttatctgcctctctggagacttggggagttgttccatcttcagccagtttactagttctttcagcattcatttttcctcactttaagtctctcccagtcacattgttctatttttatgttttcattttttttgagatggagtcttgctctgtctcccaggctagagtgcaatggcacaacctcagctcactgcaacctctgcctcccgggttcaagcaattctcctgccttagcctcctgagtagctggaattataggcacatgccaccacgactggctaatttttgtatttttagtagagacggggtttcaccatgttggccaggctggtctcgaactcctggcctcaagtgatttgcctgccttggcctcccaaagtgctgggattacaggcatgagccacctcacccagctccggtcacattattctagcctttttatccaaaaaatgggcagaccattcttttgcagaagatgtcagaagaaaatgaaagtgaaaacctatgcagtttgtttaccgtgaacataaaagtatgttaatttaaataggaaaatattttatgttaaatatgaaacaatagtttaaaccccacttgaaaagtatagcgtacaattatttttagactgaatttgaagatgatggaaagggtttttacaaaggcactgtttagatatacagattataattataattacattattattaaatatttattcttcaagtactttttgcagttgtcctctgacggtctagaatcacttaaatgcttgttgaatgagtgagatgtttagaactacgacttgctctgtcattccagtgtcgtttaacctatgcagtaagattctgtctttgtaaaagtagttcgtagcagaagccaggatagtttggtaattaaacgcccaaactaaactcctcattcctacccttaatatttcctggctgtatgatcttggccaggtcactctctaaaagccccggtttcttcattattatcattattataatggggagaataacagctatacctgaggtttgttttgtgattaaattaaatgagacccaagtgc

SEQ ID NO: 40083 - DNA, 2399 bp, Homo sapiens
attcttgtttcgtactgaggctttcgggacggcggcgggaagatggcggcctccaggaatgggtttgaagccgtggaggcagagggcagcgcagggtgccggggaagctcgggaatggaggtggtgcttcctttggatcctgccgtccccgccccgctgtgccctcacggacccactcttctgtttgtaaaggtgacccaagggaaagaagaaactcggaggttttatgcctgttcagcctgtagagatagaaaagactgtaatttttttcagtgggaagatgaaaagttgtcaggagctagacttgctgcccgagaagctcataaccgaagatgtcagcctcccctgtcccgaacgcagtgtgtggaaaggtacttgaagtttattgagttgcccttgactcagagaaagttttgtcaaacatgtcagcagttgttgttaccagatgactgggggcaacatagtgagcatcaggttctgggtaatgtgtccattacccagttaagaaggcccagtcaactcctttatccactggaaaacaagaagacaaatgcccagtatctgtttgctgatcggagctgtcagttcttggtagacttactttctgccctcggattcagaagagtactgtgtgttggaacaccaaggttgcatgagctgatcaagttgacagcatcaggtgacaagaagtctaacattaaaagccttttattggatattgattttcggtattcacagttttatatggaagatagcttttgccattataatatgtttaaccatcatttctttgatggaaagactgcccttgaagtatgcagagcatttttacaggaagataaaggcgaaggaatcattatggtgacggatcctccgtttggtggcttggttgaacctctggctattacattcaagaagttaattgctatgtggaaagaaggtcaaagccaagatgacagtcacaaagaactacccattttctggattttcccctatttttttgaatcccgaatttgtcagttttttccaagcttccagatgctggattaccaggtagattatgataatcatgcactttataaacacggaaagacaggtcgaaaacagtctcccgtgcgtattttcaccaacattccgcccaacaaaataatccttcctactgaagaagggtacagattttgctctccgtgtcaacggtatgtttctctagagaatcaacactgtgagcactgtaattcttgcacatccaaggatggcaggaaatggaaccattgctttctctgtaaaaagtgtgtaaagccttcctggatccactgtagcatctgcaatcactgtgctgttccagatcattcttgtgagggccccaaacatggctgctttatttgtggtgaactggatcataaacgcagtacttgtcctaacattgctacatctaagagagctaacaagtcagtcgaatactttactagaaaaatgtattccatctgtgttttatacaggataatccacaaaagcatgcaacattcagaggatcttgaagtgccaagttaattgtcactttcactattaagtactggctgcatagatggatggagggaggagaggaagatgattcaaagagcttgctttcaaagagcttacagttctacagcttagagatgaaaataaccaaaatatgaggtagaaagtggttaattttacctctccttggctttacgtctcatgtgtaaagttatagggggtgacagttcatgctttattgaaggacatgatatttacgtcaggctttgagggacagatcagatatagacacatgatggcaggaaaggctggagaaggcatttcagattgaatagcaagtaattccacagtaggaaaattgtgagaaagctatttctttgtatcaaattttaagaaaaatatttagacatgcttaatgcttaaatatttgaaatttttattactttttttcctgtgattattttcacatctctcaccaatatttgattggagctatggattacaactcagagtatggggatacctatgacaatagcttatttagaagaggcactgcttctggaatagttatccccaaaacaaaacaaaaagagaaaaacattgctattttaaccgagctaatttgaatgattatacttttttcctaactaaaagggatgatagtgattaagtcctcttcctttattgctaagaaaactaatgttacacagttattaattggagattaccagacagctaaatttgacattatatgaaattatatgacattatatgaaaattcagattgggctaccatgtgactatgacttgtaatttaaaaaaattgatttgtgttagaaatatctgatagtttaataattatttatggtaatattaga

SEQ ID NO: 40084 - DNA, 1135 bp, Homo sapiens
attcttgtttcgtactgaggctttcgggacggcggcgggaagatggcggcctccaggaatgggtttgaagccgtggaggcagagggcagcgcagggtgccggggaagctcgggaatggaggtggtgcttcctttggatcctgccgtccccgccccgctgtgccctcacggacccactcttctgtttgtaaaggtgacccaagggaaagaagaaactcggaggttttatgcctgttcagcctgtagagatagaaaagactgtaatttttttcagtgggaagatgaaaagttgtcaggagctagacttgctgcccgagaagctcataaccgaagatgtcagcctcccctgtcccgaacgcagtgtgtggaaaggtacttgaagtttattgagttgcccttgactcagagaaagttttgtcaaacatgtcagcagttgttgttaccagatgactgggggcaacatagtgagcatcaggttctgggtaatgtgtccattacccagttaagaaggcccagtcaactcctttatccactggaaaacaagaagacaaatgcccagtatctgtttgctgatcggagctgtcagttcttggtagacttactttctgccctcggattcagaagagtactgtgtgttggaacaccaaggttgcatgagctgatcaagttgacagcatcaggtgacaagaagtctaacattaaaagccttttattggatattgattttcggtattcacagttttatatggaagatagcttttgccattataatatgtttaaccatcatttctttgatggaaagactgcccttgaagtatgcagagcatttttacaggaagataaaggcgaaggaatcattatggtgacggatcctccgtttggtggcttggttgaacctctggctattacattcaagaagttaattgctatgtggaaagaaggtcaaagccaagatgacagtcacaaagaactacccattttctggattttcccctatttttttgaatcccgaatttgtcagttttttccaagcttccagatgctggattaccagggcatatagaaaagtaaatcacctttgtggttggtgaaatgccatgcacactttactgcatcactcttgggatgtcaggagt

SEQ ID NO: 40085 - DNA, 1504 bp, Homo sapiens
gagactgaggatttatgcttgcaatacagtagattctttcccttcttctattttcttatttggttagctagttaattaaacttcaacataattacataattcactgtgctcattctgtgaaataatttagcaccttgttttccagagctgtcagaaagcagaagcaaagaaaaagtaataagatgaaaatggagaccacgaaaggacaatccatgaatcatacatctgctacaaggagaaagaaaaggagggaaagagcccatcaatatcttggctcttaaatgtccagtgactggagaataagaaagatttatggtccaacctttgatgccattttctgaaagtgccacactggacttaaattcagctgcttccagaggtgtgcacctttctgagctagataacaggcaggtggcatttgctggtttacagtcccttatctgcctctctggagacttggggagttgttccatcttcagccagtttactagttctttcagcattcatttttcctcactttaagtctctcccagtcacattgttctatttttatgttttcattttttttgagatggagtcttgctctgtctcccaggctagagtgcaatggcacaacctcagctcactgcaacctctgcctcccgggttcaagcaattctcctgccttagcctcctgagtagctggaattataggcacatgccaccacgactggctaatttttgtatttttagtagagacggggtttcaccatgttggccaggctggtctcgaactcctggcctcaagtgatttgcctgccttggcctcccaaagtgctgggattacaggcatgagccacctcacccagctccggtcacattattctagcctttttatccaaaaaatgggcagaccattcttttgcagaagatgtcagaagaaaatgaaagtgaaaacctatgcagtttgtttaccgtgaacataaaagtatgttaatttaaataggaaaatattttatgttaaatatgaaacaatagtttaaaccccacttgaaaagtatagcgtacaattatttttagactgaatttgaagatgatggaaagggtttttacaaaggcactgtttagatatacagattataattataattacattattattaaatatttattcttcaagtactttttgcagttgtcctctgacggtctagaatcacttaaatgcttgttgaatgagtgagatgtttagaactacgacttgctctgtcattccagtgtcgtttaacctatgcagtaagattctgtctttgtaaaagtagttcgtagcagaagccaggatagtttggtaattaaacgcccaaactaaactcctcattcctacccttaatatttcctggctgtatgatcttggccaggtcactctctaaaagccccggtttcttcattattatcattattataatggggagaataacagctatacctgaggtttgttttgtgattaaattaaatgagacccaagtgc

SEQ ID NO: 40086 - DNA, 876 bp, Homo sapiens
  misc_feature (93)..(93): n is a, c, g, or t
  misc_feature (121)..(121): n is a, c, g, or t
  misc_feature (123)..(123): n is a, c, g, or t
  misc_feature (140)..(140): n is a, c, g, or t
tacttaacattttaactaacctaaatacaacagcccactctgtgtggcccctctggtaccgccgatttcaggatcaagaccaaagttctcatngtggctctggaggccccgcaagatcttnanatccctttttcttattnccaatgacaagattttaagagcaaatcagaaacccatcacacacaggaaagggattacaggcatgagccacctcacccagctccggtcacattattctagcctttttatccaaaaaatgggcagaccattcttttgcagaagatgtcagaagaaaatgaaagtgaaaacctatgcagtttgtttaccgtgaacataaaagtatgttaatttaaataggaaaatattttatgttaaatatgaaacaatagtttaaaccccacttgaaaagtatagcgtacaattatttttagactgaatttgaagatgatggaaagggtttttacaaaggcactgtttagatatacagattataattataattacattattattaaatatttattcttcaagtactttttgcagttgtcctctgacggtctagaatcacttaaatgcttgttgaatgagtgagatgtttagaactacgacttgctctgtcattccagtgtcgtttaacctatgcagtaagattctgtctttgtaaaagtagttcgtagcagaagccaggatagtttggtaattaaacgcccaaactaaactcctcattcctacccttaatatttcctggctgtatgatcttggccaggtcactctctaaaagccccggtttcttcattattatcattattataatggggagaataacagctatacctgaggtttgttttgtgattaaattaaatgagacccaagtgc

SEQ ID NO: 40087 - DNA, 995 bp, Homo sapiens
attcttgtttcgtactgaggctttcgggacggcggcgggaagatggcggcctccaggaatgggtttgaagccgtggaggcagagggcagcgcagggtgccggggaagctcgggaatggaggtggtgcttcctttggatcctgccgtccccgccccgctgtgccctcacggacccactcttctgtttgtaaaggtgacccaagggaaagaagaaactcggaggttttatgcctgttcagcctgtagagatagaaaagactgtaatttttttcagtgggaagatgaaaagttgtcaggagctagacttgctgcccgagaagctcataaccgaagatgtcagcctcccctgtcccgaacgcagtgtgtggaaaggtacttgaagtttattgagttgcccttgactcagagaaagttttgtcaaacatgtcagcagttgttgttaccagatgactgggggcaacatagtgagcatcaggttctgggtaatgtgtccattacccagttaagaaggcccagtcaactcctttatccactggaaaacaagaagacaaatgcccagtatctgtttgctgatcggagctgtcagttcttggtagacttactttctgccctcggattcagaagagtactgtgtgttggaacaccaaggttgcatgagctgatcaagttgacagcatcaggtgacaagaagtctaacattaaaagccttttattggatattgattttcggtattcacagttttatatggaagatagcttttgccattataatatgtttaaccatcatttctttgatggaaagactgcccttgaagtatgcagagcatttttacaggaagataaaggcgaaggaatcattatggtgacggatcctccgtttggtggcttggttgaacctctggctattacattcaagaagttaattgctatgtggaaagaaggtcaaagccaaggtgtataatttattactgcaaaataaatacatatctatatatc

SEQ ID NO: 40088 - DNA, 2713 bp, Homo sapiens
attcttgtttcgtactgaggctttcgggacggcggcgggaagatggcggcctccaggaatgggtttgaagccgtggaggcagagggcagcgcagggtgccggggaagctcgggaatggaggtggtgcttcctttggatcctgccgtccccgccccgctgtgccctcacggacccactcttctgtttgtaaaggtgacccaagggaaagaagaaactcggaggttttatgcctgttcagcctgtagagatagaaaagactgtaatttttttcagtgggaagatgaaaagttgtcaggagctagacttgctgcccgagaagctcataaccgaagatgtcagcctcccctgtcccgaacgcagtgtgtggaaaggtacttgaagtttattgagttgcccttgactcagagaaagttttgtcaaacatgtcagcagttgttgttaccagatgactgggggcaacatagtgagcatcaggttctgggtaatgtgtccattacccagttaagaaggcccagtcaactcctttatccactggaaaacaagaagacaaatgcccagtatctgtttgctgatcggagctgtcagttcttggtagacttactttctgccctcggattcagaagagtactgtgtgttggaacaccaaggttgcatgagctgatcaagttgacagcatcaggtgacaagaagtctaacattaaaagccttttattggatattgattttcggtattcacagttttatatggaagatagcttttgccattataatatgtttaaccatcatttctttgatggaaagactgcccttgaagtatgcagagcatttttacaggaagataaaggcgaaggaatcattatggtgacggatcctccgtttggtggcttggttgaacctctggctattacattcaagaagttaattgctatgtggaaagaaggtcaaagccaagatgacagtcacaaagaactacccattttctggattttcccctatttttttgaatcccgaatttgtcagttttttccaagcttccagatgctggattaccaggtagattatgataatcatgcactttataaacacggaaagacaggtcgaaaacagtctcccgtgcgtattttcaccaacattccgcccaacaaaataatccttcctactgaagaagggtacagattttgctctccgtgtcaacggtatgtttctctagagaatcaacactgtgagcactgtaattcttgcacatccaaggatggcaggaaatggaaccattgctttctctgtaaaaagtgtgtaaagccttcctggatccactgtagcatctgcaatcactgtgctgttccagatcattcttagctgtcagaaagcagaagcaaagaaaaagtaataagatgaaaatggagaccacgaaaggacaatccatgaatcatacatctgctacaaggagaaagaaaaggagggaaagagcccatcaatatcttggctcttaaatgtccagtgactggagaataagaaagatttatggtccaacctttgatgccattttctgaaagtgccacactggacttaaattcagctgcttccagaggtgtgcacctttctgagctagataacaggcaggtggcatttgctggtttacagtcccttatctgcctctctggagacttggggagttgttccatcttcagccagtttactagttctttcagcattcatttttcctcactttaagtctctcccagtcacattgttctatttttatgttttcattttttttgagatggagtcttgctctgtctcccaggctagagtgcaatggcacaacctcagctcactgcaacctctgcctcccgggttcaagcaattctcctgccttagcctcctgagtagctggaattataggcacatgccaccacgactggctaatttttgtatttttagtagagacggggtttcaccatgttggccaggctggtctcgaactcctggcctcaagtgatttgcctgccttggcctcccaaagtgctgggattacaggcatgagccacctcacccagctccggtcacattattctagcctttttatccaaaaaatgggcagaccattcttttgcagaagatgtcagaagaaaatgaaagtgaaaacctatgcagtttgtttaccgtgaacataaaagtatgttaatttaaataggaaaatattttatgttaaatatgaaacaatagtttaaaccccacttgaaaagtatagcgtacaattatttttagactgaatttgaagatgatggaaagggtttttacaaaggcactgtttagatatacagattataattataattacattattattaaatatttattcttcaagtactttttgcagttgtcctctgacggtctagaatcacttaaatgcttgttgaatgagtgagatgtttagaactacgacttgctctgtcattccagtgtcgtttaacctatgcagtaagattctgtctttgtaaaagtagttcgtagcagaagccaggatagtttggtaattaaacgcccaaactaaactcctcattcctacccttaatatttcctggctgtatgatcttggccaggtcactctctaaaagccccggtttcttcattattatcattattataatggggagaataacagctatacctgaggtttgttttgtgattaaattaaatgagacccaagtgc

SEQ ID NO: 40089 - DNA, 2096 bp, Homo sapiens
attcttgtttcgtactgaggctttcgggacggcggcgggaagatggcggcctccaggaatgggtttgaagccgtggaggcagagggcagcgcagggtgccggggaagctcgggaatggaggtggtgcttcctttggatcctgccgtccccgccccgctgtgccctcacggacccactcttctgtttgtaaaggtgacccaagggaaagaagaaactcggaggttttatgcctgttcagcctgtagagatagaaaagactgtaatttttttcagtgggaagatgaaaagttgtcaggagctagacttgctgcccgagaagctcataaccgaagatgtcagcctcccctgtcccgaacgcagtgtgtggaaaggtacttgaagtttattgagttgcccttgactcagagaaagttttgtcaaacatgtcagcagttgttgttaccagatgactgggggcaacatagtgagcatcaggttctgggtaatgtgtccattacccagttaagaaggcccagtcaactcctttatccactggaaaacaagaagacaaatgcccagtatctgtttgctgatcggagctgtcagttcttggtagacttactttctgccctcggattcagaagagtactgtgtgttggaacaccaaggttgcatgagctgatcaagttgacagcatcaggtgacaagaagtctaacattaaaagccttttattggatattgattttcggtattcacagttttatatggaagatagcttttgccattataatatgtttaaccatcatttctttgatggaaagactgcccttgaagtatgcagagcatttttacaggaagataaaggcgaaggaatcattatggtgacggatcctccgtttggtggcttggttgaacctctggctattacattcaagaagttaattgctatgtggaaagaaggtcaaagccaagatgacagtcacaaagaactacccattttctggattttcccctatttttttgaatcccgaatttgtcagttttttccaagcttccagatgctggattaccaggtagattatgataatcatgcactttataaacacggaaagacaggtcgaaaacagtctcccgtgcgtattttcaccaacattccgcccaacaaaataatccttcctactgaagaagggtacagattttgctctccgtgtcaacggtatgtttctctagagaatcaacactgtgagcactgtaattcttgcacatccaaggatggcaggaaatggaaccattgctttctctgtaaaaagtgtgtaaagccttcctggatccactgtagcatctgcaatcactgtgctgttccagatcattcttgtgagggccccaaacatggctgctttatttgtggtgaactggatcataaacgcagtacttgtcctaacattgctacatctaagagagctaacaagtcagtcgaatactttactagaaaaatgtattccatctgtgttttatacaggataatccacaaaagcatgcaacattcagaggatcttgaagtgccaagttaattgtcactttcactattaagtactggctgcatagatggatggagggaggagaggaagatgattcaaagagcttgctttcaaagagcttacagttctacagcttagagatgaaaataaccaaaatatgaggtagaaagtggttaattttacctctccttggctttacgtctcatgtgtaaagttatagggggtgacagttcatgctttattgaaggacatgatatttacgtcaggctttgagggacagatcagatatagacacatgatggcaggaaaggctggagaaggcatttcagattgaatagcaagtaattccacagtaggaaaattgtgagaaagctatttctttgtatcaaattttaagaaaaatatttagacatgcttaatgcttaaatatttgaaatttttattactttttttcctgtgattattttcacatctctcaccaatatttgattggagctatggattacaactcagagtatggggatacctattccagaatcagtgcctcttctaaataagctattgtcataggtcgacgc

SEQ ID NO: 40090 - DNA, 367 bp, Homo sapiens
atgaaaaatatttcagtggccagaatcctttcaatgacttaaaaagcccttttcatcctgcttctgcctacctctccagctgcatcttagtacccgcacactcttttttcatactcatgcccctgcttgctgtctttgcacaggtattctctttgtctggagctttcttcctcaccaatcatctcctaataactcccattttatcttttaaatgttgccactattatcacttccttggaggagccttcttggactgcctatttcaaatcccctgggttttttttttttctttgacaaaagccacattcgaacaaatcccccttggaatgttacaattaccaaaaaatccaatttaaactagtttaaa

SEQ ID NO: 40091 - DNA, 439 bp, Homo sapiens
gaaatcattgtcttacttgaaagttttctacttaagattccacaattaaaagaacaatgtttcctttaaggaatagtgctgcgggggcaggggcagaatttcttaaagcattttggggagtggtttaactaaataacctacatatagtagtgcacaagtttccaacttattaatagttgctttccagtgagtttttagctcctacattttttttggaagtaaatgtgatgtaattaaattaaatattctagcaactaacaacaaaaggctttttcaacagataataataaattgaactcggaaactgtaaaaagaatgaaggagaactaatagaaattgatatggaaaggtgtctaagacaaagtgaagtaaaaatatttgtataaaactatggacattggccaggcatcttggctcatgcctgtaatcacagcatttt

SEQ ID NO: 40092 - DNA, 495 bp, Homo sapiens
agattcattcattcatttgatacttattaaaaacatactttgagccaaactttatgtagagtgacatagattcagaagaacaaaaagctcatattttcccttgcaaaactactccagtaaggaagattatgatcaaaaaagaaattattatagaatgacatgccttggcttagcatttgttttcaaaaaggctttctagaacagttgcctttaaattgagacatggagtatgcatagaaattaatgaagccagaagttggtggaaatgtgatccaggcaatccagttctttgagctgcctatcacatgaaatacttttgtattccttcaccagagagctaaatatgtccttcagtagcatatctgtccccttactaaagtgcacaactctaggtatgtactaaccagagcagagtggagcaggtctcatcacctgtcctcctcattatgtactttatatggcttttaatatgaagaagagcctgggcaacatggc

SEQ ID NO: 40093 - DNA, 1023 bp, Homo sapiens
agagctctgtcatcttctgacagaggagcagcagcagagatggtaacatgtttcagattgggaaaatgaggtacgttagtgttcgcgattttaaaggcaaagtgctaattgatattagagaatattggatggatcctgaaggtgaaatgaaaccaggaagaaaaggtatttctttaaatccagaacaatggagccagctgaaggaacagatttctgacattgatgatgcagtaagaaaactgtaaaattcgagccatataaataaaacctgtactgttctagttgttttaatctgtctttttacattggcttttgttttctaaatgttctccaagctattgtatgtttggattgcagaagaatttgtaagatgaatacttttttttaatgtgcattattaaaaatattgagtgaagctaattgtcaactttattaaggattactttgtctgcccaccacctagtgtaaaataaaatcaagtaatacaatcttaactgttgtggccttttttgatcataagagttggtactgtttaaggccaaaagtaacagtttttatagatcttttagtttcaactcagcttttacaataaaaaggatttgtattgcattgagtttataaacttttggtttgtgaacttcatatttgatcttttctcttccaatcaaatgtctaggcttgtttgacttccacccccaatggtttttcactctttttatttacttcatttcctttaataacttaatctcctcatgttcagttttacttcactctttattctttctgatatggatgctattggaagtccgtggactgtcaaaggtgtcttctagtctttttggactccatcccgatcttggtcatatttgcgtcctgtaccctgtggtggacggcgcgtggtccttgcgtggttggcgccggaaatggcttggtggcggggcctaatgcagaggggcatggccgtttggggaaaaagggcgcttcttgggggtttgtgttcgcgccgccttttgcgggggggta

SEQ ID NO: 40094 - DNA, 316 bp, Homo sapiens
aaatcactagtattcctatacatcaacaacagccatgccaagaaccaaatcagaaagcaatctcattcacaattgctaccaaaataataaaatgcctaggaatgcagctaatcaatgaggtgcaagatctctacaaggagaactacaaaccactgctcaaagaaattaggaaagacacaaacaaatggaaaagcatctgatgctcaaggatagaaagaatcaatatcactgtaatggctatactgcccaaagcaatttacagatccaatgctcctcctctcaaactgcctatcattgaaattattcatagaactag

SEQ ID NO: 40095 - DNA, 374 bp, Homo sapiens
ttcctatcaaaatcctaaattttgtttaacagaaatgggaaaaatttattctcacattcatatggaatctcaaaggacatgaaataaccaaaacaaattttaaaaagaaagtcggaggtctcactacctgatttcaaaacctcctacaaagcataaagctagacatagagattcatgaaaatagacccgagggcccacaaataaacccttgcatatattttcaagtgattttcaccaaaggtgccaagaagtaccaaagatcctcattcagtaaagaaaggactcttcaacaaacggtattgggaaaattggatatccacaccagaaaagaacaaagttggatccttaccatacaccatatacaaaaagtaact

SEQ ID NO: 40096 - DNA, 256 bp, Homo sapiens
tattccctgttttggctcacgatatcttccattaactcttacatccctgctgtgagctcctgttttatataacagtaacttcattgagttccttttttcttaaagtttattggcagtatgttctgacacagcatccattgctatatgacaacttttattctctgaaaagagttcttcacctgccatttctttttcccatttcttagttttgtttggtttttaaatactatctttacatagatctaatgctgttttt

SEQ ID NO: 40097 - DNA, 363 bp, Homo sapiens
gagccgggtggacactgggtgcctgcgatacgcaagaccctgggacagacctgatcccccgccagcccactttatacctaggttccttccaaggccgttctcaatgggtcctacaagtcattatgtgtacctggaatttgaacacgagaaacaagctactttggtcctctagggcaggaggaggatggccctgaacgtccttacctttagctctgtgatcttcctccttggggcacttccctccttcccaccatttgcgcttcaggatctccaggcggttgttctcctgcagctggagaatggccagatcaaactcgtcccggaaaaccgagcctgcgggggttacgggagagcccaggacac

SEQ ID NO: 40098 - DNA, 550 bp, Homo sapiens
agagaaaaccaggcagggcacttagtgcagccgctggtggaggcagtggttagagttcactcgctagagggtccttgtgataagagggtccttatgataagagggtccttatgataagagggtccttatcatggccattttcctttgatccagatgtctttaaatatcagaaaaataacgcttttagtcccaaccgccacatcggaatcagttcttattccttctggctacaatgtccaacataagttgaacaacataatttggacaacagaaggaagggttgtcatgctagccggagatgacttctagttaagaggtctgagcatttccacgcacaaccagttattctcaacggagggcggactctccatacgaaacaagcagagccctggcagagactgcagggcatttgtaaaactcaaacaccacgttgatctcactgccacgttctttccagttacacgcaggtctaacatgctggcataagacattgtcttaatcagaacacttttaaagcttttttttcccttttttccaattcaaaaaaaaa

SEQ ID NO: 40099 - DNA, 896 bp, Homo sapiens
cagcggcgagcgcagcgggggcggcgggccggggaccgggcagcaccgggcgcgcggagcgggcgcgccgccaacgcggtcacgtgcgcggcccctcctctcgcgccggcctcccccgcgccgcgctctccattcataaattctccgcctgctccgcggccaccgggcgccggagccagccgcgagcgccacgcagccgcccgccgccagcccgccgcccatgggccgctcgtcccggcgctgagggccctcctccccagttcagaatgcagcccacagccaccatggccacagccgccaccaccaccaccaccaccactgccacagtagccctgacgacgtcgtgggacaatgccactggacgccccacggcagagccagaccccatcctggacaactacgtgctgctggtggtggtgatgtcgctgttcgtggggggcacgctggtggtgttgtctggcgtcctgctcctctgcaagcgctgctgggacgtccaccagcgcctcaacagggccatggaggaagcggagaagaccaccaccacctacctggacaacggcacccacccagcccaagaccccgacttccggggagaggaccccgagtgccaggatgcggagaccgaacgcttcctgtccaccagctccacgggccgccgggtctccttcaatgaggcggcgctgtttgagcagagccgcaagacgcaggacaagggtcgccggtacacactgacggagggggacttccaccacctgaagaatgcccggctcacgcacctgcacctgccgcccctcaagattgtcaccatccacgagtgtgactcaggcgaggccagctcagccaccacgccccacccggccacctctcccaaggccactctggccatcttccaggtg

SEQ ID NO: 40100 - DNA, 1245 bp, Homo sapiens
ccaccagcactcagcaccggggagacctccacctcccggagtcgtgacccgggagcacgcgcccagcccctgcaccctccctggcgcgcaggcagcgggaggtctccctctacccaaccatggccgggtgggccctgccagggtgtagctgaacttcttggggtgggggtagccccccacccccgtgatggggcggacagggcgtctggagtccttctcgagccggctgcaccgccttggcgtccccattcctccgagtgcttgccctgcccagcgctgagctccagggcctggcgctaccttgcaggacaggccgcaccggctgtgtgcagttgtgatgggtacaggcgcaccctcagagggccaggcctcctcccccgccatggggatgggagatggaggtccagagagagcccccggggcccgctgggcagagccaagccgggtggaggctgcctccggctctgctacctctccatgagtcactgccccctgtgtgggctcctgctcctgcagggaagacccagcttgtctgcagtggctcctgcaggagaagtaggtctagctggagctgaccaggcttcctccccacagggccctcctccccagttcagaatgcagcccacagccaccatggccacagccgccaccaccaccaccaccaccactgccacagtagccctgacgacgtcgtgggacaatgccactggacgccccacggcagagccagaccccatcctggacaactacgtgctgctggtggtggtgatgtcgctgttcgtggggggcacgctggtggtgttgtctggcgtcctgctcctctgcaagcgctgctgggacgtccaccagcgcctcaacagggccatggaggaagcggagaagaccaccaccacctacctggacaacggcacccacccagcccaagaccccgacttccggggagaggaccccgagtgccaggatgcggagaccgaacgcttcctgtccaccagctccacgggccgccgggtctccttcaatgaggcggcgctgtttgagcagagccgcaagacgcaggacaagggtcgccggtacacactgacggagggggacttccaccacctgaagaatgcccggctcacgcacctgcacctgccgcccctcaagattgtcaccatccacgagtgtgactcaggcgaggccagctcagccaccacgccccacccggccacctctcccaaggccactctggccatcttccaggtg

SEQ ID NO: 40101 - DNA, 770 bp, Homo sapiens
ttgaaatccctacacagaaccagatcatttggagagctatacaatgatggcaaggagatcctagaaaatactgcaaagggagatgacaacacttatattaccatagtggctttgggtggggagaaatattttgtgtaaaaggcagctttcaagtgggtttggtatttattttagttacatggtatgagtaccttcaagctgagaaattaactgaataactggttacaaattggcagtatttttgtgaggccagaaagaaacaaacagaagcaaaacatttctaaagaattcacctaaaacccagactacacaagatttctataggtaaaacacttcttaaaatgaacttgtcttccaaaatacaaaactcaagaaggaacaatcttccacgcacaaatgttagcagaagaagagatagaattatcagctcaaatttccaaataaggataagatgtcaaagcaggaaatgaaaacgggataaaagaaaatatgtatatatgtttttaaaatatactttagaaaacaaagtagaattgaagacgtgaaaaaaaacattaaaaataaaaatcattgaaagggttaaacgtcagactgaacacaactgaagagagaatttgttaactggataatggatttgaagaagttacccagaatgcacgagaggagagaggaggagagcagagaggggagagaggaggagagcagagaggagagagaagatgcaagaggactgaagggctgacataaaatctactaagagggccagacag

SEQ ID NO: 40102 - DNA, 309 bp, Homo sapiens
atcagtgatagctgccctaagaagcttttttgcatgtttctcagcatttaatcattttaggacttcgctacagaacttctctaatcccatcctctttatgttcactcatgcatgtactttttatctggccgtttttttgcctcactggatcttaattttctcagtccttcattaattcgttcgacaaatatttactgagcacctacgctatgcaaaggtactgttctaggctctcagtgcacagtgttgaacaagacagaacagcttttaccctcataaaaagtttactgtagtggggagaaagacaaa

SEQ ID NO: 40103 - DNA, 793 bp, Homo sapiens
agtttggaggttcctcaaaaaacaaaataggctgggattacaggcgtgacacacacacccggcgacttcatccactgtctgtccgcttcctgtgtaaggccgaccacccagcccccaaacaacccttaaaatgagacccaaaccaaagacctaacatataagcctcaaatcagtaaacctctcctgaaacaggcagaggaactgcctgcccagaaatactcacaataggctgtgcagattgtaaagagatcaacagcttcacccacgctctgcataaactctggtactggctgtgttctccatagaaggtctcgctgtgttgcctggggctggagtgcagtggtgtgaacacaggttcactgcagccttgatctcttggggcttaagtgatttttcctggcctcaggactccttgagttagctgaggaccacaggtggcattttcaccactcagctaattttttagtttttttttgtaggagatgaggtctctaccaagctggtctctaactcctgggctcaagcgatcttcccatcttggcctcccaaagtgctgggattacacatgtgaaccactatgcttggctcaaagatttattgataataccctgcaagcacaagcgtgcaaagcaaaaatggacaaataggatcacatcaagttaaaaagctgcacagcaaaggaaacaataaacaaagtgaggaaacaaccacagaatgggagaaaatatttgcaaaccacccatctgacaagggattaattaccagaatatataaggagctcaaacaactctat

SEQ ID NO: 40104 - DNA, 273 bp, Homo sapiens
ttttttaaattgtggtagaatgtgtataacacggaatttgtgattttactctctcttcacgagatctacagtttttagctccacttgagtgagaacgtgtgacagttgtatttctgttcctagcttatttcacttaacataatgacctctagttccacccatgttgctgcaaatgacaagattcatttttttatggccaagtagtaataaattgtgtatatataccacaattttctttattcaactattaatgaatataggttgattccatat

SEQ ID NO: 40105 - DNA, 611 bp, Homo sapiens
tttttaataaaataaataagcaaattcctgtattcagttttcacaatctctctaacatagtcaaatccacaacctcatactaaagaatgtttttggaaagcacttgatgtccctctctgggctgacagtctactgactgtctaaatgagactcagaaatctgaaagcttggttttcattagctccaaactatcagttcctaaaaaggcttagaggacatggaagacaaaagtggctatcctttgctaggaattatcagaataagtacctaaattaatctctccaggattttttgttttctcttcagcatatgcccaaggtatgtatgatgtgagcagcctgaagctattctgaatgacaaggactagttttaggtaacctccaattgaattgtttttatttttcctatggagatccagagacgtttgttttcaaatggagcaaacagcactgtgatactgactttgtttattaaaaaataattgtttccaaattaatttcaactcataatgagttaaagcgattagaaataaagatagtatctccaaaaaaaaaaaaaaaatactataaggctacagtaaccatcgagatggtccgagctcggattcgtct

SEQ ID NO: 40106 - DNA, 1059 bp, Homo sapiens
ggtcgaccaggtgcctgccaccatgcccggctaatgtttgtattatttagtagagacagggttttgccatgttggccaggctggtctccaactcctgacctcaggtgattccccctgccttggccttccaaaatgccgggattacaggcgtgaccatggcgcccagcccttcctcccatttttgctacccacctgtcacttcttgacattgtgattatttatgtcatactgtttctgatctgttctgggcctgggaatcaaatagccatgtttgctaggcctttgtatgagatgctgcattttgactgaggcctcaggactcccgggtgaaaggtgggtatatacaaaagtgacattgcgtggtttgacaccttttgattccttcctgctttttctttattgcataattgatacattgcttgaatgctagattccccccatctacccccacatctcatttaacaaagaagtatagaaacatcctggggagacagtgtggagtggacctgggagtctagcatatgtgagttctagtccccgttctgccacttcctgccttctgtgatgctgggctagctacttgacatctctctcctagcttctgttctgtagaatgggggaaaacaatagttgccacccccagacaccatgttgtggagatgtgtctggcttatactcaactcagtgactgtattgtagctattagctcttagtaacagaaaattagtttttagtattatatttctaagatttgtatgtccctgcctctttaagtatttggtttgtattaataccttttggtcttgttatataatattctagctgtaaaagcatttcatcaatgaattgaggaagtctctgattttaaatactttaatcagtaaaatttcagagaaaaatctttaagacatttgattggtaagatgataatacatggcagaacacacaagcttactttttttaataggcaagaagatgtgtgaaaacagccttaaaaaaaaaaagcctaagaattccagtctttcagcctggaatatgaacaaagtttctttaataaca

SEQ ID NO: 40107 - DNA, 388 bp, Homo sapiens
attgccttcagcctgtgtgcaatttagcagcaagatatttcatatctcacagcattcactagtcctactcaattaggaactgcttgcaaatcagaacagctgatgatcataatgactcaagtggacatgtttgccctgaaaaggaaaagaaaatattgaaaagacatttcaattgtcattgaataactcagaaagggaccagggtgttgtcaggggaaatatattgtcattggccttcctgactgcggaacttccctataggttatgacaatacagctgggacacaccagaagggccaatgtgagaaataagaacttgaaactggggccgcctgtctttctgggggtggtctcctgtcccatttttagttatacccatattcccaggc

SEQ ID NO: 40108 - DNA, 380 bp, Homo sapiens
tcttttttttttttttgagatggagtctcgctctgtcaccaggctggagtgcagtggcgcgatcttggctcactgcaagctccacctcccaggttcacgccattctcctgcctcagcctcccgagtagctgggactacaggtgcccgccaccacgcccagctaattttttgtattttttagtagagacggggtttcaccgtgttagccaggtgaaagccaggtcaggaggatctcctgacctcgtgatccgcctgcctcggcctcccaaaatgctgagactacaggcgtgagccaccgcgcccggccacagtgtgatatttcaatacgtgtatgtaatgtgtaataatcaaaccagctaattagcatatccatcacctcg

SEQ ID NO: 40109 - DNA, 241 bp, Homo sapiens
tcatagcaaatcaccatttattgagtattttcttatgtcccagacactgcattgaaacccacctcatgtcatcattttcattatggctcaataggcataaatttccccttgcaaatgaggaaacagaggcccaaggaagttaagttaacatgtccaagatcaaacaactaacttcaaaactggggtccaaaagaagaacagttctctgattctgagggcaacgttctctttgctaaataac

SEQ ID NO: 40110 - DNA, 287 bp, Homo sapiens
tttttcattttgggcggggtggtttatgctctgaattaaccatgagctccactttagagaacttgaaaaaattgactttttagaatatttttggcagaatatacaaattgcttgataaactgcaaaagattgagtaatttttcaaaacacccagactgcacctgttagatcattattatttcagaaattccatattgtacattgaaaataacctcacaagtatattttctgtatttatggccaagagctggtcattggagatttatgatgctctgcaaaaaacaatg

SEQ ID NO: 40111 - DNA, 433 bp, Homo sapiens
agagggggacaacacacacctgttgggtggtgggggtgaggggagggaaagtggaggatgggtcaattggtagagcaaaccaccatggcacacatatacttatgtaacaaacgtgcacgttctgcacatgtatcctttttatttttaagaagaaataaagaaaagaaagaaaaatcctaacaccagaaaaaaaaagtgaaataaaataaaatgaacaaaagatcagaataggtatgtcttttcaaaagacacaaaaacggcacatacatgaaaaggttctcaacattatcaatcatcaggaaaatgtaaattaaaagcactatgatataccacctcatactcattcggatggctattatcaaaaaatacacacacaaacacacacacagagatagagagaaagagagagagagagcgagacatagatagagag

SEQ ID NO: 40112 - DNA, 480 bp, Homo sapiens
gatcattatttttcagaagcctgataatcttgtcagtatcattccagtttcagggtgtgtttgcccagaaaagcactcggtaacttttttacaacataagtaggttaggttgtatccttgctagaaatatgtataatgagctgtgatccatccccgctttcttagtgccagtaaacactctggttgtctagcaaaagacagctcttatctcttgttgttgttgtcatttcagtttgtcacagggactgtgctcaattggatgttattgtacgccacagtaggtcttgctattcactgtgcaataactgtactaaactttgacatgtacacttttatttttatttacttatttaagacagggttttgctctgtcatctgggctggagtgcagtggtgcaattatagctcactgcagccttgaactcctgggctcaagtgattctcctgcctcagtccacaggtagctgggagtacagacac

SEQ ID NO: 40113 - DNA, 630 bp, Homo sapiens
gtgtggcaaaagtgcccaatataagaccaacttacaaaatcaaaagcttccctttacattaaaaataaatatatgtaagacaaaataggaaaaaagagatcttatttatgatatcaacaaatctacacaatacctatacataagcttaacaaaaattttccaacagccacgtggaaaaaaaaatctaaaactagactaaaggacataaaaatgaccttattaaaagaagaggcctgccatgtacatgaataggcaaacagtttattatgaaaatataagttcttcccaaactgacctgtacttcagtgtaatacaaactgagatctcaatggattattgtgtagcttaaaattggattctgtaattcatctgaagagaaaatagggaatgataacctagaaacctttgagaaaagaatggtaccaaaagaaaatgatttggagaaagtcaccaagacaattcaatagaaaaaagagtaggtgtttcaacaaatggttctggaacaactagctgtccacatgccgaagaatgaagttggacttgtacttcaagctacatacaaaaattaattcaagatggctaaatttgtaaatataatagctaaacccatacaactcttaaaaagaaaaa

SEQ ID NO: 40114 - DNA, 455 bp, Homo sapiens
cgttgccagaactccagggcttagctcaggccctacaggtgtggtctgtctgcctgcaatgacccaggagctccctgagggcagggctgggtcttcatctccccactgtctggcatcatcctagcagggatggagctcaacacatagcccagccgaagtcccccagatgaatgagcaaaccctgagtcttggttgaggcttggttcatgcagcaggctcgtgccttggccctgggaaagctcccagatgagttgggctgggcagaggtgcagggccctcagcctctggcttaccccactctcttccactttactccactccactctcatctcctcgatccaccccacctctgctagttagcgaagctccttggagattcctcttgaattttcattaatttctattgaataattaaaaccaggaaattaatactttcatcctaaacctgaattgca

SEQ ID NO: 40115 - DNA, 1569 bp, Homo sapiens
ccacgcgtcgaaaaagggcggccgtcacgatctagaactagcttgaatccaggaagcagaggttgcggtgagccgaaaatgcaccactgcactccagcatgggcaacacagtgagactgttgtctcaaaaaaaataaatgaataggccgcgctcccgcccagggaggatgcgccgacgccccgagcgcccggccctccgcagcagcccggcagactgcctctgtcatcaggaccctccgtccacgtcccctgtgcggccagcgtcagagccatggcgatggaggagaggaagcccgagaccgaggcaacgagagcacagccgaccccttcgtcatccaccactcagagcaagcctacgcccgtgaagccaaactatgctctctaaagttcacccttgctggccacaccaaagcagtgtcctccgtgaaattcagcccgaatggagagtggctgatgacaaaaccttgaagatacgggacgtgagctcgggaaagtgtctgaaaaccctgaagggacacagtaattatgtcttttgctgtaacttcaatccccagtccagccttactgtctcaggatcctttgatgaaagtgtgaggatatgggttgtgaaaacagggaagtgccacaagactgctagctcactccgatccagtctcggccattcattttaatcgtgatggattcttgatagtttcaagtagctatgatggtctctgtcacatctgggacaccgcctcaggccagtgcctgaaaacgctcactgatgatgacaacccctggtgtctttcgtgaagctctccccgaagggtggatacatcgtggctgccacgctgggcaacactcaagctctgggactacagcaaggggaagtgcctgaagacatacactggccacaagaacgagaaatactgcatatttgctaatttctctgttactggcgggaagtggattgtgtctggctcggaggataaccttctttacatctggaaacttcagacgaaagagattgtacagaaattagaaggccacacagatgttgtgacctcaacagcttgtcacccaacagaaaacatcatcacctctgccgcgctagaaaatgacaaaacaattaaactgtggaagagtgactgttaagtccctttgctcccacatgcgatagaccgtcaggaagttgacccggattggcaagaaacatgatgtctcggaggcggtcccctgggtctgtgcctgggggtcaggaccgggcctgatttgagcctcctttttgaagatgatttggccgagtgtggaccaccggaaagttctaaaagttgctggtgacatttcttgccaattctctaacactgtctagggaagagttcctagtctgttgtgttcaaacagagtcaacaaaaatttttaattttttgttacaaaagggtgaagttcaattttaaaaataaataataaatataataaaaatctcatggaacttcaatgtaaaataattaaaatggcattttattagcagtgtatgttaaagtttcagatttgtaacatttactctgtaaataaaaatagggaataagt

SEQ ID NO: 40116 - DNA, 1215 bp, Homo sapiens
gtattgatgggaaatttgagaaaaccatatctggtcacaagctgggaatatccgatgtagcctggtcgtcagattctaacctttttgtttccgcctcagatgacaaaaccttgaagatacgggacgtgagctcgggaaagtgtctgaaaaccctgaagggacacagtaattatgtcttttgctgtaacttcaatccccagtccagccttactgtctcaggatcctttgatgaaagtgtgaggatatgggttgtgaaaacagggaagtgccacaagactgctagctcactccgatccagtctcggccattcattttaatcgtgatggattcttgatagtttcaagtagctatgatggtctctgtcacatctgggacaccgcctcaggccagtgcctgaaaacgctcactgatgatgacaacccctggtgtctttcgtgaagctctccccgaagggtggatacatcgtggctgccacgctgggcaacactcaagctctgggactacagcaaggggaagtgcctgaagacatacactggccacaagaacgagaaatactgcatatttgctaatttctctgttactggcgggaagtggattgtgtctggctcggaggataaccttctttacatctggaaacttcagacgaaagagattgtacagaaattagaaggccacacagatgttgtgacctcaacagcttgtcacccaacagaaaacatcatcacctctgccgcgctagaaaatgacaaaacaattaaactgtggaagagtgactgttaagtccctttgctcccacatgcgatagaccgtcaggaagttgacccggattggcaagaaacatgatgtctcggaggcggtcccctgggtctgtgcctgggggtcaggaccgggcctgatttgagcctcctttttgaagatgatttggccgagtgtggaccaccggaaagttctaaaagttgctggtgacatttcttgccaattctctaacactgtctagggaagagttcctagtctgttgtgttcaaacagagtcaacaaaaatttttaattttttgttacaaaagggtgaagttcaattttaaaaataaataataaatataataaaaatctcatggaacttcaatgtaaaataattaaaatggcattttattagcagtgtatgttaaagtttcagatttgtaacatttactctgtaaataaaaatagggaataagt

SEQ ID NO: 40117 - DNA, 173 bp, Homo sapiens
agtggtttccttaaaagtcagtgttggaaataagagctcggagtcgcaggaaaaacaagcactcaaacaataggtttctcagcaaagcaagtttacttctacagaaggctgccgctcatgcttctggccgctgcgagcacaactaacaaaggagaggagtttttatccctaac

SEQ ID NO: 40118 - DNA, 415 bp, Homo sapiens
aaatttctttaaaatatttaacatttttagatatcacacagcaatatgatgggtttaaacctattaataattatgccaacaaatacattaaatgtaaatggaaaaacagttctatcaaaacataaaaattgtcagataagattttaaaacaacattaggggccgggcacaatggttcacgcctataatcccagcactttgggaggccaaggtgagtggatcacgaggtcaagagttcaagaccagcctggccaagatagtgaaactcagtctctactagaaatacaaaaaaattacccgggcgtggtggcgggtgcctgtaatcccagctactcaggaggccgaggcaggagaattacatgaacctgtgcggcagaggttgcagtgagccaagatcgcgccactgcactccagcc

SEQ ID NO: 40119 - DNA, 149 bp, Homo sapiens
ctcagtgtctcatcttgttctttcagactgactctggagatggctgagctaataatgtgtgatcctatttattggggagatttctcaggtccttcttcctcttcttttgcctgctgccttggacataccaggttggacaccagtcctat

SEQ ID NO: 40120 - DNA, 285 bp, Homo sapiens
ttgtgtttttaaatagagacaggtttttgccatgttggccaggctggtcttgaactcctgatctcaagcgatccacccatctcagcctcccaaagtgctgggattacaggcgtgagccaccgtgccaggccgatgttgcagtcttgagtctgaagggagactggagacagagttccttcttctttagggacttcaatctttttctcttaaggccttcaactgatgatatatgaggcctacatacattacaaaggataatctgcttcactccttctactgatataa

SEQ ID NO: 40121 - DNA, 1686 bp, Homo sapiens
ctcagctttagattctccctgtactggaaagggatgtcgcaaggttggggacgaaacctctgagtttgcgaccgtagctgtcgctttccggccaacacagaggtgcctgaaggctggttggggtggtgaggcccgaggcagctcttgttcagcttctggaatttctgagcagccctcgtcagtacaagatggaccccgtagtcttgagttacatggacagtctactgcggcaatcagatgtctcactattggatccgccaagctggctcaatgaccatattattgggtttgcgtttgagtactttgccaacagtcagtttcatgactgctctgatcacgtcagtttcatcagccctgaagtcacccagttcatcaagtgcactagcaacccagcagagattgccatgttccttgaaccactggacctccccaacaagagagttgtatttttagccatcaatgataactccaaccaggcagctggaggaacccactggagtttattggtctacctccaagataaaaatagcttttttcattatgattcccatagcaggagcaactcagttcacgcaaagcaggtagcagagaaactggaggctttcttaggcagaaaaggagacaaactggcctttgtggaagagaaagcccctgcccaacaaaacagctatgactgtgggatgtacgtgatatgtaacactgaggccttgtgtcagaacttctttaggcaacagacagaatcactgctgcagctactcacccctgcatacatcacaaagaagaggggagaatggaaagatctcattgccacacttgctaaaaagtagctattgaagtatatttgcgacttttgaaggctcctctttctgcccttccccatttgttggatggctgcaatctcagtgcctgagggaagatgcctagtagaggaaagcttaatactctttttcctgaaagaatatcatcctctgcattatccccatggaacgtttcactttaaccctgactggggagcaatatgttctgtgaaaatatcttgaaattgtacaccaaaaccttacaaccaacttatttgaacatttattacacacagggtttacgtaagacttttcttattggtatataattaatttcctttggtctcccttatccacattggcttattctggaggaaaagcagtgatcgtctgctttcctggggaccctgctgtcctctccctaagtgcttctgctttcagccggtggagagtctgatgtgcctagagaagttgcgcagtgggacgaggctgcagcgagagcctggcctttccccaggcggaagagagccttgtctcagatcctgagagagaagtgagtgggggcatggcattccgagcagcccaggtttggctttgggccaggcactgagtggcaaacaagaaggaacacattccgggaaggcaaggagccctgccagcacgaaggcagcagcgaaagcagggctctgctgggtaccaggtgttccttggctctgtggaggtcaggcacgcaggcggatgaactcaggtttctctagaatatcatttcagaggcttaaatgcctcccaccctctcgctgtcagcggacagggcatgtggaactgttaaacgttaaaactctctgctctggggcccagcccgtgctctctaaataaaggtaggagcgga

SEQ ID NO: 40122 - DNA, 1543 bp, Homo sapiens
ctcagctttagattctccctgtactggaaagggatgtcgcaaggttggggacgaaacctctgagtttgcgaccgtagctgtcgctttccggccaacacagaggtgcctgaaggctggttggggtggtgaggcccgaggcagctcttgttcagcttctggaatttctgagcagccctcgtcagtacaagatggaccccgtagtcttgagttacatggacagtctactgcggcaatcagatgtctcactattggatccgccaagctggctcaatgaccatattattgggtttgcgtttgagtactttgccaacagtcagtttcatgactgctctgatcacgtcagtttcatcagccctgaagtcacccagttcatcaagtgcactagcaacccagcagagattgccatgttccttgaaccactggacctccccaacaagagagttgtatttttagccatcaatgataactccaaccaggcagctggaggaacccactggagtttattggtctacctccaagataaaaatagcttttttcattatgattcccatagcaggagcaactcagttcacgcaaagcaggtagcagagaaactggaggctttcttaggcagaaaaggagacaaactggcctttgtggaagagaaagcccctgcccaacaaaacagctatgactgtgggatgtacgtgatatgtaacactgaggccttgtgtcagaacttctttaggcaacagacagaatcactgctgcagctactcacccctgcatacatcacaaagaagaggggagaatggaaagatctcattgccacacttgctaaaaagtagctattgaagtatatttgcgacttttgaaggctcctctttctgcccttccccatttgttggatggctgcaatctcagtgcctgagggaagatgcctagtagaggaaagcttaatactctttttcctgaaagaatatcatcctctgcattatccccatggaacgtttcactttaaccctgactggggagcaatatgttctgtgaaaatatcttgaaattgtacaccaaaaccttacaaccaacttatttgaacatttattacacacagggtttacgtaagacttttcttattggtatataattaatttcctttggtctcccttatccacattggcttattctggaggaaaagcagtgatctgtaaaacaaatcaagaatatattaaatctagaggaatgcagagaagaaaactataaaacagaaccaaaaacttgttgcacagcctacataattaagagatcaactggctggaagcagatcaaggcctaacttcattcaagacctaaatattatgagactcagttattcggttttatgtgacgtctcttccattcaccatgcacaggcttttccagctatctatataatgtttgcaaatatttgataaagatgatgttaccctatcttcctccatctgattcctggaatgcttgaagaaaggggaaatcttgagtaacctcattaaaattaatgtctggtggaaatctcagtttgctc

SEQ ID NO: 40123 - DNA, 1479 bp, Homo sapiens
ggtacggtccgccaagcccgtagatggccaacacagaggtgcctgaaggctggttggggtggtgaggcccgaggcagctcttgttcagcttctggaatttctgagcagccctcgtcagtacaagatggaccccgtagtcttgagttacatggacagtctactgcggcaatcagatgtctcactattggatccgccaagctggctcaatgaccatattattgggtttgcgtttgagtactttgccaacagtcagtttcatgactgctctgatcacgtcagtttcatcagccctgaagtcacccagttcatcaagtgcactagcaacccagcagagattgccatgttccttgaaccactggacctccccaacaagagagttgtatttttagccatcaatgataactccaaccaggcagctggaggaacccactggagtttattggtctacctccaagataaaaatagcttttttcattatgattcccatagcaggagcaactcagttcacgcaaagcaggtagcagagaaactggaggctttcttaggcagaaaaggagacaaactggcctttgtggaagagaaagcccctgcccaacaaaacagctatgactgtgggatgtacgtgatatgtaacactgaggccttgtgtcagaacttctttaggcaacagacagaatcactgctgcagctactcacccctgcatacatcacaaagaagaggggagaatggaaagatctcattgccacacttgctaaaaagtagctattgaagtatatttgcgacttttgaaggctcctctttctgcccttccccatttgttggatggctgcaatctcagtgcctgagggaagatgcctagtagaggaaagcttaatactctttttcctgaaagaatatcatcctctgcattatccccatggaacgtttcactttaaccctgactggggagcaatatgttctgtgaaaatatcttgaaattgtacaccaaaaccttacaaccaacttatttgaacatttattacacacagggtttacgtaagacttttcttattggtatataattaatttcctttggtctcccttatccacattggcttattctggaggaaaagcagtgatctgtaaaacaaatcaagaatatattaaatctagaggaatgcagagaagaaaactataaaacagaaccaaaaacttgttgcacagcctacataattaagagatcaactggctggaagcagatcaaggcctaacttcattcaagacctaaatattatgagactcagttattcggttttatgtgacgtctcttccattcaccatgcacaggcttttccagctatctatataatgtttgcaaatatttgataaagatgatgttaccctatcttcctccatctgattcctggaatgcttgaagaaaggggaaatcttgagtaacctcattaaaattaatgtctggtggaaatctcagtttgctc

SEQ ID NO: 40124 - DNA, 873 bp, Homo sapiens
gcgcgccatcttggctccggatcgtgcgtgaggcggcttcgtgggcagcgagagtcacagacaagacagcaagcaggatggagcactaccggaaagctggctctgtagagctcccagcgccttccccaatgccccagctacctcctgatacccttgagatgcgggtccgagatggcagcaaaattcgcaacctgctggggttggctctgggtcggttggagggcggcagtgctcggcatgtagtgttctcaggttctggcagggctgcaggaaaggctgtcagctgcgctgagattgtcaagcggcgggtcccaggcctgcaccagctcaccaagctacgtttccttcagactgaggacagctgggtcccagcctcacctgacacagggctagaccccctcacagtgcgccgccatgtgcctgcagtgtgggtgctgctcagccgggaccccctggaccccaatgagtgtggttaccaacccccaggagcaccccctggcctgggttccatgcccagctccagctgtggccctcgttcccgaagaagggctcgagacacccgatcgtgaagacctgctgagccagcctgttctccgggcctgaatgtctggggtgcttgtgccttttctgagaagcgttgtgactgctcaacatccccatcaaggtttgagtccacaaaagtggacctccctatcatgcttccccttccctctagcatgtgggaagggactgctgtgaagaatgacagatgtggggcctctgccaagttctgcattgctaaataagggcttcctctgccttctacctacagtgcatttgaactgccttctgaaagaggtccagggagggatttaggaaataaagtttctacct

SEQ ID NO: 40125 - DNA, 1604 bp, Homo sapiens
gcgcgccatcttggctccggatcgtgcgtgaggcggcttcggtgagagccggaaccgggcgggcagaggggcgctcgtagggttgggggacgcctgtggcttggctgcagcggccggcaagaccctggaagagaccgtggctatggaaacggccaaggctgtcttggaatgtcctgagcagccctccgagtcgagcctctgcccccgagtttctgagtgacctgggttgatatagattgaccttggtaatctctgggagaggggatccgttctgtttgggggcagcactggataagggttcttggctgtttcccggggggcctggggcgaagggccttgtccctgtccttgtagagccccaagtgaggagcgctctctattggtattagtctggggtgagggttccaggccctgttccaaggagcccaggataaggggggctaagccccagtcctggagagtttaggatgagggggcctggcactttcccaaagagctcagtgtttggggaatgtgatcctgcctcttggactccaggattggaggtgggggtgttatggcccttgtagaggaacggggtgtatggggtacagccctttcccagactgcggcaggcatggaccttgtcacgagatgctaaggacacggggacatgatcctgtttctgggaagtctggaacggggagcagggccatatcctggatggagataggggatggtggacagtgacttggggcacattgcttagcacttacctgatgcttccctgcagtgggcagcgagagtcacagacaagacagcaagcaggatggagcactaccggaaagctggctctgtagagctcccagcgccttccccaatgccccagctacctcctgatacccttgagatgcgggtccgagatggcagcaaaattcgcaacctgctggggttggctctgggtcggttggagggcggcagtgctcggcatgtagtgttctcaggttctggcagggctgcaggaaaggctgtcagctgcgctgagattgtcaagcggcgggtcccaggcctgcaccagctcaccaagctacgtttccttcagactgaggacagctgggtcccagcctcacctgacacagggctagaccccctcacagtgcgccgccatgtgcctgcagtgtgggtgctgctcagccgggaccccctggaccccaatgagtgtggttaccaacccccaggagcaccccctggcctgggttccatgcccagctccagctgtggccctcgttcccgaagaagggctcgagacacccgatcgtgaagacctgctgagccagcctgttctccgggcctgaatgtctggggtgcttgtgccttttctgagaagcgttgtgactgctcaacatccccatcaaggtttgagtccacaaaagtggacctccctatcatgcttccccttccctctagcatgtgggaagggactgctgtgaagaatgacagatgtggggcctctgccaagttctgcattgctaaataagggcttcctctgccttctacctacagtgcatttgaactgccttctgaaagaggtccagggagggatttaggaaataaagtttctacct

SEQ ID NO: 40126 - DNA, 821 bp, Homo sapiens
gcgcgccatcttggctccggatcgtgcgtgaggcggcttcgtgggcagcgagagtcacagacaagacagcaagcaggatggagcactaccggaaagctggctctgtagagctcccagcgccttccccaatgccccagctacctcctgatacccttgagatgcgggtccgagatggcatgctcggcatgtagtgttctcaggttctggcagggctgcaggaaaggctgtcagctgcgctgagattgtcaagcggcgggtcccaggcctgcaccagctcaccaagctacgtttccttcagactgaggacagctgggtcccagcctcacctgacacagggctagaccccctcacagtgcgccgccatgtgcctgcagtgtgggtgctgctcagccgggaccccctggaccccaatgagtgtggttaccaacccccaggagcaccccctggcctgggttccatgcccagctccagctgtggccctcgttcccgaagaagggctcgagacacccgatcgtgaagacctgctgagccagcctgttctccgggcctgaatgtctggggtgcttgtgccttttctgagaagcgttgtgactgctcaacatccccatcaaggtttgagtccacaaaagtggacctccctatcatgcttccccttccctctagcatgtgggaagggactgctgtgaagaatgacagatgtggggcctctgccaagttctgcattgctaaataagggcttcctctgccttctacctacagtgcatttgaactgccttctgaaagaggtccagggagggatttaggaaataaagtttctacct

SEQ ID NO: 40127 - DNA, 1077 bp, Homo sapiens
gcgcgccatcttggctccggatcgtgcgtgaggcggcttcggtgagagccggaaccgggcgggcagaggggcgctcgtagggttgggggacgcctgtggcttggctgcagcggccggcaagaccctggaagagaccgtggctatggaaacggccaaggctgtcttggaatgtcctgagcagccctccgagtcgagcctctgcccccgagtttctgagtgacctgggttgatatagattgaccttgtgggcagcgagagtcacagacaagacagcaagcaggatggagcactaccggaaagctggctctgtagagctcccagcgccttccccaatgccccagctacctcctgatacccttgagatgcgggtccgagatggcagcaaaattcgcaacctgctggggttggctctgggtcggttggagggcggcagtgctcggcatgtagtgttctcaggttctggcagggctgcaggaaaggctgtcagctgcgctgagattgtcaagcggcgggtcccaggcctgcaccagctcaccaagctacgtttccttcagactgaggacagctgggtcccagcctcacctgacacagggctagaccccctcacagtgcgccgccatgtgcctgcagtgtgggtgctgctcagccgggaccccctggaccccaatgagtgtggttaccaacccccaggagcaccccctggcctgggttccatgcccagctccagctgtggccctcgttcccgaagaagggctcgagacacccgatcgtgaagacctgctgagccagcctgttctccgggcctgaatgtctggggtgcttgtgccttttctgagaagcgttgtgactgctcaacatccccatcaaggtttgagtccacaaaagtggacctccctatcatgcttccccttccctctagcatgtgggaagggactgctgtgaagaatgacagatgtggggcctctgccaagttctgcattgctaaataagggcttcctctgccttctacctacagtgcatttgaactgccttctgaaagaggtccagggagggatttaggaaataaagtttctacct

SEQ ID NO: 40128 - DNA, 451 bp, Homo sapiens
cttctgagttcaagcgattctcccacctcagcctcccaagtagctgggactacaggcgtgccccaccacgcctggctaattttttgtattttttttagtagagatggtgtttcgccatgttggcccggctggtcttgaactcctgacctcaggtgatccacctgccttggcctcccagagtgctgggattacaggcgggagccaccgtgcccggccccagtggactgattctggtcagtgtcaaccccatttgtccctggagcttttgcagtcggtcacagggccagcccggtcctggtcaccgctggctggttaccccggctgggttgggcaggagtctgggcagggctggttgctcatctcaggtatgaaattggctgcacccccactagtgtgggggagcaggattccagggcctgcctggcgctgctacccctgtgcctccagaccc

SEQ ID NO: 40129 - DNA, 306 bp, Homo sapiens
gtgggcataagtcacctaagctgtggtctacccatgcatcaggacaccacgctcccaccatgagacggggcagctgagtacacactggtacatgaaaacagcaaggttaccaagaaagttctggtcaaaagagaaaggaaagcttctctgcccctatacacaggtctctgaaaggacatgcaggtgacggtcacgctggcccatctaggagaggctgtgtacctggggagggaggtgcagagatttctcagtgaacctctttggtggcttttgaaagcacgtgacactattaactccaaaaaaaaa

SEQ ID NO: 40130 - DNA, 1960 bp, Homo sapiens
gagaaaatggtggaataaggaatcccaaaagttcacccttctataaaagctagaaaaaaagtggcaataaccatcagaatgtgctttttcagaactctggaatgtaaccaaatacttgaagtactctgggaagcatttatttaaaaacaaaaacaaaaaaccttagtcaattcttaatgaaaaaagcaaaactgtggtgtcttaacttatctgaatcccatactccaatccccagctcagcagcagccttgaaataacaacccacattcccagtgcaggcatatgagggagcagaatggaccttatttacagaaaattctaatttgatctatctggtggctgccttgaagacatgctactagacacatgtttttatctctcctgactgagaacttgctttatactaagctgctcccaagggagcacggtctaaacattcttctctactgtctaaggcaatggataacaattgggggaaacaatagactagccaaaaaacttggaagcaaagtctagggaatgacatgctgtagggaataaggtctttgaaaaggtcctacatgttcttaagattttagaagaacattcacatgtccagggctgtgcacacactcaggaaaaatgcaggcaggccccagtctcttaactctggctggccattaggctacgcataatcaggaagtgaaggcaaaggctgagtagtaaactgcctggttgagtgttgaaggtatcctcccacccccacacacaatggacacagagccccttggctaggagtggatgatttattagttccaagtgttgaaggatatttctattcaaatattaattggccactaagctaactaagcattcagtggctacacatgacatagaatacagattttatggaagtaattcggaaaagtgaataaacaacaaataaaataacagcaataatagcaaaccatggagaggagggagaatctgattcccaggttatgatattcaaaatcttcaattttcaattagaaaattacaaagcatgcaaagaaacatcagtggcacataccaggagaaaaaaaaaagcaatcaacagtaactgtctttgagaaagtgagaaagtgaaaacgagttcattactagacaaagactttaaatcagctattgtaaatatattcaaaaagctgaaactaagtctaaagagttaagttatgagagcaatacctcaccaaatagtgaataccaataaagagatataaattataaaatgggaccaaatagaaattttggaattgaaaagtagaataactaaaagaaaaaattactagaggggcttaacagaagatttgaacagaccaaagaaagaatgagaagacttgaaacaggtaaattgagagtatccagtcagaggaacaagaaagaaaaagatgaagaaaaattaacagagcctaggagaccggaggacattaagcccatcaatacacccataaagagcgtctcagagaagagagagaaaggggtagaaccatgatttgaagaaataatggtgaaactttgcaaatttgataaaaaatatcaatctatacatacaaaaagctcaatgaactccaagtaagataaactagaatagatctgcactgagatacatcataatcaaactgttgaaaatcaaagacgaatagagaatctcaaaagcagtaagagagaagcaacttattatatagaagaaatcctcagtaaaattatcaactgatttctcatcacaaaccatggaggccaaaggcagtgtgatgacattcaaagtgctgaaaaaaaaaaaaatactgtaaaccaagaattttgtatcttgcaaaattatccttcaaaagtgaatgagaaattaagaaacctccaaataaataaaaattgagatagtttgtcactatgacacctgacctacataaaaaaaatctgaactcaataacctaaactccacctt

SEQ ID NO: 40131 - DNA, 425 bp, Homo sapiens
catgcttctccactgtctccttttcattttagcagctctgcttgatgcctttggaatgtgctttagtttctgtcaatttgattaagaggaggcaaagagaaagtaacaactagatgaaaaatgctttgtactctgtgtgacacagataggtatgggaatgttgttgagtagagtatagaggtgaacactgttgcagggaagatgtggtaagatgtggtggtgtttcaggctgaaccacagagtgcctgtgtggcgtcactgtgggtccagggtctagatctcaggtttaaataggagctggattttttaagttcatttagttattgtttcttgagaataggttcatgccaaccacttcaaagagtcatttataatctggagctgcagtgtctaatatcagagccacaagtcgcatgtagcaattt

SEQ ID NO: 40132 - DNA, 365 bp, Homo sapiens
actttctcaaaataaacctttccttcctttggggacttatatgcgagcctgatagttttaacagaaataaatgcattttagctcccttaggggatatcctccctcctctctctaccacctcaccccagatcctgaaagccatccaggggtgtccaagggagagaatacaatcatggattctcagtttctgtttctggttgggctagtaaagcaccttccttatctctcttttctgcttattagtagggacggaaactaaaaactatggcttccagctgctaaaagcccaaaacaaaacaaaacagaaaacaacaacaaaaggcagattgcacaagcttgcatgggtagcatggacagttgacata

SEQ ID NO: 40133 - DNA, 363 bp, Homo sapiens
catgctgtctcggctttaagctttgttcagaccctttccctcagtaagtcataccctgctgacttactgggccttacatgggcctgccacttgttgctgcaagagtgtttgtgcctcttccttgtataagtggggcgtggattgagcttcagggacgcagcatagagcctgtctcctcctgataacattcgtccacttgaaaggggagtctcaggctgggcgtggtggtgcacacctgtaatcctagctattggggaggctgaagcaggagaatcgcttgaacccgggaggcagaggttgtagtgagctgagatggtgccactgcactccagcctgggcaacagagcgagactccgtctccaa

SEQ ID NO: 40134 - DNA, 389 bp, Homo sapiens
gagaatgtgaccagcatattgccacagatgtaatgaataaacttctgcaatcctttgtatctttcactcaattttcaaaagtcctgagagaaagtctgtaatcggtcaggtttaaatcacatggctatcccttgactgcaccaaagagagggaaaactgaccccttcagtttccacagtgtcattggtgtaagtacattattaaactaacttatttgatgggcaaaataaataaccaacaaatctatttaaatatactaataggctgggcacggtggctcatgcctgtaatcccagcactttgggaggccgaagtgggcggatcacctgagctcaggagttcgagacaagcctggccaacatggtgaaaccctgtctctactaaaaata

SEQ ID NO: 40135 - DNA, 383 bp, Homo sapiens
aaacagacaaatagaaacaaaaacacaaaacagctccaaagagcccacgcttggttcctttggtgcctgcattcatgattcttggggccagggacctctgtgatattgcaaactcttcagcaagactgtggagcccctgaaacctcagagcagggagacaccaggctgtgctgtgcgcttgccataggaatgggctccccctcaaaggctgattcttcctgagtccaagccaagaacgtttgcttataaaaataccaaaagggggccaggcacggtggctcatgcctgtaatcccaacactttgggaggccaaggtggaaggatcgcttgagctcaggagtttgagaccagcctgagcaacatagtgatgccctgtctctata

SEQ ID NO: 40136 - DNA, 408 bp, Homo sapiens
ttttttttttgacagggtctcgctctgtcgcccaggctggagtgcagtggcatgatgttgggtcactgcaacctctgcctcctgggttcaagggattctcctgcctcagcctcctgagtagctgggattacaggtgcacaccaccatgcccagctaattttcatattttcagtagagacggggtttcaccacgttggctaggctggtcttgaactcctgacctcaggtcatcagcccgtatggtagggtttttaaagcattattgacatttaaagctggatcattttctggggtgaggccgtcctgggtactgcagggtgccgagcagcaaccctggcctccaccaactccaaaccagggggtcccccaaatcatgacaagcacaaatgtcaccaagaatccctgggg

SEQ ID NO: 40137 - DNA, 476 bp, Homo sapiens
tgaggtccagacctgcaccttgttgccttgtcatgtgactttacaaccctcggtgtcctcctggctgctgggccccagcctcctgactgttcagctcacacacgtgaacctaacacctgccttggtcccctgctccatcttctagacaactcatgctgaggaccagcccacaggaggaggcctccgagttctctcttgacgtcttcaccttgaccttttttgccaccattttagtctgtccaggcctttctgccctttctacattccctttgctttcagccagtgatgccaccccctactacactgagcaaatagaatctccctgatggcagcccttcttcctcatgtggccaagccaccaccactcctgccatccctcttcacaaccatcttttcttccttcccctgcctcatgacagcagaggaggtgccctctcctcctgtccaggcttgccccgtgctggccttgcccccat

SEQ ID NO: 40138 - DNA, 483 bp, Homo sapiens
tgaatattcatgtagcttgagaagaatatgtatgctgttgttgaaggaagattctaggaaaagtttcaatcaaaacccagtgattgatagtctttgattcagcaatatcattagtgattttctgcagaactgatctgtcaattattgatagaggtgagttgttttccctcaactataatcctagatttgtgtattttgccttgtggttttatatgtttttgcattatgtattttgatgctctgttttatgggcatagatgttaaggattattatgtcgtgtaggattgacttcttgatcattatgaaatctctctatcccttgtaatttttaaaaaatctaaaacctgatttgtctgaatgtaatataggtcttccaaatttcttttgatcagggctagaatggcatgtatttcttcatacttgtgtatttaatgtatctgtgtctttctgtttaaaatactttttaaaaatataaaaaaatt

SEQ ID NO: 40139 - DNA, 476 bp, Homo sapiens
tgctaatgaagaagttcctagaggtcagatatttcattttcccacagtggatgatgggatgctcttgtatgctgcgtcccattatttgtggtagttatgttctatagtcactgtgaacactgaattagcgaataccgagtcactgcttcttaggttcctgtgagtctctggacacaacattttcattacattatgattaatacataaccttatatggtgtgtgtttctgtttaatggacaccttatttaatatatggctgattcattacattgagttcacaaccaatagcacagtagctcctgcctgcaggacggttctccagtgggcacgccacagcctctggtgcttagcaacaacagacagcactttagcaagctctacgcttcgggccatttatttttatttttattttttttaatttttttattgtggggggggtctcacgatattgcctaggatggtcttgaactcctga

SEQ ID NO: 40140 - DNA, 368 bp, Homo sapiens
attatgctgagtgaaagaagccaagcaaaataaaatagtgttctcctactgagataaatttgtattctatttatataaaattttagaaaatgcaaactcatatttagtgacagaaagaccagtgattgcctgggagtgggagaaggaaaatatggcaataagtgaaagagagagattaaaagggtcatgagaaaacttttgaggtgctggatatacttattatcttgattgtggtgatggtttcaccatgtatacatgtcaaaacttgtcaaattgtacatgttaaatatatgcagtttattgtgtgtcagttataccacactaaaactattaaaaatatttctataacttgcaaaattaaaagatac

SEQ ID NO: 40141 - DNA, 2143 bp, Homo sapiens
tgttcccaaggtccacacgtgtggaggcgagtactgaaataccacactcacacatctattccatgcgtacctagaaattaccttcaacactaaaaaaggttccttctttcattccctatcctgctaacagcccacattgtaatatttgatttatgaagaagttctaatttatttgtgaactcaggatgttgctttacagcattgctcgtgttctctcatttacttattatgcatcacggttggaaatgctatccacgtgccgtgcatcgaggtggagatttgctggatctgtctgtggctatttttttccatgtttttctcactcaagcaaagtctgttagtggaaacatgggctgggggatggggagaggacagataaagcaagagaatagggattagggtccaatcctcaatgcacagggcttagttcaaaatctaagctgtttctgtagtaagcagccaaatgggaaagatcccttcgttttgaatttgatgagaatgggcttggaaatccacgcccaccggcttgcacggaagaggactcagcctcttcctaatggttcaacattcaattcctgaggaaagtgctgatagtattagttccctacatttccctaagactcccatccaacccctagtgctactgaagagggtttgggaaagcaattggagttccttagcttggatatatatagtacctgtttttttcctctggaaaaaccaaagtactttagtgagtcttacaatcttaaggcattttgtcccctcactgggtcccgagaggcagggaggggctaggccttgagctaggagcaaggacatgggccgccaggcctggttgttactagctgtgcaaccttgggcgagcctcttcgctttgctgggcctcaggttcccgagtggaagactgggggtcagaacagctgcccttctgggagagcatcaagagaaagtggtataagtgatgggaagtgctttgaagaaattaaaggtctgtctaggagctgggggtaatcatttacagatgaagaaactgaagtctagtcattgactggcccgagttcacagagtggttttatagcaaaacagggacttgagtccagcttattggattcttcccatcagatcatattgcaccaggtatgtgtagacatgaacacataccattcctctaaggtgtgtgtacatacacggatgtgtgtgtacaggaggtacctgacatggtgaaaggccataggacagaaaacctgagttctaattccagctttgccagtcgtcccgtccgtgatatattccataggacagaaaacctgagttctaattccagctttgccagtcatcctgtccgtgatatattccataggacagaaaacctgagttctaattccagctttgccagtcgtcccgtccgtgatatattacctaactcctccagaactcagttttctaacctataaaatgaagacattgtgctagatgatctttgtggttccttcaagctctggatctctaattccatgattagtaatgtatgtatgtgtatataaatatgcttatctgtagaaatgggcccatttgaaaagtggagacaaggtctgcccaggtgcatttattgtgccagaaacagtgaattcctaaataagttcataaaatcttgttttacaattcaatggtagtgcttaatgttactgtctgaaatccactgtttaaccagatggaagactggggccattcaaaacattattagttcacaagtgtttgctgttaaaatgcttcaataaaactcatttgttaaagtcagaaattcaactcttctgtacttgggcaggtcccagcagccccttggcaggctagttttgtgcatgggcctttgcaagctatataaacgttaggtgttggcttgattatgataaatatgagcaggctccctggagaacagtccagaaaaaaagagttatagttctcacaaactggtgacatgaatccattaagctgtgtggcattttccagtgtaaagacattgtttgctggctacgatctctgactttttgtggcatatgaggtgtaaaatgttgtcaaaaaagaatctggtgtttaaaaaaaaatcaaactatggtggcattaaatgttcacttttattcta

SEQ ID NO: 40142 - DNA, 213 bp, Homo sapiens
gcttgaggcaggatggctcctcatcgcccccctcccacagcacgcacaccctccggagatgggatgggccacccttgtccgtccccgcaggccagtcccctgctgtctgctgcttggatctgacccctgcataaatacgcaagcatgtgtccctgctgtggtccgggggtccctgtgggggggtccctgagactcttccgggagtcatgcaag

SEQ ID NO: 40143 - DNA, 695 bp, Homo sapiens
tttcagacaaaggtcttggatggatgctaaaacttttgggcaaaagacaactagggaagcctgctcttatttacacaagctcaaatggtcatccccttgatggttaattacaaagggaaaaatctggcccgcgcggtggctcacgcttgtattaccagcactttgggaggccgaggcgggcggatcacctgaggtcaggagttcgagaccagcctggccaacatggtgaaacctggtctctactaaaaatacaaaaattaaccgggcgtggtggcggacgcctctaatccaagctaccagggaggctgaggcagaaaaatcgctggaacccgggaggcggaggctgcagtgagacgagattgtgccactgcactccagcctgggcaacagagtgagaccccgtctcaaaaaaaaaaaaaaaaaaaaaaaaagagaaaaagctacctttataatggagaaatctggtagtcacactcctctagccaagcacaacaatgaacaccacttcaccatcacaactaatgagacgactgacattcggtaccccttggcatgatgcacagagaaggccacaactcacctatgtagtattcctgccaaaaatgtttaatccgtatcagttcataaggaaacaataaggaatatccaaattgaagggcattctgtgaaacaagtagcgtggattcttcggaaat

SEQ ID NO: 40144 - DNA, 322 bp, Homo sapiens
aagatcttcccgatctttatttcattggttccattcatctatttcttcaatttatttttgtttgtttcattgttgtaaatcatggtccatttttgtaggtccagcaaatctgtgtgtgtgtgttcacacgtgcatacacgtacatgtgctatgcctgaatttccttacttttataattttgtttattggagatgggtgctatttttgttcaagttcaaaatctgtctgcaaaacttaaataacatcatactttatctcttcacacacacacacacacacaaacatctaggatgttaactaatactgtatttatgataattgg

SEQ ID NO: 40145 - DNA, 395 bp, Homo sapiens
cctaggcagaggaccctgcggccttccgcagtgtttgtgtccctgggtacttgagagatggggtttcaccatgttgaccaggctggtctcaaactcctgacctcaagtgatttgctggacttggcctcccaaagtgctgggattacatgtgtgagccactgcgcctgaaccttcctgttactcttcaccatagtttcctgctcttttccatgatggtcctgcccatggtttctaatgattgattgatcttcttgtttaaagttgttgtcctctttactctgtaaactccctgtcaatagaaactacatgtcttatcacgataggtaaaaaacatgtactccgatgtcagatggcctggatttgaatcccggctctgttacttataagtcatggaa

SEQ ID NO: 40146 - DNA, 323 bp, Homo sapiens
ttgtccttacagtaattattttgatcttttaagttagtttctcctctgaaataaatatgctatacctacctcacagggtggttgtgaggattaagtagattgatggatgtggagcacttagattagtgcctgaaacattgaaagggctcaagaattgtagttctgttgtattacttaatgtcataatagtaaacaaatttactcatctttggttacttggccagtttattttggaaagtcttagagactagctttaggaaaatctgtctaaatgcatttcattttagacaagtagggagtttttatccattgataatagtcta

SEQ ID NO: 40147 - DNA, 1428 bp, Homo sapiens
atagataactggagcatgctctaaggaaatggcaacgttcctagctctcttcatcttcagtgtcaccaaagctaggtgctgttctacagtttaactcttgatgctaatggcttggaaagaaagagagtgaacacaacaggtttccagggggaggctcggagttcttactcagtattggtgggactgtacttgttttaggatgatgcatcatagcctaatctaatttactgagcatctactaagtgccaagcacagttgtagctctaacagggccagctttgctgtttctagttctgcttaggctactaacccaccatgtggtctcgacagactatgctgagctaaagtatcccatttctttttctgtgtaaaataagagggcttggataaatgttctctcaggttcttccagctcaaacacaatattatttattccttatatattctgaatatgtatactttaaaactttagctgctccacttgaaaatctaagtttttattgtcctcctcaaaggactccttgcttcattatctaatgtttttccctttgaagagagtatttcattcctaagaggggtttaaaagaagattcacctggtctgaacctgatattctccaaatgacaattctctaacctaaatttaaaaacacaagcaaaaaaggactgagaagctgagatgaggaagctctgttgggcaagtcaaaatggggccaataatatttacttcacagggttattaaaagagataacatatgtaaagcccatagttcagagcctgacgcttaacagacactcaacaagggatgttcttattctttttttcttgagaaacgagctaatcatttgaaatgtaaaattttgttcatggaattgcataagataccattctatttctacaactatttctgtagtcttaaatgccctgcattaaaagattgttgtttaatatattgtacctcttttgccatctatttgttaaatattggctgcctggtttctgattttgctgaatttgacttttttaaaaaaaacctaattgttttcttcaagaatacaagccaacattgtaaaggatgatttactctaagataatgctgaaatagatgtggtatgaaatgttgttaaatttataagataaatttgggatattcttttactggacaaactttttattaagaatatattgtttcttgaaacactaagttttgggataagttattaaaacaaatttgggagtggcttagttgggtgtttctcacttggatctctcatgagattgtaaacaagatgctagccagcgctacagtcacttgatagcttgtctacagggatttgcttccattggttcattcatgttcaggccagttgcccttcaattctcttccacgatcagactctgtccctggtgatatctactccgagtata

SEQ ID NO: 40148 - DNA, 331 bp, Homo sapiens
gagatattacagtatcagactcttgctgtgtaccaacaaagaacaagagataggtcagaacgctgtttaaataaattgcttgattgtactcttttaagcaggagtttatagtggtaacatcaaagtgcttaaaaaaattcaaaacaaaagcctttttcagtttcaaggaaaaccttaacaaggtgtgttaaaaagataaggtttttagaggttgggtgaggtggctcacacctttagtcccagcactttgggaggccaaggcaggtggatcacttgaggtcaggagttcaagaccagcctgaccaacatggtaaaaccctgtctctactta

SEQ ID NO: 40149 - DNA, 1492 bp, Homo sapiens
cccagaagtctttgggaggcggccccacgcctcaggcgactggttgttaccgaggaagatggcggcgccagacccgaggcgctagggaagatcgcaccgcggacgcccgctgagcttggcgcacgggccgaccaggagctggtgactgccctcatgtgtgatttgcggcggccagcggcaggtgggatgatggacttggcctacgtctgtgagtgggagaaatggtccaagagcacccactgcccatcggtgcccctggcctgcgcctggtcctgccgaaatctcatcgccttcaccatggacctgcgcagcgatgaccaggacctgacccgcatgatccacatcctggacacggagcacccctgggacctgcactcgatcccctcagagcaccacgaggccatcacctgcctggagtgggaccagtcaggctcccggctcctgtcagcagatgccgacgggcagatcaagtgctggagcatggcggaccacctggctaatagctgggagagctcagtgggcagcctagtggagggggaccccattgtggccctgtcctggctgcacaatggtgtgaaactggccctgcacgtggagaagtcgggcgcctccagcttcggggagaagttctcccgagtcaagttctcaccgtcgctcacgctgttcggcggcaagcccatggagggctggatcgcggtgacggtcagcggcctggtcaccgtgtccctgctgaagcccagcgggcaggtgctgacgtccaccgagagcctgtgccggctgcgcggcgcgtggcctggccgacatcgccttcaccggcggcggcaacatcgtggtggccacggcggacggcagcagcgcgtcgcccgtgcagttctacaaggtgtgcgtgagcgtggtgagcgagaagtgccgtatcgacacggagatcctgccctccctgttcatgcgctgcaccaccgacctcaaccgcaaggacaagttccccgccatcacccacctcaagttcctggcccgggacatgtcggagcaggtgcttttgtgcgcgtccagccagaccagcagcatcgtggagtgctggtccctgcgcaaggagggactccccgtgaacaacatcttccagcagatctcccccgtggttggcgacaaacagcccacaattctcaaatggcggatcctatcggccaccaacgatctggaccgtgtgtcggccgtggcgctgcccaagctgcccatctcgctcaccaacaccgacctcaaggtggccagcgacacacagttctaccctggcctcgggctggccctggcttccacgacggagcgtccacatcgtgcccggtctcactgcagacatgggcgcttctaaagtcgcggccgaggctgggttagcgggctgaagcccgcggggccgcgtcctaaggttggtttgggcgtttggcgggggtggccggtagtggtggcctccctggcccggggggggggcctcccggggggc

SEQ ID NO: 40150 - DNA, 1624 bp, Homo sapiens
gacgtcactggccctggtggggattgacagccacgggaagctgagcgtgctccgcctctcaccttccatgggccacccgctggaggtggggctggcgctgcggcacctgctcttcctgctggagtactgcatggtgaccggctacgactggtgggacatcctgctgcacgtgcagcccagtatggtacagagcctggtggagaagctgcacgaggagtacacgcgccagaccgctgccctgcagcaggtcctctccacccggatcctggccatgaaggcctcgctctgcaagctgtcgccctgcacggtgacccgcgtgtgcgactaccacaccaagctcttcctcatcgccatcagctccaccctgaagtcgctgctgcgcccccactttctcaacacgcctgacaagagccccggcgaccggctgaccgagatctgcaccaagatcaccgacgtcgacattgacaaggtcatgatcaacctcaagacggaggaatttgtgctggacatgaacacactgcaggcgctgcagcagctcttgcagtgggtgggcgacttcgtgctgtacctgctggccagcctacccaaccagggttccctgctgaggccgggccacagctttctgcgggacggcacctcgctgggcatgcttcgggaattgatggtggtcatccgcatctggggccttctgaagcccagctgcctgcccgtgtatacggccacctcggatacccaggacagcatgtccctgctcttccgcctgctcaccaagctctggatctgctgtcgcgatgagggcccagcgagcgagccggacgaggcgctggtggatgaatgctgcctgctgcccagccagctgcttatccccagcctggactggctgccagccagcgacggcctggttagccgcctgcagcccaagcagccccttcgtctgcagtttggccgggcgcccacgctgcctggcagtgctgccaccctgcagctcgacggcctcgccagggccccaggccagcccaagatcgaccacctgcggaggctgcaccttggcgcttgccccacggaggaatgcaaggcctgcaccaggtgcggctgtgtcaccatgctcaagtcgcccaacagaaccacggcggtgaagcagtgggagcagcgctggatcaagaactgcctgtgcggtgggctctggtggcgggtgcccctcagctacccctgagcccagctgcccctcagctactcctcagctacccctcagctgcccctgagcccggctgctgcaagagccaccgctcgccctggactctcctcggcgcggttaacctcagcccgccctgcagggctgttgaaggccgtgggccggacgcctgcgtgaccagcagagcttctgaggaagcccctgcctttgtccagctgggcccgcagtccacacaccactctcccaggacccccagatccctggaccatctgcatccagaggaccgtccgtgacggccgggggtccaggcggaccttgtggtgacccggctcgggcgtctcctcggtttccttgcctcacccgcggagagcgctgaacctggacaagcagcggctgggaaggacaggtccaataaacgccctctgcgcccag

SEQ ID NO: 40151 - DNA, 1533 bp, Homo sapiens
cccagaagtctttgggaggcggccccacgcctcaggcgactggttgttaccgaggaagatggcggcgccagacccgaggcgctagggaagatcgcaccgcggacgcccgctgagcttggcgcacgggccgaccaggacctggcttcctgccctcaggtcctctccacccggatcctggccatgaaggcctcgctctgcaagctgtcgccctgcacggtgacccgcgtgtgcgactaccacaccaagctcttcctcatcgccatcagctccaccctgaagtcgctgctgcgcccccactttctcaacacgcctgacaagagccccggcgaccggctgaccgagatctgcaccaagatcaccgacgtcgacattgacaaggtcatgatcaacctcaagacggaggaatttgtgctggacatgaacacactgcaggcgctgcagcagctcttgcagtgggtgggcgacttcgtgctgtacctgctggccagcctacccaaccagggttccctgctgaggccgggccacagctttctgcgggacggcacctcgctgggcatgcttcgggaattgatggtggtcatccgcatctggggccttctgaagcccagctgcctgcccgtgtatacggccacctcggatacccaggacagcatgtccctgctcttccgcctgctcaccaagctctggatctgctgtcgcgatgagggcccagcgagcgagccggacgaggcgctggtggatgaatgctgcctgctgcccagccagctgcttatccccagcctggactggctgccagccagcgacggcctggttagccgcctgcagcccaagcagccccttcgtctgcagtttggccgggcgcccacgctgcctggcagtgctgccaccctgcagctcgacggcctcgccagggccccaggccagcccaagatcgaccacctgcggaggctgcaccttggcgcttgccccacggaggaatgcaaggcctgcaccaggtgcggctgtgtcaccatgctcaagtcgcccaacagaaccacggcggtgaagcagtgggagcagcgctggatcaagaactgcctgtgcggtgggctctggtggcgggtgcccctcagctacccctgagcccagctgcccctcagctactcctcagctacccctcagctgcccctgagcccggctgctgcaagagccaccgctcgccctggactctcctcggcgcggttaacctcagcccgccctgcagggctgttgaaggccgtgggccggacgcctgcgtgaccagcagagcttctgaggaagcccctgcctttgtccagctgggcccgcagtccacacaccactctcccaggacccccagatccctggaccatctgcatccagaggaccgtccgtgacggccgggggtccaggcggaccttgtggtgacccggctcgggcgtctcctcggtttccttgcctcacccgcggagagcgctgaacctggacaagcagcggctgggaaggacaggtccaataaacgccctctgcgcccag

SEQ ID NO: 40152 - DNA, 2003 bp, Homo sapiens
gacgtcactggccctggtggggattgacagccacgggaagctgagcgtgctccgcctctcaccttccatgggccacccgctggaggtggggctggcgctgcggcacctgctcttcctgctggagtactgcatggtgaccggctacgactggtgggacatcctgctgcacgtgcagcccagtatggtacagagcctggtggagaagctgcacgaggagtacacgcgccagaccgctgccctgcagcaggtcctctccacccggatcctggccatgaaggcctcgctctgcaagctgtcgccctgcacggtgacccgcgtgtgcgactaccacaccaagctcttcctcatcgccatcagctccaccctgaagtcgctgctgcgcccccactttctcaacacgcctgacaagagccccggcgaccggctgaccgagatctgcaccaagatcaccgacgtcgacattgacaaggtcatgatcaacctcaagacggaggaatttgtgctggacatgaacacactgcaggcgctgcagcagctcttgcagtgggtgggcgacttcgtgctgtacctgctggccagcctacccaaccagggttccctgctgaggccgggccacagctttctgcgggacggcacctcgctgggcatgcttcgggaattgatggtggtcatccgcatctggggccttctgaagcccagctgcctgcccgtgtatacggccacctcggatacccaggacagcatgtccctgctcttccgcctgctcaccaagctctggatctgctgtcgcgatgagggcccagcgagcgagccggacgaggcgctggtggatgaatgctgcctgctgcccagccagctgcttatccccagcctggactggctgccagccagcgacggcctggttagccgcctgcagcccaagcagccccttcgtctgcagtttggccgggcgcccacgctgcctggcagtgctgccaccctgcagctcgacggcctcgccagggccccaggccagcccaagatcgaccacctgcggaggctgcaccttggcgcttgccccacggaggaatgcaaggcctgcaccaggtgcggctgtgtcaccatgctcaagtcgcccaacagaaccacggcggtgaagcagtgggagcagcgctggatcaagaactgcctgtgcggtgggctctggtggcgggtgcccctcagctacccctgagcccagctgcccctcagctactcctcagctacccctcagctgcccctgagcccggctgctgcaagagccaccgctcgccctggactctcctcggcgcggttaacctcagcccgccctgcagggctgttgaaggccgtgggccggacgcctgcgtgaccagcagagcttctgaggaagcccctgcctttgtccagctgggcccgcagtccacacaccactctcccaggacccccagatccctggaccatctgcatccagaggaccgtccgtgacggccgggggtccaggcggaccttgtggtgacccggctcgggcgtctcctcggtttccttgcctcacccgcggagagcgctgaacctggacaagcagcggctgggaaggacaggtccaataaacgccctctgcgcccagaaaaaaaaaaaaaaaaaacaaaaaaaaaacacaacaacaacaacaaaaaaaaacaaaaaaaaagggagagacaaaaaaaaacacccgaggggccaaaaatcgacaaaccaataaataaaaaagggcgcccacaaaaagagcgaccacacacaaaccacagaaacaacacagcacaaaaaagaccaagcaaacaaaccacaacgacggaaacccagggcgagaacacacaaacacagagggggggacacaacagcgcaacacaccacgacaaaaaagacaagaccacacggacaaaacaaaaaaacagaagagacaagcggacacaccaagcgcaaaagccgcgcaaaacaagacgcacacgcaagagaagagaacaaac

SEQ ID NO: 40153 - DNA, 1545 bp, Homo sapiens
gacgtcactggccctggtggggattgacagccacgggaagctgagcgtgctccgcctctcaccttccatgggccacccgctggaggtggggctggcgctgcggcacctgctcttcctgctggagtactgcatggtgaccggctacgactggtgggacatcctgctgcacgtgcagcccagtatggtacagagcctggtggagaagctgcacgaggagtacacgcgccagaccgctgccctgcagcaggtcctctccacccggatcctggccatgaaggcctcgctctgcaagctgtcgccctgcacggtgacccgcgtgtgcgactaccacaccaagctcttcctcatcgccatcagctccaccctgaagtcgctgctgcgcccccactttctcaacacgcctgacaagagccccggcgaccggctgaccgagatctgcaccaagatcaccgacgtcgacattgacaaggtcatgatcaacctcaagacggaggaatttgtgctggacatgaacacactgcaggcgctgcagcagctcttgcagtgggtgggcgacttcgtgctgtacctgctggccagcctacccaaccagggttccctgctgaggccgggccacagctttctgcgggacggcacctcgctgggcatgcttcgggaattgatggtggtcatccgcatctggggccttctgaagcccagctgcctgcccgtgtatacggccacctcggatacccaggacagcatgtccctgctcttccgcgcctgctgcccagccagctgcttatccccagcctggactggctgccagccagcgacggcctggttagccgcctgcagcccaagcagccccttcgtctgcagtttggccgggcgcccacgctgcctggcagtgctgccaccctgcagctcgacggcctcgccagggccccaggccagcccaagatcgaccacctgcggaggctgcaccttggcgcttgccccacggaggaatgcaaggcctgcaccaggtgcggctgtgtcaccatgctcaagtcgcccaacagaaccacggcggtgaagcagtgggagcagcgctggatcaagaactgcctgtgcggtgggctctggtggcgggtgcccctcagctacccctgagcccagctgcccctcagctactcctcagctacccctcagctgcccctgagcccggctgctgcaagagccaccgctcgccctggactctcctcggcgcggttaacctcagcccgccctgcagggctgttgaaggccgtgggccggacgcctgcgtgaccagcagagcttctgaggaagcccctgcctttgtccagctgggcccgcagtccacacaccactctcccaggacccccagatccctggaccatctgcatccagaggaccgtccgtgacggccgggggtccaggcggaccttgtggtgacccggctcgggcgtctcctcggtttccttgcctcacccgcggagagcgctgaacctggacaagcagcggctgggaaggacaggtccaataaacgccctctgcgcccag

SEQ ID NO: 40154 - DNA, 1284 bp, Homo sapiens
cccagaagtctttgggaggcggccccacgcctcaggcgactggttgttaccgaggaagatggcggcgccagacccgaggcgctagggaagatcgcaccgcggacgcccgctgagcttggcgcacgggccgaccaggagctggtgactgccctcatgtgtgatttgcggcggccagcggcaggtgggatgatggacttggcctacgtctgtgagtgggagaaatggtccaagagcacccactgcccatcggtgcccctggcctgcgcctggtcctgccgaaatctcatcgccttcaccatggacctgcgcagcgatgaccaggacctgacccgcatgatccacatcctggacacggagcacccctgggacctgcactcgatcccctcagagcaccacgaggccatcacctgcctggagtgggaccagtcaggctcccggctcctgtcagcagatgccgacgggcagatcaagtgctggagcatggcggaccacctggctaatagctgggagagctcagtgggcagcctagtggagggggaccccattgtggccctgtcctggctgcacaatggtgtgaaactggccctgcacgtggagaagtcgggcgcctccagcttcggggagaagttctcccgagtcaagttctcaccgtcgcccgtgcagttctacaaggtgtgcgtgagcgtggtgagcgagaagtgccgtatcgacacggagatcctgccctccctgttcatgcgctgcaccaccgacctcaaccgcaaggacaagttccccgccatcacccacctcaagttcctggcccgggacatgtcggagcaggtgcttttgtgcgcgtccagccagaccagcagcatcgtggagtgctggtccctgcgcaaggagggactccccgtgaacaacatcttccagcagatctcccccgtggttggcgacaaacagcccacaattctcaaatggcggatcctatcggccaccaacgatctggaccgtgtgtcggccgtggcgctgcccaagctgcccatctcgctcaccaacaccgacctcaaggtggccagcgacacacagttctaccctggcctcgggctggccctggcttccacgacggagcgtccacatcgtgcccggtctcactgcagacatgggcgcttctaaagtcgcggccgaggctgggttagcgggctgaagcccgcggggccgcgtcctaaggttggtttgggcgtttggcgggggtggccggtagtggtggcctccctggcccggggggggggcctcccggggggc

SEQ ID NO: 40155 - DNA, 878 bp, Homo sapiens
gacgtcactggccctggtggggattgacagccacgggaagctgagcgtgctccgcctctcaccttccatgggccacccgctggaggtggggctggcgctgcggcacctgctcttcctgctggagtactgcatggtgaccggctacgactggtgggacatcctgctgcacgtgcagcccagtatggtacagagcctggtggagaagctgcacgaggagtacacgcgccagaccgctgccctgcagcaggtcctctccacccggatcctggccatgaaggcctcgctctgcaagctgtcgccctgcacggtgacccgcgtgtgcgactaccacaccaagctcttcctcatcgccatcagctccaccctgaagtcgctgctgcgcccccactttctcaacacgcctgacaagagccccggcgaccggctgaccgagatctgcaccaagatcaccgacgtcgacattgacaaggtcatgatcaacctcaagacggaggaatttgtgctggacatgaacacactgcaggcgctgcagcagctcttgcagtgggtgggcgacttcgtgctgtacctgctggccagcctacccaaccagggttccctgctgaggccgggccacagctttctgcgggacggcacctcgctgggcatgcttcgggaattgatggtggtcatccgcatctggggccttctgaagcccagctgcctgcccgtgtatacggccacctcggatacccaggacagcatgtccctgctcttccgcctgctcaccaagctctggatctgctgtcgcgatgagggcccagcgagcgagccggacgaggcgctggtggatgaatgctctgggaaggacaggtccaataaacgccctctgcgcccag

SEQ ID NO: 40156 - DNA, 197 bp, Homo sapiens
tcttccgcacctgttttgccatgaggttgctgaggtgcagaggcgaagcagcttgcccagctgaccgagcgcctggtgtcagagtcgaactgctcttctcctcagctggagccttggcgggcgcctctgctccggccccttggggtgacctggcttcctgccctcaggtcctctccacccggatcctggccatgaag

SEQ ID NO: 40157 - DNA, 1004 bp, Homo sapiens
cccagaagtctttgggaggcggccccacgcctcaggcgactggttgttaccgaggaagatggcggcgccagacccgaggcgctagggaagatcgcaccgcggacgcccgctgagcttggcgcacgggccgaccaggagctggtgactgccctcatgtgtgatttgcggcggccagcggcaggtgggatgatggacttggcctacgtctgtgagtgggagaaatggtccaagagcacccactgcccatcggtgcccctggcctgcgcctggtcctgccgaaatctcatcgccttcaccatggacctgcgcagcgatgaccaggacctgacccgcatgatccacatcctggacacggagcacccctgggacctgcactcgatcccctcagagcaccacgaggccatcacctgcctggagtgggaccagtcaggctcccggctcctgtcagcagatgccgacgggcagatcaagtgctggagcatggcggaccacctggctaatagctgggagagctcagtgggcagcctagtggagggggaccccattgtggccctgtcctggctgcacaatggtgtgaaactggccctgcacgtggagaagtcgggcgcctccagcttcggggagaagttctcccgagtcaagttctcaccgtcgctcacgctgttcggcggcaagcccatggagggctggatcgcggtgacggtcagcggcctggtcaccgtgtccctgctgaagcccagcgggcaggtgctgacgtccaccgagagcctgtgccggctgcgcggcgcgtggcctggccgacatcgccttcaccggcggcggcaacatcgtggtggccacggcggacggcagcagcgcgtcgcccgtgcagttctacaaggtgtgcgtgagcgtggtgagcgagaagtgccgtatcgacaggacacagcaggccggtggatgggatggggtggccatcgtcagggtggcttctgtccaggcatctgcctctcagtgtgttgtct

SEQ ID NO: 40158 - DNA, 1447 bp, Homo sapiens
aggcactctagccgatccttcataggttctgcacgaggagtacacgcgccagaccgctgccctgcagcaggtcctctccacccggatcctggccatgaaggcctcgctctgcaagctgtcgccctgcacggtgacccgcgtgtgcgactaccacaccaagctcttcctcatcgccatcagctccaccctgaagtcgctgctgcgcccccactttctcaacacgcctgacaagagccccggcgaccggctgaccgagatctgcaccaagatcaccgacgtcgacattgacaaggtcatgatcaacctcaagacggaggaatttgtgctggacatgaacacactgcaggcgctgcagcagctcttgcagtgggtgggcgacttcgtgctgtacctgctggccagcctacccaaccagggttccctgctgaggccgggccacagctttctgcgggacggcacctcgctgggcatgcttcgggaattgatggtggtcatccgcatctggggccttctgaagcccagctgcctgcccgtgtatacggccacctcggatacccaggacagcatgtccctgctcttccgcctgctcaccaagctctggatctgctgtcgcgatgagggcccagcgagcgagccggacgaggcgctggtggatgaatgctgcctgctgcccagccagctgcttatccccagcctggactggctgccagccagcgacggcctggttagccgcctgcagcccaagcagccccttcgtctgcagtttggccgggcgcccacgctgcctggcagtgctgccaccctgcagctcgacggcctcgccagggccccaggccagcccaagatcgaccacctgcggaggctgcaccttggcgcttgccccacggaggaatgcaaggcctgcaccaggtgcggctgtgtcaccatgctcaagtcgcccaacagaaccacggcggtgaagcagtgggagcagcgctggatcaagaactgcctgtgcggtgggctctggtggcgggtgcccctcagctacccctgagcccagctgcccctcagctactcctcagctacccctcagctgcccctgagcccggctgctgcaagagccaccgctcgccctggactctcctcggcgcggttaacctcagcccgccctgcagggctgttgaaggccgtgggccggacgcctgcgtgaccagcagagcttctgaggaagcccctgcctttgtccagctgggcccgcagtccacacaccactctcccaggacccccagatccctggaccatctgcatccagaggaccgtccgtgacggccgggggtccaggcggaccttgtggtgacccggctcgggcgtctcctcggtttccttgcctcacccgcggagagcgctgaacctggacaagcagcggctgggaaggacaggtccaataaacgccctctgcgcccag

SEQ ID NO: 40159 - DNA, 1681 bp, Homo sapiens
gacgtcactggccctggtggggattgacagccacgggaagctgagcgtgctccgcctctcaccttccatgggccacccgctggaggtggggctggcgctgcggcacctgctcttcctgctggagtactgcatggtgaccggctacgactggtgggacatcctgctgcacgtgcagcccagtatggtacagagcctggtggagaagctgcacgaggagtacacgcgccagaccgctgccctgcagcaggtcctctccacccggatcctggccatgaaggcctcgctctgcaagctgtcgccctgcacggtgacccgcgtgtgcgactaccacaccaagctcttcctcatcgccatcagctccaccctgaagtcgctgctgcgcccccactttctcaacacgcctgacaagagccccggcgaccggctgaccgagatctgcaccaagatcaccgacgtcgacattgacaaggtcatgatcaacctcaagacggaggaatttgtgctggacatgaacacactgcaggcgctgcagcagctcttgcagtgggtgggcgacttcgtgctgtacctgctggccagcctacccaaccagggttccctgctgaggccgggccacagctttctgcgggacggcacctcgctgggcatgcttcgggaattgatggtggtcatccgcatctggggccttctgaagcccagctgcctgcccgtgtatacggccacctcggatacccaggacagcatgtccctgctcttccgcctgctcaccaagctctggatctgctttcctagcacaggtccatgctctgtgtgggtgcttttgggatggcagccacttccaggtcgcgatgagggcccagcgagcgagccggacgaggcgctggtggatgaatgctgcctgctgcccagccagctgcttatccccagcctggactggctgccagccagcgacggcctggttagccgcctgcagcccaagcagccccttcgtctgcagtttggccgggcgcccacgctgcctggcagtgctgccaccctgcagctcgacggcctcgccagggccccaggccagcccaagatcgaccacctgcggaggctgcaccttggcgcttgccccacggaggaatgcaaggcctgcaccaggtgcggctgtgtcaccatgctcaagtcgcccaacagaaccacggcggtgaagcagtgggagcagcgctggatcaagaactgcctgtgcggtgggctctggtggcgggtgcccctcagctacccctgagcccagctgcccctcagctactcctcagctacccctcagctgcccctgagcccggctgctgcaagagccaccgctcgccctggactctcctcggcgcggttaacctcagcccgccctgcagggctgttgaaggccgtgggccggacgcctgcgtgaccagcagagcttctgaggaagcccctgcctttgtccagctgggcccgcagtccacacaccactctcccaggacccccagatccctggaccatctgcatccagaggaccgtccgtgacggccgggggtccaggcggaccttgtggtgacccggctcgggcgtctcctcggtttccttgcctcacccgcggagagcgctgaacctggacaagcagcggctgggaaggacaggtccaataaacgccctctgcgcccag

SEQ ID NO: 40160 - DNA, 758 bp, Homo sapiens
tttttgagacagggtcttgctctgttgcccaggctggagtgtagtggcgcgatctcggctcactgcagcctctccctcccgggctcaagcgattctactgcctcagcctccctcacgttctcccctctcccgccagggccccaggccagcccaagatcgaccacctgcggaggctgcaccttggcgcttgccccacggaggaatgcaaggcctgcaccaggtgcggctgtgtcaccatgctcaagtcgcccaacagaaccacggcggtgaagcagtgggagcagcgctggatcaagaactgcctgtgcggtgggctctggtggcgggtgcccctcagctacccctgagcccagctgcccctcagctactcctcagctacccctcagctgcccctgagcccggctgctgcaagagccaccgctcgccctggactctcctcggcgcggttaacctcagcccgccctgcagggctgttgaaggccgtgggccggacgcctgcgtgaccagcagagcttctgaggaagcccctgcctttgtccagctgggcccgcagtccacacaccactctcccaggacccccagatccctggaccatctgcatccagaggaccgtccgtgacggccgggggtccaggcggaccttgtggtgacccggctcgggcgtctcctcggtttccttgcctcacccgcggagagcgctgaacctggacaagcagcggctgggaaggacaggtccaataaacgccctctgcgcccag

SEQ ID NO: 40161 - DNA, 349 bp, Homo sapiens
agtagatgagttttatggatgttgatgtttcttaagtgctcaaaacagttggactttttcctctaattattccaatgcattattttatctttgatttgttaaattaagaaacatttcagtatgttatcaactcctaattagagaggtctctattaagggccttttttgaaagtcataacatccctgtttctaaggaaaagggttgtgagctttggtttctttatgcttaaggctgttgtgaatgcagctgtggaaggggaagacagatgtctttgaaactcttcatttctctaggacccaccccacttttgtattgtagtagggcccacccctcattcttaaaatcttt

SEQ ID NO: 40162 - DNA, 414 bp, Homo sapiens
tgtttgttgtgtggcctgccctgtgcattatagggtgtttagttagcagcagcatccttggtctctgcccactagatgccagtagtgcaccccatccccagctgtgacaacaaaaatgtctgcaggcattgccaagtgtgccctggaggcaaaatagccgccccctaattgagattgagaaccgctgctgcataggagctcctgtctgggacaaatgcccaccagagaaaccagcaagtaatagaaatgtggctttggaagggaacttagaaatcatctggaatgttgtatcctggagaactcctcgccccacaccagcgccagcacccctccccaaccccctacaccacctccacctttatacttatgctttatacctgcagaactataacctaagggaaggaatgaatataa

SEQ ID NO: 40163 - DNA, 626 bp, Homo sapiens
aaactccacactttgactaggaaaagaaatgatcacttctgaggtaactgtgatgtagatgtattattgtagacatggtaaactaccttattaatcttcacctcatggtggtattgactgggcggattgtaaaatgccattgtttgctctgtctttgataaacatgaaggatcaggtgtcatctctttagtgggtgagaaagtctctggaagaccattgaagctgcctaacaccaggtatcgctgaaaggatttttaaagctagtgagcaggttgccaggttgttcaaaggtagagtgggcagggaggtggctggctatccccagggcccagatgcagatgggcaggggtccttcctgccagcctggaaccttaggtgcaccctcagtctgtttcagggtcaggcagggcctaggtttaccagcagccatgaaaccattgagtcttttcttcatgacataccagtggccagtgtcgcagtcaacacagttccattggttctttttcctatctctttaaaatttaaatttataaaattatttaaatatttttatgggcttgtctttgaataattttaacagagattatccaaaatatgtctagtccttatttgtctttgaattttag

SEQ ID NO: 40164 - DNA, 490 bp, Homo sapiens
tatgtagtcctgttgcagactcagaatatggccattctgttatcttagagccttgtaaggatggatatcttcagagagtgaacctgtaagttacaaaacttcactctttcccaggaatggcaggtgggactctggttcccactccttcccttcacacccaagctatgttcactagcattactctgtttggatccccgctgaatgatttgagaatggctctacaacatctaatcaggaactctctgtaacacagatggctcatacagggtaatcctaccaccttcgcttacttctgtgactaaggcagacatcactaatcaatcaccacactttgctatcactttaagacaaagcctcaattactttttgttgtcatgcttcaagctgcacaaccaattaatcagagttgacacatgaaataaaacctatttgttatcctccccttttaggtataatttaaaaaacaacaacagctaaagaaaaaaagtaa

SEQ ID NO: 40165 - DNA, 789 bp, Homo sapiens
aaaatatattgtaagagataagcagggagaatactaacatctgccaggaaatttttaaaaacaaagttcaaactagccccattaaatatgtcatggtcaaaactgtttggtggtgaattatttttgccttccctgctgttgccaaagccattgatgatcacaggagacctcagcgaaaggaatcaggaagcagcactctcccccacctttttttccaaacgcacatgagtttcttcgtgaattccatttgctggatctcgtctgccagctgaagatcctgtactgatctgggtagggaccagcccccacacgcagccgtctgttcctgagcagaacttggaggtgtaactacattttcatgccaacaggacaaaatgatttcgctcagaatcaggttgtgttttcaagttacctttcctgtctaatcacgtggtgcttataagactgataaccttaaagcacactcctcagtgccggcaccatagaacctagttgagctttgggggcttttcttgagtacttataaaagattccacaccttccagaggggcaggttgtacgttgttgggacatcagcggctacttggtgtctaattcaagccttcaggtgttttactagttaacaagtgtaaatttcccaggttgtaaatggtttaagaggggaaaaaagaaaggcaaattatcaaattgtctgtttaaaacatagttttgcaactgctaagttctacttaaacataaacccaaatttcttttgtcctcttcaataataaattactttcttttatataa

SEQ ID NO: 40166 - DNA, 3428 bp, Homo sapiens
attaaccttctcttagtcttcaacctaagtacttgaatgtcaagtaccctccaaccctcaatgtcccaagacttttaagagcggaaggtaccgatgagttccatcctttactagggtcaccaaggaaggcatgggtatatggaaatttttattattattccatctgaatatcattttctagagaataggagcttttgttctgaagggctgccggcttccttctgggatctagcagccagggttagatcacaggtgtcactttcaggcgagtagttagcaacggtatcgctagcaactgagccgacccctgcagccagaggtttgcagtgggtagtgtgtattccagaaagggccctgacatgtgaaaggaaggaatgtgccctaatattctacagttgttttatcgttgctactgattaggtccatggagggaagcccatccctgagacgcatgacagtgatgcgggagaagggccggcgccaggctgtcaggggcccggccttcatgttcaatgaccgcggcaccagcctcaccgccgaggaggagcgcttcctcgacgccgccgagtacggcaacatcccagtggtgcgcaagatgctggaggagtccaagacgctgaacgtcaactgcgtggactacatgggccagaacgcgctgcagctggctgtgggcaacgagcacctggaggtgaccgagctgctgctcaagaaggagaacctggcgcgcattggcgacgccctgctgctcgccatcagcaagggctacgtgcgcatcgtagaggccatcctcaaccaccctggcttcgcggccagcaagcgtctcactctgagcccctgtgagcaggagctgcaggacgacgacttctacgcttacgacgaggacggcacgcgcttctcgccggacatcacccccatcatcctggcggcgcactgccagaaatacgaagtggtgcacatgctgctgatgaagggtgccaggatcgagcggccgcacgactatttctgcaagtgcggggactgcatggagaagcagaggcacgactccttcagccactcacgctcgaggatcaatgcctacaaggggctggccagcccggcttacctctcattgtccagcgaggacccggtgcttacggccctagagctcagcaacgagctggccaagctggccaacatagagaaggagttcaagaatgactatcggaagctctccatgcaatgcaaagactttgtagtgggtgtgctggatctctgccgagactcagaagaggtagaagccattctgaatggagatctggaatcagcagagcctctggaggtacacaggcacaaagcttcattaagtcgtgtcaaacttgccattaagtatgaagtcaaaaagtttgtggctcatcccaactgccagcagcagctcttgacgatctggtatgagaacctctcaggcctaagggagcagaccatagctatcaagtgtctcgttgtgctggtcgtggccctgggccttccattcctggccattggctactggatcgcaccttgcagcaggctggggaaaattctgcgaagcccttttatgaagtttgtagcacatgcagcttctttcatcatcttcctgggtctgcttgtgttcaatgcctcagacaggttcgaaggcatcaccacgctgcccaatatcacagttactgactatcccaaacagatcttcagggtgaaaaccacccagtttacatggactgaaatgctaattatggtctgggttcttggaatgatgtggtctgaatgtaaagagctctggctggaaggacctagggaatacattttgcagttgtggaatgtgcttgactttgggatgctgtccatcttcattgctgctttcacagccagattcctagctttccttcaggcaacgaaggcacaacagtatgtggacagttacgtccaagagagtgacctcagtgaagtgacactcccaccagagatacagtatttcacttatgctagagataaatggctcccttctgaccctcagattatatctgaaggcctttatgccatagctgttgtgctcagcttctctcggattgcgtacatcctccctgcaaatgagagctttggccccctgcagatctctcttggaaggactgtaaaggacatattcaagttcatggtcctctttattatggtgttttttgcctttatgattggcatgttcatactttattcttactaccttggggctaaagttaatgctgcttttaccactgtagaagaaagtttcaagactttattttggtcaatatttgggttgtctgaagtgacttccgttgtgctcaaatatgatcacaaattcatagaaaatattggatacgttctttatggaatatacaatgtaactatggtggtcgttttactcaacatgctaattgctatgattaatagctcatatcaagaaattgaggatgacagtgatgtagaatggaagtttgctcgttcaaaactttggttatcctattttgatgatggaaaaacattacctccacctttcagtctagttcctagtccaaaatcatttgtttatttcatcatgcgaattgttaactttcccaaatgcagaaggagaaggcttcagaaggatatagaaatgggaatgggtaactcaaagtccaggttaaacctcttcactcagtctaactcaagagtttttgaatcacacagttttaacagcattctcaatcagccaacacgttatcagcagataatgaaaagacttataaagcggtatgttttgaaagcacaagtagacaaagaaaatgatgaagttaatgaaggtgaattaaaagaaatcaagcaagatatctccagccttcgttatgaacttttggaagacaagagccaagcaactgaggaattagccattctaattcataaacttagtgagaaactgaatcccagcatgctgagatgtgaatgatgcagcaacctggatttggctttgactatagcacaaatgtgggcaataatatttctaagtatgaaatacttgaaaaactatgatgtaaatttttagtattaactacctttatcatgtgaacctttaaaagttagctcttaatggttttattgttttatcacatgaaaatgcattttatttgtctgctttgacattacagtggcataccattgtgttgaaaagcccaatattactatattattgaaacttttattcattttagagtaaactccacatctttgcactacctgtttgcctccaagagactatcagttccttggggacagggaccatgtcttattcatctttgtgtctccagcatctagtacagtgcctggtatatagtaggtgctcaataaatgttgaaaccaactgaactgccaacaaaataaaaataaaaagtcttcactatgtagca

SEQ ID NO: 40167 - DNA, 3420 bp, Homo sapiens
agagagtgctcttggaatattgttgaggcagattgcatgaactgaaagctccttctaattaacctggagccaagtgaacctgaatactggatatctcatgttctaacacgggataaattcaagttagaaaaagacaaaatattgaaatgcttctctaggtccatggagggaagcccatccctgagacgcatgacagtgatgcgggagaagggccggcgccaggctgtcaggggcccggccttcatgttcaatgaccgcggcaccagcctcaccgccgaggaggagcgcttcctcgacgccgccgagtacggcaacatcccagtggtgcgcaagatgctggaggagtccaagacgctgaacgtcaactgcgtggactacatgggccagaacgcgctgcagctggctgtgggcaacgagcacctggaggtgaccgagctgctgctcaagaaggagaacctggcgcgcattggcgacgccctgctgctcgccatcagcaagggctacgtgcgcatcgtagaggccatcctcaaccaccctggcttcgcggccagcaagcgtctcactctgagcccctgtgagcaggagctgcaggacgacgacttctacgcttacgacgaggacggcacgcgcttctcgccggacatcacccccatcatcctggcggcgcactgccagaaatacgaagtggtgcacatgctgctgatgaagggtgccaggatcgagcggccgcacgactatttctgcaagtgcggggactgcatggagaagcagaggcacgactccttcagccactcacgctcgaggatcaatgcctacaaggggctggccagcccggcttacctctcattgtccagcgaggacccggtgcttacggccctagagctcagcaacgagctggccaagctggccaacatagagaaggagttcaagaatgactatcggaagctctccatgcaatgcaaagactttgtagtgggtgtgctggatctctgccgagactcagaagaggtagaagccattctgaatggagatctggaatcagcagagcctctggaggtacacaggcacaaagcttcattaagtcgtgtcaaacttgccattaagtatgaagtcaaaaagtttgtggctcatcccaactgccagcagcagctcttgacgatctggtatgagaacctctcaggcctaagggagcagaccatagctatcaagtgtctcgttgtgctggtcgtggccctgggccttccattcctggccattggctactggatcgcaccttgcagcaggctggggaaaattctgcgaagcccttttatgaagtttgtagcacatgcagcttctttcatcatcttcctgggtctgcttgtgttcaatgcctcagacaggttcgaaggcatcaccacgctgcccaatatcacagttactgactatcccaaacagatcttcagggtgaaaaccacccagtttacatggactgaaatgctaattatggtctgggttcttggaatgatgtggtctgaatgtaaagagctctggctggaaggacctagggaatacattttgcagttgtggaatgtgcttgactttgggatgctgtccatcttcattgctgctttcacagccagattcctagctttccttcaggcaacgaaggcacaacagtatgtggacagttacgtccaagagagtgacctcagtgaagtgacactcccaccagagatacagtatttcacttatgctagagataaatggctcccttctgaccctcagattatatctgaaggcctttatgccatagctgttgtgctcagcttctctcggattgcgtacatcctccctgcaaatgagagctttggccccctgcagatctctcttggaaggactgtaaaggacatattcaagttcatggtcctctttattatggtgttttttgcctttatgattggcatgttcatactttattcttactaccttggggctaaagttaatgctgcttttaccactgtagaagaaagtttcaagactttattttggtcaatatttgggttgtctgaagtgacttccgttgtgctcaaatatgatcacaaattcatagaaaatattggatacgttctttatggaatatacaatgtaactatggtggtcgttttactcaacatgctaattgctatgattaatagctcatatcaagaaattgaggatgacagtgatgtagaatggaagtttgctcgttcaaaactttggttatcctattttgatgatggaaaaacattacctccacctttcagtctagttcctagtccaaaatcatttgtttatttcatcatgcgaattgttaactttcccaaatgcagaaggagaaggcttcagaaggatatagaaatgggaatgggtaactcaaagtccaggttaaacctcttcactcagtctaactcaagagtttttgaatcacacagttttaacagcattctcaatcagccaacacgttatcagcagataatgaaaagacttataaagcggtatgttttgaaagcacaagtagacaaagaaaatgatgaagttaatgaaggtgaattaaaagaaatcaagcaagatatctccagccttcgttatgaacttttggaagacaagagccaagcaactgaggaattagccattctaattcataaacttagtgagaaactgaatcccagcatgctgagatgtgaatgatgcagcaacctggatttggctttgactatagcacaaatgtgggcaataatatttctaagtatgaaatacttgaaaaactatgatgtaaatttttagtattaactacctttatcatgtgaacctttaaaagttagctcttaatggttttattgttttatcacatgaaaatgcattttatttgtctgctttgacattacagtggcataccattgtgttgaaaagcccaatattactatattattgaaacttttattcattttagagtaaactccacatctttgcactacctgtttgcctccaagagactatcagttccttggggacagggaccatgtcttattcatctttgtgtctccagcatctagtacagtgcctggtatatagtaggtgctcaataaatgttgaaaccaactgaactgccaacaaaataaaaataaaaagtcttcactatgtagcataccttcccttgtccaagttctgaagaggtttttttttttttttttttaatagaaactgaagacattttacaaccagctatgacttggtaagacattcttagaattttaggtgtcactgataatcctagaaccactgagccccaagtgaagaatttaacaacaaaatgggttaatgaaaaatataattacattgtatatttaagtttcatagaattatttaaaacaacacattaaagatttttctaaaatatag

SEQ ID NO: 40168 - DNA, 779 bp, Homo sapiens
atacttcttacggcagtaccccataatgcttaacacagtactgaaatcagaacttctacttgggactgttcaacaccaagggcagccaaaccactgccaaatagcactttttcaaattacattctcagctgtccctctcacagtcaggtcaaagccctgcctatcttgcttgcctaagagcagtatgttattttaggcaactgtagatagtaaacaaaattgaagacttttgccaggggcatgtcacagacatttcaccagaagacaacttttgctatccattcctagagatcatagaatatgaaatgttaagtacaaaatagatttcatgggttaatatttgacctttttttgattttcttattaatcaaagaaaaatatgatagccagtcaagatagactgtcatttataataaatcgtgttgatataaataaaataaagtatcaaaaatatgactgtacttatgattcatatttaattttgcttaagattaaaatatatggccaggcatggtggctcacgcctgtaatcccagcattttgggaggccaaggtgggcagatcgcaaggtcaggagctcgaggccagcctgcccaacatggcaaaaccccatatctactaaaaatacaaaaaattagtcaggcatggtggcgggtgcctgtaatcccagctactcaggaggctgaggcaggagaatcacttgaggcggaggttgcagttagtcaagatcgcgccactgcgctccagcctgggtaacaaaagcgaaactccatctcaaa

SEQ ID NO: 40169 - DNA, 331 bp, Homo sapiens
caagaagataaagtgagactcaaggaatttcgaagtggaacaatacaccaaagccttaaacctgaaatgactctccttttctggggggtgagggggaaagaaaaagaaaaagtttctagggctctcggggtggcctggatgccagggtcccagaagtggccttttctagctcctgtaactaaacctggcggaaaactccccgcctgctcactccacccccacccgcccaagaatgcgtcttcccgtcttcggtggccctacccagaatcccaaaatgtgggttccaacccgggccctgaatgtcttctcaaatccccgggacccaggttcc

SEQ ID NO: 40170 - DNA, 433 bp, Homo sapiens
tcatcgacgcaccagaaggaagcataggcatccagaaatggtttgaaattaaaagttacatgaggccagtgagaacagagcactagtgaattttccacattttaaatggggtggtgtaccgaaaaaaataatggacaaagttagaaaactggctctgatttcctcttaaccacttgacgctctgtgatttgatgtttgccccgtaactactttgagtttctgctttttattagtaaagtatgggatttccaggtcatgttaggcattagatgagatttcatgtgtgcaaattgttttgcatacagtataatcaacaagtccttgtttaaaaaggcataagtcaattaatcaagaaagaatatgggaggccaaggcagtcagatcacctgaggtcaagaattcgagaccagcctgaccaacatggtgaaacccc

SEQ ID NO: 40171 - DNA, 531 bp, Homo sapiens
gaacacaaagcagaatctttctaaaatatttttgtttcctataataaatctttctcaaaaggatgttcttcctgtcactttttgaatgctatatttcatttttgtagtttggagactgtcttcacagaaatcattttgggtttttctgtgtactcaactttgaatgaagacaagttatttctggctacccaaagttaatattggatagatttaccaaacatttttgactgtttatcttggaggtattagaatagtacttttagatcttaagtaggagaaccagagatgcaggtttatgttagcagttgagtcactcagaatcctgaaaggcattgggggtgggatgggacaagatctgaaaaatttgcctctatagtttctctctgtgatcgttaaaaatattgtaataagggtgaccttttcctatcgggttttctatatggtagattactataagcttttcttctgtgcatacacatatattatgtatacatacattttatgaaaatgacattatagatgttattttga

SEQ ID NO: 40172 - DNA, 711 bp, Homo sapiens
ggagtgcagtggcacgattggctcactgcaacctctgcctcccaggttcaagcgattctcctgcctcagcctcctgagtacctgggactacaggcctgtgccaccacacctagctaatttttgtattcttaatagagatggggtttcaccatgttggccaggatggtcttcatgtcttgacctcgtgatccgcccacctcggcccccaaagtgttgggattataggcgtgagccactgtgcccagcctatttttctaatttttaaaaactctatcaaataacaacaatgttttgaattctcccatactgtcagtatggtatggggaaaataaaataggaatagaaaaggaaaaccaggaaaagaggtggttttcaaccaaatgaggattggacaaaaagaaaaaaagagaaagagaaagaaagaagcgtcacaaacaaatctggcattacttcgtatttaaaatcttatgaagagtaaggagaatgttgatgggtgtgaatgaaatagtgagaatcaatttaaagaatattcattaggcgccctacagtgtgcctgaaaatgtagtgtgcacagtgtataaaataagaaattgcttccttaaagtggcttatgtctggttataaaaataagatgaatgcaaaaccagctagcaatgctagctttatgtagcttcactctgagccagacatcatgtattagaaaacaaggat

SEQ ID NO: 40173 - DNA, 1589 bp, Homo sapiens
aaaaaagaaaaaaatatatataattttattttaaattggcttttatctttaattcttttttttaaagttatcaaatcttcattttctaagagtagccctttatagtgtacaaaatgatattaagtgcattattatcttcgcttttcatggctctgagtcataaaacaagctggtggatctcactgtacctaatttatagacgaggaaattgtcattcaaaaagattgactgttatgcccagggtcagcactaacctgcagaaccagtattcagtccccaagttcagtgtcttctactgccctctactaatgaaaagtgaaaatttccctggggtctaattctctcttcagtttgctgtgccgttgtttatctttgagtcttcattctctgaagatggctttctgcctgtttctggtacattagaattctcactatgatatagaaatggcttcagtttcatagcataatcttgcagttagctctgaattgcctcaaaaaccctgaacaacgcgaggttccagatgtgttttacttctttcattcatatttacccccatttgttgtttaaaaagaattatgaacaattattacatcatatgtagaccactttcactgattatatgttgacattttcctcagtaaaacataaagttcttaacaagactatactgtaacacctttctccaacaaaatcagctgtatgttgaaaactattaagtcattgctaatgttttaagccataatacagacagccttatactctatgatgggagaagggaaagtagtttgtccgatggtgctactctgtataaacattactgatgctatctatagtagggcaagaaaagtaaaaagagttttgattattcaggcagcatttttaaaaacctgtgaatttgtatcagttctcatctaaacatttggacacaagtataaaatgaaaacatatgcacaagttatggtttttaagttatctgctcttttttttggtttcactgtacctttgtactcttctattagtgggaataatcagacatgaactgtgacttcacatgtacagtcatacctcacttaatgatggagatgcactctgagaaatgtctaattaggttatttcatcgttgtgggaacatcatagagtgtacttacacaaacctagatagtgtagcctgctacacatgtaggacatgtatatagcctattgctcctaggctacagcatgttgctgttctgaatcatgtaggcaattgtaacacaatggcaagtgtctgtttattcaaacatctaaacacagaaaagatactacaacaataacaatatggtataaaagattttgtaaaaaatctggtcaggtgcagtggttcacgcctgtaatcctagcactttgggaggctgcctcagcaggtggattgcttgagcccagaagctcaagaccagcctgggcaacatggcgaaaccccgtctctgctaaaagtacaaaagctgaggttggaggatcacctgagcctggcaaggtcaaggctgcagtgagccatgatcataccactgcactccagcctgggtgacagagtgactccccatctaaaaaa

SEQ ID NO: 40174 - DNA, 356 bp, Homo sapiens
ggcctgggcattgttgggtcttgtgtgctctgtctctcatgggcagcacaagctgtccctcaggactccactcccttgcccattctcatcccccatcgcctcagcttccacacgtccgcgatgggccccccagcttctcttcaccacagctgccccaacacctgccccatcttctcctcctgtcccagttccatgttattatgggttggattgtgtccccaaaaaagctgcacctgtgaatgtgacctgtgaatgtgataaggtccttagggaagccctaatgcaatatgactgctgtcctcagaaaaaggggaaatttggatccagacatgtgcagagggtagacactgcgaaga

SEQ ID NO: 40175 - DNA, 467 bp, Homo sapiens
ctgtgtaaataaacacatcagaacataaggctctatgtgcaggggtgtttgttgcaacactgtcttatgtcacctcattacagaaaacactgaatgcatactatatcgataggggactggttggataaatactgctacatccatacaatggaatagcatatatgtattataagagtgagttaggactgggtgtgctgactcacacctgtaatcccagcactttgggaagcctaggcaacaggattgcttgaggccaggagttcaagagtaacctggggaacataataagactccatctacaaaaaagttttaaatatttaaaacttaggtgggcatcatgatgtgcacctgtaattctagctactcaagaggctgaagtggaaggattgcttgagcccaggagtttgaggctgcaaggagctatgatcacatcactgtactccagcctgggcaacagagtgaaacct

SEQ ID NO: 40176 - DNA, 356 bp, Homo sapiens
cccacaatctctaggagactcatttcagaaaacttcactttcaagattactaacagttgtctgctcatgattaggcttcaaaagaaaaatgttaaatttatttatatagaaaacagatttcatatccttattttacaaccgagttctctaacacttatgtgtctatcaaaaataaattaatgaaagcttgaaaacagttatgaattcattatactgctttcacatccacttcaaacttcctatatataaactgatataacatgggttcacttacccagctcagtctcactataaggatttttaaacaaaatcagtccagtccactgaacagtatcagcttactgcaggtacattgt

SEQ ID NO: 40177 - DNA, 880 bp, Homo sapiens
agtttaattgataagttaggcagagtaaggttaacaataaaacagaacaattgtaacaacacactgtaataaagttatgtgaatgtggtctctcaaagtgtctcactgtactgtattcatccccttttggaccacggttgactgcgggtaactgaaaccatggaaggtgaagccacggacacgggggactattggacaggcatgttaacagacacacacacagtgtgaagagcaagggggactatcggacaggcatgtcccatagtgtgaagaaacacagtgtgaagttacaaagtgaggcctcagaaccagattcggatatggcgaaagttttagagttatcagcttgggaactgaaataactgattaatatgagggtgcgaatggaaaggtggacagatgggaacagaagcgagagatatgcacactccaggagtggtacccagacatgccaaaatcaagaagaattcacaatgtacatcagaaagtattttgaacttcaagacaatgttaaaatatcaacacttttatcttgagatgttgccactacagcatttcggggagaaatctgttgctttacatgcttatattagggccgggcccgggggcacacacttgtaaccccagcactttaggaggctgaggcaggtggactggttgaggtcaggagttcaagacctgggcaacatggtaaaaccccatcttctcaaaaaaaaccccaaagttagccgagtatgttggcacatgcttgtagtcccagctactcagcagggggagctgaggtgggaggatcacttcaacccagaaggccgaggctgcagtgagccaagactgcaccactgcaatccagtataggcaacagagcaagaccgtttcaaag

SEQ ID NO: 40178 - DNA, 804 bp, Homo sapiens
acagccaaaaactgttatccaatgactattctgtgtaagataatcatttcacatgtttaattcttatgtttccttctgtgaagcatgtaggaagtttgggatatgatttcagtatttgatttagataaaaatttgtgcaggtctaagcttgaagatccacactactacagcacagacctctgcagcacagggccttggatagagtggagtaggcattcatgataagtttaactgaatagtattattttgtatactgatacttaaagaaaagaaatggcacctctcatttaatggtttctctagaagttttcacaatatacttattttccctttattccaatacatatttattaggctagaattcaaagctcaactgaaaactgctcaggcaattgaaataagtttttattgatagtgacctctgattggtgaggattcccagttctatgtttgtgtgttgagagagagccagagtatgtgtataagctgtagcaatcaaggtagaatggttttttggccagacgtggtggctcatgcctataatcccagcactttgggagacctaggcaagtggatcacttgagcccaggagttcaagaccagcctggccaacatggtgtaacactctctacaaaaaatacaaaaattagctgggcatggtggtgcatgcctgcagccccaactacttgggaggcttgggtgggaggatctcttgagcccaggaggttgtggctgcagtgagatgtgatcatgccaactgcactccagcctgtgcaacagagtgagactctgtctcaattaaaa

SEQ ID NO: 40179 - DNA, 198 bp, Homo sapiens
cttcctagcccattggagagactcagttttttctaaggaatgaatgacagcagaaactcatccatgatgagcaaggacctcctgaaacatttcagcatgtgtgcatgtgttgtgcttcagaatattttagaaacattttccagatttaattgaggcttctgggaagccttgctgtgttcttccttgcaaaaaatagaa

SEQ ID NO: 40180 - DNA, 395 bp, Homo sapiens
cgtttttgttctagggactatgatgaggatggggtctctgaggcctgagatatctctattgccatctgacaagggagggcctttgtttttgcggactcagttgtttcagtggccccaaattaaagagcgctgaaggagagagccagttgtaacagttggtgtcactggatctgataaccctgcttagctgggctagggccctgggtctgaaatattccagcaccgcctccgtggatgcagccgagcctctcaggtctcccgctagagctttgggaaatgcctcagagtctgtggcctccaaggcagccggcttctccgaaccccactggttgggtggggtgctgtattatcttcctagagaagccgtgaccaagtctcacactgggcggcttaaa

SEQ ID NO: 40181 - DNA, 317 bp, Homo sapiens
gctccccagatcaagccccctctattaaccccaccaccccgtgttttctcattacatttagactgaaattaaaatcctgcaagatcctataggaattagcccctgactccttctctgacctcagcatcttccactctctcccagtgtcccggtttcctctgtttcaaacactgtacggtagcaataatgtgtctcttgttcatcactgcacatctacaaaatatcttcacagcaacacctagattggtatttggttggatatccctcatgttttaactgtttaataaatatttctacaaatctacaaaagagtaaaa

SEQ ID NO: 40182 - DNA, 85 bp, Homo sapiens
gcaaacaaacaaatattttttaaaatttccaagttaggacaaatagaaatccacacttagaaatatattgtgaaataatagaaca

SEQ ID NO: 40183 - DNA, 559 bp, Homo sapiens
gatattaccttcctatcatttcaaaatattaaaagaatccagattcgacatccataatcagaagctcatcgtaacatttacaagtgtgaaagttgatctgttccattttgtaattaaaagggaacaaattagaaatttcaagtcttgtattcctgaaggaagaaaacattcaaaaatgatttttccctcttggaattattttaaaatatgcatattttctcttagttttgaaaagtggcttaaaatagacttattttacccttctgcagatgcaaagtttttctgtctttctagtgattcactaattggtttactactgaattatttattccatgagtcattacattttattgttaccaagaagtgtaaatttagttagagtcagatgcttctgtagttcatgaaatcacaggcgtttttccgtagcgctgtccacttttaaaagatgagcaatgtgagtaactacacagccaatcttagcacaggtgctaagaagggctaagtcactaaaccaccttgcctccagctctgaaaccaaaaaagcctagtaaaaaaataa

SEQ ID NO: 40184 - DNA, 646 bp, Homo sapiens
ttttttggagatgaagtttcactcttgttgcccaggcagttcttcattagtatttcttacaactgaggtttaatgagaattggaaagcaaagagttgaagttagccaatttgttaaggaccaaagtgaagataatctaaaagtcggcattttaacgtactgtatagcaaaggagaacactactttcccccgaattctttcacatttcttcattgttctgcaagttgcctgttgaaggacctctagggcaccttcttctgtgcttcagggtacttagtgtctgtgaattagactaggcataggcaagttgaagtccttgaggaatgactttattcttggatgtaaatatgggattgacattttttatcacaaacactatttgtactgttaatttactatcaaatcataagcattccatagctatgagaaacctaagagaacacagtacagagtggaaagagcgaagatttgaagccagaaagtctgggattgtgtcactgctgtatgtgcagggttgtttccagccggttgatgaacctccctgaatctatttccttatttgtaaaattagaatgatgagagcacataaattcatttatggaataaatgttgagaatctactgggtactgggtagtagaaaaaaaaa

SEQ ID NO: 40185 - DNA, 237 bp, Homo sapiens
cacaagttttattccctcagcacacacttcagatcacagaaaggagacaaataaggtggaggaaggaagatgggttgatgtaactaggtcacttggtaattcaatttcagacgtaaatttttctttgtttcagaattattgatctgtggaatatttcttgattcttcttggaaattacaaattaattcaaatgattgtaaagttctctgaaaggctctacagttttcttaagagaat

SEQ ID NO: 40186 - DNA, 496 bp, Homo sapiens
ggccctctttcctcttcctggtttccttacctgccctccccttactcttgtttctcctccgccgaggcactgtgcggtatttgtaaatattgggcgaggaaagtctcggaagaagaaataacgctgataataatactttattaatatttatagtaattattataatactaataacacaatccaagcgcatgacaaatcacataatttctaactgtcaatggaggatgcatcttcccattccaccccgcgctcccctcaattaggaggagaaaccgcacaagctaccaaatatataaaaggcattgattcccggagcaaaggggaggggagggggcccgggtaatgtacatagctgttcaagttaaggtttagtttccttccttcccctctggacccctaagctttcacttttcctttaggttccctttcctccccattcccaccctcagccgggctcaggcaatagtatattataaagaaaatgtctacattaagc

SEQ ID NO: 40187 - DNA, 266 bp, Homo sapiens
gtttcgattaacaaaggacatgatatacagtcacgtgccacaaaatgatgttttggtcaatgactgactgcacatagatagtggtcccactagattataacggagctggaaatttcctatgacttagtgacgtcatagcaatagtttcagtacagtgtattattcacatgtctgtggtgatgctggtgtaaattaccttgctgccagtggaataaaagtatagcacaaacaattacatacactacataatatttgataatgataat

SEQ ID NO: 40188 - DNA, 380 bp, Homo sapiens
cctgctttgaattattttggatatatacccagaaatagaattgctgcatcatatcatattaactttttaaaacctgagaaattctgcattccaaaattcatctagcgccaagtgctttggaaatgggattgtggagctgccttatgcttgttaggcaaatgaaactaagctttaaacatttttcctttcttttaaattttaatccttaaagttagtttatttccacaattgactgtctcacagaataaagctagccttaaaatttggccgggtgcggtggctcacgcctgtaatcccagcactttgggaggccaaggcgggcggatcacttgaggtcaggagtttgagaccagcctggccaacatgttgaaatcccgtct

SEQ ID NO: 40189 - DNA, 734 bp, Homo sapiens
cctgatttaaatatcccttctattatgttcccataggatcaaatccttaacacattataactgtttgtttatttatccgtccctcactgtagactgtaagctccataaaagcagggactatatctaactcaccattgtagctccagcacctagcacaatacctagaacacactcaataagcacttatttatttgtttatttttgtgctaggaatcttgtacagaatcaataagcatttatttaaaagaatgaatcaatgaatgatacagaagtcagaagaaaggaagccaactctcctaggaaaagaacaatttgccattaaatgaattgaaagtacatgagaacaaatgctaggcaggagagtccaccttttccaaaaaagaatggcagcctgatcagaattgcttaggaatttatgaacgataaattgaatgaaacttactataaattcggctgggtttttttgtttgttttgttttgtttttgagacagagtcttgctctgttacccaggctggagtgcagtggctcaatctcagctcactgcaacctctgccacccggattcaagcgattctcctgcctcagcctcccgagtagctaggactacaagcaccccccaccatgcctggctaatttttatatttttgccatgttggccaggctggtctcgaactcctgacctcaggtgatccaccatccttggcctcccaaagtgctgggattacaggcatga

SEQ ID NO: 40190 - DNA, 461 bp, Homo sapiens
accgcccactcgctcttcttgggtttactcctaattccacgcccacctcaccttgaacttcccactttgaaatctaaagatcaaaggtgtttcttggttctcacatagaaatcccccccttgaacttccttcctatctgtttcctcagcctatcttccctctggccgtgtattattcacaaagagttctacaggatgcaaagataaaatttaatgtactttccttagcaaccggaaaaaaaaaatccctgaaaaattaaacagcagatacccaaatagaaactttgctttagaaaaatgggatttgaccacacacacgtgcacaggccacacaaaccgtcataaccttgaccagcttaagagaacaattctcaagccagtgagaaaacaacagctgtggccgggcgcagtggctcacacctgtaatcccagcactttgggaggcccaggcgggtggatcgc

SEQ ID NO: 40191 - DNA, 650 bp, Homo sapiens
ctactcaattattccatttaggaatctaaaataatcaaactcgtagaagcagaagcagagacttgaatggtgattaccaaggtttgggggagggtgaatcagagagatgttgatccaagggtacatagtttcacttatgcaaggtgaataaatcctagagatctactgtacaacatcgtgcatatagttaacaacactgtattgtgtacttaactgaatcttcatgtgggcagtcgggtacctaatgaataaatgcagaagccatgaggtctcatgggttgcccgggtcctagatattgcactgtcactcctgccacctttgaccctttatcaaaacaagttttaaaaaacagcccaaattcaaggggatggagaaattgatgccacctttctgatgtgagaaatgactatgccatattgtaaagggacatggacacggagatcattaatataatgatttgcccttccaggttatgccttataggcatttttggtacctgtatcccttctattaaatcataagttccttgaaggcagaaattagatcttatttacctttgtatttccctttgcaacgatcacagatgttgcacgctatgcaataagtgttgaatttttccggatgacaagacaagtaaaaggtaagggca

SEQ ID NO: 40192 - DNA, 321 bp, Homo sapiens
gtgctgagtaccctgatgtcaaggacgtagtagatgacatagtatcccatctttgatcatttactttatcccacattataaactcaatgtctcagaaaaacagtgctaatactatcaccatcaattaaagtaggttaaaacattttgcatattttccccattctctccatttaaaaagtagtcttactacacataactgttgagcatataattattaccttttttttttgagacagggtctcactctgtcatccagtcacccaggctggagtgcagtgacacaatcatagctcactgcagcctcaatctcccaggctgaag

SEQ ID NO: 40193 - DNA, 619 bp, Homo sapiens
gcgtcgaccaagtagctgggactacaggtgcccgcgacctcgcccggctaattttttgtatttttagtagagacggggtttcaccatgttagccaggatggtctcgatctcctgacctcgtgatcctcccgcctcagcctttcgaagtgctgggattacaggcgtgaaccaccacgcccagccatatatcaggaacttgagcatccatggagtttggtgtccaagggaggtcctggaaccaatccgccatggatactgagggatgactataatatgaaccttgtatgtatgtaatttaccattttctagttagccacattaaaaaaggaaaaagaaacaggtgaaaaatatttaaaaaatacgttaacacaatatatccagaacatgatttcacattgaaatcaatataaaaattactgaaatagtttacagtctggtgtgcattttagacttaaagcatatccctttgggcatggtagcccatgcctgtagtcctagctgcttgggaggctgaggcaggagaatctcttgaacacaggagttttaggttatggtgagctatgatcgtgccactggactccagcctggatgacagagtgagacccgactccttaaaaaa

SEQ ID NO: 40194 - DNA, 414 bp, Homo sapiens
gtttgagaccagcctggccaaaatggtgaaaccctgtctctaccaaaaaatacaaaaattagccgggtgtggtagttggcacctgtactcccagctactagtcaagaagctgaggcaggagaatcgcttgaacctgggaggcagaggttgcagtgagccaagatgacgccactgcactccagcctgggtgacagagtgagactccgcctcaaaaaaaaaaaagtgtaatacctgtttttaataacaatgccattgagggcacaaagagacaagaactctcatgtactgctggtgcggtgcaaatcagcataactattatgggaactacttgacaatatgtaggataaagattgagtacttactatatatactatttaagtttgtaaaaagtgagcacattttacttttatagtc

SEQ ID NO: 40195 - DNA, 462 bp, Homo sapiens
gcttgacatatgcttgcaaagtgcctggtcataggtggtgctcagaacagttggttcctgtgaacacataaagacccttaagccaggtgggagtcaggagggagggaaggaacaggctatgggccagatttgaccctggagctgtaagtttgctgatccctggtctagcataataaatcactgataaatttgccttaaatataaagagtcaaagccttggccagttgtggtggttcatgcctgtaatcccaggagtctgaggccagcctaggcagcattttgagactccaactatacaaaaatattttaaaatttttaaaaaattggccgagtgtggtgatgcatgcctgtagtcctatctactcagaaggttgaacccaggaggtcgaactgtgctgctgtattccagcctgggtgacagaggaagaccctgtctctaaaaaataaaataaaatatctcgg

SEQ ID NO: 40196 - DNA, 805 bp, Homo sapiens
aaaaataggtaaaaagagcctccaaacctgctttgattttattcacctattcttttaggccaggaactaatttacctctcactatcctgttccctcttgctatcttgtggagtctctaaagacaaaggtataaagagcttttggtaggtgaattaataatcaactagatggcatttccaaatgggattgcacatactgtggggcaagtcccaagtgaacttcaaagtgagacgtttatttgagtaatccttccagattaacaataatcataatagcagttaccacttcctgagtactttctatatgccatgtattgagcttgctcacttctttatgtggattcttatttaatcttaataccaagatgaggtgtagagattaataccaccattttatagagtttgaaatttgggtttatgaaaagttgagcacagaacctaaaatgttacaaaggtagtaagtgacagagtcaagatacaagcctgtgcagtcaaatttcaggggtccttgccagaaacctgttactgtgattcctccctgtccctccctctcactccactccacatccagtgaaataccaactcctttatgttcaattttctgaatagctttcaaccccagacctcctcactgccagatcatttttctttttttgagacagagtcttgctctgtcacccaggctggagtgcagtagtacaattatggctcactgcagccttgatctcctgtgcccaagtgacactcccacctcagcctcacaaggagctgggaccacaggcatgctccaccatgcctagctaatt

SEQ ID NO: 40197 - DNA, 330 bp, Homo sapiens
gatgaaccttgaggatattatgccaaaagccaaatattgtaggactcatgtacataaggaaactagaatagtcaaattcatggaagcggaaagtagaacagtgctttccaggggttacgtgaggtttaataggatattaaagttattggttaatggataaagagtttcagtttgggatgatggaaaaaagttctggaaatggatagtgatgatggctgcacaacatgtgaatgttcttaatgtcagaatgtaagaattccagaatgacttagtacttgaaattatgtgagtgaatgatttgcaagtaaacattaaatcattatgtggctc

SEQ ID NO: 40198 - DNA, 325 bp, Homo sapiens
  misc_feature (324)..(325): n is a, c, g, or t
aaatttgagtttgagttttgactgcaactttttgtatgaccttgggcagtcactttttctgacccttcagtgtcttcatttggaatgtcatagcaagagtaatacatgtagtctagcactcagaatttaaccacactctgcaatgggtgtaaggagtcatacggggccgtatgacttaactctgttccctatggaggcttctcctggtcactgggcactgcttccatttctttgtctcccacagaagctgtttggcttctccatttttgtcaaagttttgccagcctgcactagagtggtattccttaaatttaaaaaaaatann

SEQ ID NO: 40199 - DNA, 390 bp, Homo sapiens
gcgggggcggcgggggagaaggggccgctggcacccaccgcatccttcacgcattgccaacatgaaggatgagggtcacttagtgagtagccaggatccaaaacaaagggcttcagatacggcctgcaggataaatttgtcaatgtcttgtgccttcaggcacccagcctcggctgaccctaacctccattcccaagataaataactctgtcacagttcaccttcattccctggacacaaattcaagttgtcatccatcattcctgcccagaaatatcataccctcttacaataataaatataacttcaagtatcatttcttagcagttctctgtacagtcgcgggggaaacgacagggaaggcttcctttctctccgttcacatccttt

SEQ ID NO: 40200 - DNA, 647 bp, Homo sapiens
tttttcccccctaacttcaaatagaatttcccacaagggcatttaaattctcaggaatataacctgaaaattatgtttctgagaccatgtcatgtttgggtgaataattttacatcctcttccaaaaagtccatgaaaactttcaatgtaatatttataaactgattatcctgtgcgcctcccccgacatggcaaacagtgttttgtgaatagcaccaacctttacctatgcttgtgacctaagacccagggatgctatcaaatgctgtttctcctttttgagattctaacttaacatggacataatcccattcctcttgagaagtaaatcacattcgagcagcttctttagcgcatctgcaaatggcctaagatggtaagcaccagaattaaagccaatgcttttggttaattgaaaattgaagttatataaaacgtgttggcttctaaattaaagcttgagcatttcccccagtatttcctggctgccttacaacgttctgaagcagtcattttgattcagaaacatttggcactatgttagacaaactattaaactgttggctaaaaaaaaaaagtaatttggagaattgctatcgacggtgcaccccgaggactccttctggggtggggctcagaggtgaggt

SEQ ID NO: 40201 - DNA, 368 bp, Homo sapiens
ccttgctgcactctgaagtaaacacaaaactatgtcagagagaataaaaatgccattgtagtagtaaatagaataacttaaagtattctacaaatacttgatttttcacataatgcaatttaacaaatttttctgatcacccaatatgtcaaccactatctgaatggacagatcttgaagttagcctaacacaatatcttgtgatttgtctcttaccagtggtaccacccataaataggctagaattttttgtgtctaatactgaattcgacaaccaggaaaatcgcttgaacccaaggcggaggttgcagtcagcagatattgcaccgctgcgctccagcctgggcgacagagcgagactctgcctc

SEQ ID NO: 40202 - DNA, 329 bp, Homo sapiens
tatatcacaatacgattattctcttagtgactcatggttaaaggaactcagggagggaaaagcctacataaccaatacagattttaacagtacatttgaaactttacaaattataaacttatacccttttattttactataataatgacattcattttatactgctttatgttttacgaggactttgatttatattacagtgtctcatttagtgttttttgtttttgttttgtagttgttgtttgtttttttgtgagactgggtctcacactgtcacccaggttggaatgcagtggcatgatcacagctcactgcctcctcaaattcct

SEQ ID NO: 40203 - DNA, 488 bp, Homo sapiens
ccagaacacaaggagtttagccaactggtgttttgaagcttcatctgacaataagttctgtgattctgtttataagtctgtgacgagtgacccgagtgactggagggagccccataatgtctagcatccatttctgagtcatgacaaaaagccaaaggggaaatggggcagggaaaggaagcagatacaggaccagtagtcatataaggggctgtgcacaccatgtgagcccctgcctaccttctacagctaaatgtcagtatttcattcattgcccagccacagttctcccttcctgcttctacttggtgtgaacatttgaaagctcattgcaaagtcttcgctcaagagaaacagctggtgaactctggttttgaaagaaaaaatggattctgaacggctaaagcatctggaattttaaaaattacatgattgttgcacagaagtcattcgctaaggaatttttaccacaaagtcattaaagttag

SEQ ID NO: 40204 - DNA, 683 bp, Homo sapiens
  misc_feature (23)..(23): n is a, c, g, or t
  misc_feature (26)..(27): n is a, c, g, or t
ccacagacgcccggggcctgtgnggnntcactgtctgggcagatgctcacagcagcacgtggtcccacagagttcaggaggctctggtaggggctgttttgtaaaggaaaaaaaaacacacacacacaaacattttttcaatgtagcaaaatcaaacttaaaaaaaaaaaagaagaaaagaagaagatgccgacagtgcggagtctagccttttgtaaacttcatattgcacactagggactataagccattgctagctcattttgaattttaacgtgtaatttttgttttattttctttctgtggggaaacaatgcttgatccaccaatgctctttttaatgttttataactatgtatgtgtatatatataaatatcaaataatatgtatgcacatatgtgtgtgtatatatctatatgtatatacatatatagatatatagagatatatagagaggttttgagacaaaaaaaatacagaacgtgaaacccgagctgaacagcgtgtgctctgattacttgaatctggtctcctcggcacctggttattaagaactgaatatttttccacttgaatttagtgctattagaaatttaatatatgtgttttatttatttgatttttttttttttttttgcatgactgatgcaaggtttgacattttcactcaataaaaactgga

SEQ ID NO: 40205 - DNA, 386 bp, Homo sapiens
  misc_feature (36)..(36): n is a, c, g, or t
gccaaaaaaaaaaaaaaaaaaaaaaaaaaaaaaaanaaaaaaaaaaaaaaagggcggccgctcgcgatctagataaatatcaaataatatgtatgcacatatgtgtgtgtatatatctatatgtatatacatatatagatatatagagatatatagagaggttttgagacaaaaaaaatacagaacgtgaaacccgagctgaacagcgtgtgctctgattacttgaatctggtctcctcggcacctggttattaagaactgaatatttttccacttgaatttagtgctattagaaatttaatatatgtgttttatttatttgatttttttttttttttttgcatgactgatgcaaggtttgacattttcactcaataaaaactgga

SEQ ID NO: 40206 - DNA, 2080 bp, Homo sapiens
ctaggagcaggggtcccgggcgaatgcggcgcagctcccggccgctgccccggcgcccctccccgcggccgattcggccccgcgaccattgctcaggactgggacgggcgctgggggccaccgggacccccaccgcgcgccaccagggcggggtggctcctggagccgctggcggggcctccctcatgcagctaggatcctcccccctgcccagggggagacgggcagaaggcagtcagcacgggtgacactacagggaccgtggaggaagcctcacgggagtagcagccgcggagctccagctcagccccaccccagggcccggctgctcccccaggcctgggtcgggtctgtttggcgactccctggccccagcctccgccccagggaaaccgaggctgcgtccaaaacccagagtagcccgctgggggccggggcggggtctcggccaccctggtggtgcaaacaggaaggatgcgcctggttttggctttaatgttcaaaatggaaaaaaatacaagaaagttgtacagtatttttcctgtaaaggttattattctacatagaacaaaaaggaagaaagcaggcgtggtgagagtgcagacccgcctgggcccggcctgaggttggaggctcagtcccgtttatcctgtgggatttggtccagggtttttgtagaggccttaactgtttgaggctgtctgtcttcacaatagcactgatgggagctgcgtgattccaactcttaacttgaattttgtagagacaagaaaaaaggactattactgttgatccaagtttgtagttaatttaacatttgagttctctcttggtgatgcgtgtggctttatagggctttttttttttccagtttgttttattactttgtttgggatgcttcttcgctggtgcagtctacccagattgggttccctttgcaaaacatcccccttcctggagatgatgatgccatcgaagcccgggccagggcctgacctggcaggcacacacctggccagtggctctgaggtccccggggaccgagtcccctgcgagggcaggctgcccgaggccacacctgcccaccttccctactccaggccaccagctggtgtcagattgggccaccgggagagaacaggcctaggagggaatggaaggctggcggggaggctgtcatccagaagcctcctccccagaggtctccaggaggaacctggctcaactggggggcagtggtttacttttcccttttttcttcctttcttttgtcctctcagctgcccacagccagaaagccaggaccacccgaactggacagggagcagggagggaggagtggtcgcacggagcgtacctgattcaacaggaaatcagttattttctaaaacagcccctaccagagcctcctgaactctgtgggcaccacgtgctgctgtgagcatctgcccagacagtgacccgccacaggccccgggcgtctgtggaaggagttttgtaaaggaaaaaaaaacacacacacacaaacattttttcaatgtagcaaaatcaaacttaaaaaaaaaaaagaagaaaagaagaagatgccgacagtgcggagtctagccttttgtaaacttcatattgcacactagggactataagccattgctagctcattttgaattttaacgtgtaatttttgttttattttctttctgtggggaaacaatgcttgatccaccaatgctctttttaatgttttataactatgtatgtgtatatatataaatatcaaataatatgtatgcacatatgtgtgtgtatatatctatatgtatatacatatatagatatatagagatatatagagaggttttgagacaaaaaaaatacagaacgtgaaacccgagctgaacagcgtgtgctctgattacttgaatctggtctcctcggcacctggttattaagaactgaatatttttccacttgaatttagtgctattagaaatttaatatatgtgttttatttatttgatttttttttttttttttgcatgactgatgcaaggtttgacattttcactcaataaaaactgga

SEQ ID NO: 40207 - DNA, 575 bp, Homo sapiens
ggattctctcaatgttgaatcccatttttttccctcagtgaatcttcaacatttttaaatcttagcattcaacaaaaactctacagcctagatataaaccatagattactttttatatagcatatacagttcatcaacaaacagtaaagtttccttcatgacttaccttgaaatctttattcaaaggatatactattcaatttttcagtgtgccactgccaccactgcatgtttttggtcagagtgcagtgcaactaacatcgccatcctgctaggaaaaagatctgcaggttgctggatagtggaagttgcacacatctaatttacaagtcagattagagatcagaatcttacaatagctttatgtggaattgatttcatttcatggtttttaagctgttttttcattgaagcaatgcctgtaactgaaagacaggtgtgttgtagcatttgaataccttaaactcttttgaatctggaatgaaagggatgttctggattctaaaactcagagattttgaattaaatgccatcattcatttattgtgccataattgaactaccttgagaactga

SEQ ID NO: 40208 - DNA, 399 bp, Homo sapiens
tacggaattcggaggcttcgggtacccggatctagtagcctataccccttggacgtcccctcctgtaggaaattaagtttccattaaaggtagagtgagcacctgtcacaacttgcccttccacagttatcaccgggtacctttcatgcatcgtcccctgggtggttagaatatgatctggccccaagccaaggcagttggttgttccacacagcaaggattacctgactttgcagtgcacagccctcctcccagccaggcttcttattctctttgtaattcctagcaagtcactgtcctttctaggcctcaattttctcattgtgggagggagaaaactgaattgggagatcactaaggtcctgcactgtgaaaattgtgcctctgtaagtactaaga

SEQ ID NO: 40209 - DNA, 605 bp, Homo sapiens
aagtggtactgcacagagtagctagctctccagctctagagagtgggcagagcctcactgcaaacgtcagtccacatctgctccaatagtgacctcagagaggcaggttttctgtcatcttgtgatgtgtaggttcatcagatcaacttgttcttggttgttgctcactcttgggcctggccttggccctggccctgcttatgttctcttgggtctttcctcagacccctggctgacagcctagccagcaccccttggacgtcccctcctgtaggaaattaagtttccattaaaggtagagtgagcacctgtcacaacttgcccttccacagttatcaccgggtacctttcatgcatcgtcccctgggtggttagaatatgatctggccccaagccaaggcagttggttgttccacacagcaaggattacctgactttgcagtgcacagccctcctcccagccaggcttcttattctctttgtaattcctagcaagtcactgtcctttctaggcctcaattttctcattgtgggagggagaaaactgaattgggagatcactaaggtcctgcactgtgaaaattgtgcctctgtaagtactaaga

SEQ ID NO: 40210 - DNA, 397 bp, Homo sapiens
tcatcgacggagaagaatgcaaaataaatattactctaggcgtgtagtactttaacaaaacagataatttttatctacctctgctcctgaatacagtctattggtgcagagtgtgtgcctttttagcctaaaacacaccaaacttagataagtgctctccgtgacttatgctaaggaagacaagagatatttgtgaacctaaaaggaattggacctatctcaagcctgttcttcagaccttaacgtatttttatttttttaaatctaaaagacaagaaagatatagaactataggggtaaacagaaagtcaagtgtgtaaagccaaatagtggcaggacttaagcagtcttccagagaacaaatcaaatttatcaattcacaactgcagagtcgatt

SEQ ID NO: 40211 - DNA, 326 bp, Homo sapiens
gtctgtaaagcggggaaaataccttataggattgttgtaaagaataaatgagttgatatatataaactagcacataggacagtgcctttatttatttatttaaacaggcttgatatataatgttatataaattgctgctgctggatttgattcctagaagttaaatatttgaatattaggcccctttggctaactggctattcttctcatcatttaatgtgaatagatatgtttttagatttattatctttagtttccattgccagattaattttctaaaatgcaggtgataagaaatgagtgagctgaaggacatgttctataga

SEQ ID NO: 40212 - DNA, 797 bp, Homo sapiens
tgagagctatgccacctcgagtgctcctggctaagcagtgttccttgggctaaactttgaacacaaagtaactgactgaactggtttgcccctgagttcacactcttttgggtacttccccatgaagagtataggcattttctgacttctcatagttcgcaaaggaataaataagaacaaactctaaattaccacagtgacagtgactcatgaccatagcaccagaaaagacccttggagccagagtactttggttgtgtgaattcccaggtgtgggcttagagagatagtgggatctttttttgtagtggtcttgctcaagtggaaaccctgcaatgtttcagcagctgttaaggggtgcaacaaatatttaaacccacacaagtggcaaaggctgctgagctgctatttatgtaaatattgtaatttgggcctgaaaggaattagattttgtatattaataaataaaattggagtaaagaaataaatcatctatctttaccacctttctttgcaggcctctagcttgatttctgtatctcttaaagacttatttaggatgaagatattggtcatacagccttgtaggcattgctatatcaagataattttttcctcatttagattctgccaagacagccatttgtcggtcagctcaggggaaaaccagttcagtcagttactttgtgttcaaagtttagcccaaggaacactgcttagcctcaggagcactcgaggtggcatagctctcaaaaaatgtaagaatgtaagtcaggtgcataaaacaaaacaaagca

SEQ ID NO: 40213 - DNA, 438 bp, Homo sapiens
tagctgggactacaggtgcacagcaccacatccagctaatttttgtattttcagtaaagaagggatttcaccatgttggccaggatggtcttcatctcttgacctcatgggtccatcccccatccggcctgcctatttttttagaaagattattttttaaagttcctatgtaatgacatgcatttttttatcttttaaaagttgtggccgggtgcagtggctcatgcctgtaatcccagcactctgggaggctgaggcaggcagatcacctgaggtcaggagttcgagaccagcctggccaacatggtgaacccctgattctatctattaaaaatacaaaaattagcaaggcgtggtggcgcatgcctgtaatcccagctacttgggaggctgaggcaggagaatggcttgaacccaggaggtggaggttgcagtgac

SEQ ID NO: 40214 - DNA, 208 bp, Homo sapiens
tgcagctaattagaggaaggctggaattcaaacctaagtcctgacaccaagtcccatgataccacatcttttgttactaattaagttgatcccttttattctttgtcctttgtatgtgtatgtgcgcatgcatgcatacacacacacacacacacacacacacacacagaactgatctctctttctggaccagtgcaataggcgtcag

SEQ ID NO: 40215 - DNA, 155 bp, Homo sapiens
gaagggccaggattcaaaaccaggactccaggttccaagtgtcaggcccgttcgaccacactgtcctcccaccagccaagagggcaattctggaatcagccaggagggctgtcaatcacaggacaaataaaatagtctgtttttacttagctgga

SEQ ID NO: 40216 - DNA, 786 bp, Homo sapiens
gggaagtgagagtttacagagtcattggaagggccgctgtattagtttgccagggctgctgtaataagatcaaggtcttgggggttaggacttcaacatatgaatttgggggtggcggagcacaagtcagctcataacagctggggaggaggctttaggcctggccctgagaaattactcccagactaaggctgcagaactgaccccctagagagtcaccaccttggtcatagacagcaagcagagagggaggaatcaggaagtccctgctgtagttgctggatccagcggtgaatgttctgagctgtgatcctgggatcaggaagctgcagccactgccacagtgttggttctagagccaggcagcatgagatccagtcatcgcatccacactacagctataagaaggaggaagggcagaaggttgtgctccaccctttaaggacacttgctagaagtcagacagaacgtctggtcacactctgtttgacagaagttagtcacatgcaacatctagctgcatgggaggctgggaaatgtggtctttgttcccaacagctatgcatatacagggccaaaaatctccagggagtatgatgaagggaaaatgggggaatggagtttgggggtcaagagtggtctctgctgcacctccctgaacagaggactctagggagactagtaattgaatttcaagataaagcagccagtgtggcccaaggttctccttcagtgcctgagctcttggccataggagctcacgcctcctctcctttcctgtgaatg

SEQ ID NO: 40217 - DNA, 237 bp, Homo sapiens
ccccaaaggcctttggaaaagaaattgtgttcatgtacagaaaaccaaaacaatattacactcttctgaatgtctctatttccttccctgacgtttacaatataagtattaaatagatttttaagaaggtaagttgtggtaaggaaggctctctcagcctgaaaatgcagtcactctctcaggacatggttgatcccaagacacctgcaacattgtaaagggtggaggatttttaaa

SEQ ID NO: 40218 - DNA, 420 bp, Homo sapiens
atcataaaattctaaaaactgtgacttcttgacacctgtagtaaatagaaattagactaaaaaaacaggtaaatagaagaactagtaagaaattagatgcaaaaagaatttagttttctactgttttttgatgtttgagagaactaggaatgctcattttcatgaatgaatgctgaactcatcatacacactctgagataagatataaagttatcaacttataactgtcttcgctatttcaatagaaaagaattgaaatacgtgagaaagacataaactattcagaaaacaacattgcaaattgaagtaacaaaaaattacagtacaatgtgaactacatttcttttttattcttttttaaattgatacataatatatgacatatttgttgggtacctgtggcattttgttacatgcata

SEQ ID NO: 40219 - DNA, 380 bp, Homo sapiens
gtcaatacaggatacaaactgggcctcactgtctgctctgccatgagttttcctaagccacacctctcctctctaactagggtgaacaaacatcacctgctctactggcataattattaatagtgccctctttctctctcaaacacatctcggattgatctgacctgagtggttaaaaaataaatattatagaataagatgcatgctgtaattccaagtaataatgagaaaaagctcacctatgtgtgcaaggttcctctatgcagggagcatatttggaaggacactgctaaccacggttacctgaggatggtttggggacacggacagcactgcattatttttacacgcattgcattctaaaccaggcacttgtttct

SEQ ID NO: 40220 - DNA, 88 bp, Homo sapiens
cttttgtgcctaacaaggtacatttctccctgctgggtggagattttagtatggtaatgaagcaagaaatgagttcagtgcacctatg

SEQ ID NO: 40221 - DNA, 348 bp, Homo sapiens
taaagaaaactgatagcaacattgagtcctttgatccttgaacacagtatacctctccattcatttaggcctttcatttttctcagtagtgctttgaagtcttttagtatacctttaatggtggtcttcatcttgttcattcagcaagtatttattgagcattctgttctgtgccagctactattctgtctgctggggaacaaagccctgccttcagggagcttatgttctaactgaggaaaccagatgagaaactagtgagttaaatatatgctagatggatatttgtattgtagagaaaaccaaatcaaggtgtaggggattagagtctattagcatgtgaggata

SEQ ID NO: 40222 - DNA, 544 bp, Homo sapiens
catcaggatagacaaacatagaagaaaaataatatttgatttgagccttaatggataaataaataaataaataacggggagaaagatgattcctagagtagggagtatctcatgcaaatgactgagaagcttgattaagttaatgtttaagaatgtggcaggccaggtatagtggctcatacctgtaatccaagcactttgggaggccgactcaggtggatcacctgtggtcaggagttcaagactagcctggccaaaatggcgaaaccctatctctactaaaaaatacaaaaattagccaggcatggtggctggtgcctgtagttccagctactcaggaggttgaggtaggagaattgcttaggctcaggtggttgaagctgcagttagctgtgttcatgtcactgcactcctgcctgggtgacacagcaagaccaccatctcaaaaacaaaaacaaaaaacaatgtggcatattaaaaattaaaatcacaataaaatcagagggtacattgtgagaagttaatagcaggagataaggttgaa

SEQ ID NO: 40223 - DNA, 390 bp, Homo sapiens
aagggggtgtaggtgaggaggaagatggtgatccacaactcggatgaccatatgttctgattgccccaaataaccagtatttttttaccaggtgtgccagtgaattgttaatagctctgacttagctttcaaaagtgtcctgttttgatgataaactatatggtcaccatatgtgtaaccagaagtactatgatcttctgcaatgtatcttaaagttatctaaccaagataacacttggggttctgttaaaggtaaatatccctgtgttcctcccatggatcttaattcagtaagtcagaggtggaaactggtattttgtatttttaacagttatctatgatgattcttatgaatttttggcattcactgttctacttgttaaaaaaaaa

SEQ ID NO: 40224 - DNA, 358 bp, Homo sapiens
aggcaccggcaaaggcaaatgctccgaagtgggacagagctctgtgcgtttgaggaagaggcagggccagtgtggctggagtccggaaaggagagagaggggacaggctaaagtcagggttagaggacgcagggccaggccactgtgagaagtgtgggctgtgttctgcggacttcctgaggactgggcggcgcggtgtgtgaagcccaggggtccagccaaggacactccttccttccgttgggactgggccagcagggctcaacaggacacccctgccagagcaggagggcctcctcggtgggccctgtggcttcctcaatcctgcagacgttcctgggagaaaaccagcttgtgg

SEQ ID NO: 40225 - DNA, 254 bp, Homo sapiens
cagctacttgggtggctgaggcaggaggattgcttgagccggtgggtcaaagctgcagtgagctgtgggtgtactctgggtgtactctgggtgacagagcgagaccctctctcaaaagaaaagatacattggttggctgggcacagtggcttacgcctttaatcccagtgctttggcctcccaggaggatcgattgaggctaggaattcaaaaccagcctgtgcaacatagcaagacctgttctcttccaaaaa

SEQ ID NO: 40226 - DNA, 560 bp, Homo sapiens
ggcttacacctttaatcccagcactttgtgaggccgaggcggatggatcacttgagttcaggagtttgagagctgcctagacaacatagcgagaccccatctctacaaaaaatacaaaaaatatccaggcgtggtgacgccttggcactagagcaagaccctgtctaaaaaataaataagtacataaataaaaataaaattcatcaaccgcgtgttgaattctcaagattccccttaaacctgagaactggagagagccatttcagttatatagtaaaattaaatttgtttatcatggattattataatggacgtatattgataaaatgtctaggtgagaattttacagttgtaattggaggtccatttaaaggttaaaatgaaatagagagttatggatgcacagctttccatattgtgtttggcaaaggaaattgattctcggaatgatatgctaccctttttgtccactatgtgtagtgcatatggatgatggaatcactttcatgagtacagttcttatttagaacacacattccgtaatatccctagaaaataaa

SEQ ID NO: 40227 - DNA, 1308 bp, Homo sapiens
ataagcaaagagcttgggccagcatctaggttttggtaaagatcaggacaatgtatacaaaggactaaagagtttgatggcaagacatagctattttggcatcttcctgggggaagctgcacacactggcctcatgtctggaccagcagtgagagatcctcatgagtattatccactaataatcaccaatcccagaaccacaggtagggcttgattcctctatgggactcccatgagcatagagtagagacgcccttggttgcattagacctctagcaatcgaaggccagttccagcctggaccaaggcctgcctctggttctgcacaatggcaagtcctattaggaggactaggagctttgtccttgaagtaaagacctgcatggtaactggtttcagttaggttggctcactgggatttgaagctgggatgaatggattccacactgacctttatcccatgggcctgttggactggctcttggggaactcataactgtaccatgtgtttgagcttcagtgagctcaaatgcagagtcaagtgggaagagatgcaagattgctaagtaggtggtcagctatctgccaggggtcttctcctaatggtagaccagctagcctgtcaatctgaagtctgcttttgtaaagctttgtgctgggggctatgatggatagtaataaaatgacattgtcctctcagagcttacgatctgccaaattaggaagcgtgttcaaagaaacccctagagagcctgagatgagttaagggtgaggttctaaccaaaccaggtgtagctttagcggtacaacctctgtaaatcactcaacttgtctgtaagtcagtttgctcatgtgtgaaatgatctcaaaaattccctctgcctctggctttataatctaggtggaaagatgaagcataaacacagtccatttgtagtttcccgggcctctgataacatctccaatctgagttacttaagctttagagccacctgttagcagcattcaaagcaagattgttgaggttggtgacaggtgcactgcacagttgtgccctgtgggtgctctgtggccatgaggtgagccagaaagacaaactgcacatgagtaggccaaccgctctgcagaacgtgcagaaaggttcattgttcatggtcagaaaataacattttgtattgtggtaaaaagagaaataacattctgtctcctattgtcacaatttataatgtaagattttaaagatgtaataaaaagttatgcacatcaataatgaaggaagacagctaaagcaagcaatatttgtgcaac

SEQ ID NO: 40228 - DNA, 1179 bp, Homo sapiens
gtagaaggtcctcactgcacctcatggcaggctgctgacggcagatattttaccgggctcactgaactgggcagtcagggaagggtcggctcctgctctgtccagctgtcttcataagggactctgtgacactttttataaaaatgactttgatttctgcataagaaggcttcccaagcttgctgtctagcagtggctgctacagggaattattcacatggcagcaagagagccctggctccctggaccaggacattccctttgtgtgtgttggaatgagagcaggaggagtgctggtcagaagcccctccccagggctctgggacttcagtgttctcagacaaactgggccgctcctctgagctgggatgctgacccacacttggccccggctctggcatccacaggacgctgccttatccgtcatctcgctggggctgggggctagaggctgagcaggtcacactgaacaaaagaagtgtgtccccatcactaggctaacatctgagtttcttccacagtatttggtaacacagtcagaaacaagactgaagatgattctggaggcaactgggaaccccccagaacgattctgcaggcttctgggaagctgaaaaaccccaaggccagactggcctcagaatgcctgagtccttttgattccactggaaaagccatccatctgtgccaagtgtgtggagagcttcaagagccatatagccctggccaccatgagcacagccacgtgggggagtagtcctgaaagtgtcctggtgtggcaaaggctttccactaagtggacctcagatggcacaggaagaccctcctggggatgtgggaggacactgcctagtgggtgaggggccgctctttcaggtgtgcacactaaatgcagagacagcctctcctggctgccaagaagcctgtgcatgatccaggaccacaaaacacttgcaaactcactgcccagaggccctgtgcctgtctggagtgtgcccagtgtgtctgcgccccacagcttgtcctggcccgccagcagagccgcagcactgcagggcccttctgttgtgagtgccagggcccttgctggctgcctgagcaaggcaaaaggttcaaaacaggaagtctctgggcagctattcccaggtgcagaggggagcagcggccacacaggtgcca

SEQ ID NO: 40229 - DNA, 1125 bp, Homo sapiens
gtagaaggtcctcactgcacctcatggcaggctgctgacggcagatattttaccgggctcactgaactgggcagtcagggaagggtcggctcctgctctgtccagctgtcttcataagggactctgtgacactttttataaaaatgactttgatttctgcataagaaggcttcccaagcttgctgtctagcagtggctgctacagggaattattcacatggcagcaagagagccctggctccctggaccaggacattccctttgtgtgtgttggaatgagagcaggaggagtgctggtcagaagcccctccccagggctctgggacttcagtgttctcagacaaactgggccgctcctctgagctgggatgctgacccacacttggccccggctctggcatccacaggacgctgccttatccgtcatctcgctggggctgggggctagaggctgagcaggtcacactgaacaaaagaagtgtgtccccatcactaggctaacatctgagtttcttccacagtatttggtaacacagtcagaaacaagactgaagatgattctggaggcaactgggaaccccccagaacgattctgcaggcttctgggaagctgaaaaaccccaaggccagactggcctcagaatgcctgagtccttttgattccactggtggccaccatgagcacagccacgtgggggagtagtcctgaaagtgtcctggtgtggcaaaggctttccactaagtggacctcagatggcacaggaagaccctcctggggatgtgggaggacactgcctagtgggtgaggggccgctctttcaggtgtgcacactaaatgcagagacagcctctcctggctgccaagaagcctgtgcatgatccaggaccacaaaacacttgcaaactcactgcccagaggccctgtgcctgtctggagtgtgcccagtgtgtctgcgccccacagcttgtcctggcccgccagcagagccgcagcactgcagggcccttctgttgtgagtgccagggcccttgctggctgcctgagcaaggcaaaaggttcaaaacaggaagtctctgggcagctattcccaggtgcagaggggagcagcggccacacaggtgcca

SEQ ID NO: 40230 - DNA, 531 bp, Homo sapiens
taaatctattcaatagaatattatgcacccattaaaatgtttatataggctgggctcacacctgtaatcccagaactttgggaagctgaagcgggaggattgcttgaggccagaagtttaataccagcctgggcaacatagcaaaaccctgtctctacaaaatttttttttttaattagccaggcgtggcagtgtgcacctgcagtccttgctacttgggaggctgaggcagaaggatggcttgaaccaaggagttcagttgcaccactgcactcctgggttattttggagaccctgtctctaaaataaataaaaaagaagttagagaccagcctgggcaacatggtaagaccctgtctctacaaaaaataaaaagattagctgggcatgatggcacacgcctgtagtcccagctacttgggtggctgatgtgggaggactgcttgagcctggaaggtcgaggctgcagtgagctctgattgtgatcacaccaccatattccagactggaagacagagcaaaaccttatca

SEQ ID NO: 40231 - DNA, 327 bp, Homo sapiens
tttaaatttttaaaattttgtagagacgagatctcactatattgcccaggctggtctcaaactcttggactcgagtgatccacccacctcagcctccccaagtgctaggattgctagtgtgagccaccctgcccagccaactatagttttctaaaccaacaaattctacttattttccagcctaagcaaatgcttacttgggctgttgtgatttccatcaatatctggttgttcttcttggaaagtaagaatagaagataaaatatagttttaaaaaatatgtaagtccaaggaaatgaatcgtatgttttatgccaacacagacag

SEQ ID NO: 40232 - DNA, 427 bp, Homo sapiens
gtgatgactagagtagaataattttagaaaaattaatttatgatagagctggctttgggaaaaaatcatattcactcaaatatgacttttaattaattcatcttaatagtctgacatttgaaatgcatgggacaagatgaagtggctgaaaggatgctgcaaataagccaggaaaaccgcaaaatgatgtttgagagttcctgtttcctacctctgaccgattataatacttttctcttatcagtggaatgctatctccattgtgggttattttgtatggccctgaacctatactttttctattgtgtatttttgatgccatgacaacagataatgtacttaatgtggaaacttaagaaaaataattttccaaggggcttttccaacctggttcttctgatttcttcaagtaatggtgaaggaccat

SEQ ID NO: 40233 - DNA, 599 bp, Homo sapiens
agtttcttaagcacaaggacaatgtcttatcccttttcttattattttaggtagcattatagcactgttattaattttgcacttaatgcattgctattaagtgaattcatgaaacttctatctgaacacagggctttttatagctattacaaatggcacagttaaatacgtaagtgcaataaggtaagctagatttgagatggaattaaaaaaatactttcccatactttacacacagaatgtagtttgtatacagtttaggaaaacctactaagaagggaaaatcacaatgttttattaggggtgaaacacaaatcagaaaggcttagggaaataaaaccaagaactagttttgttggtctatttgttatgataaaggctaaactaatgttaacaagagacaaatatagtggctcaagtaagaaagaagtttatttatcatataacaacaggtcacacattcaggctgctgggtctttcacgggctccttcctttatgttgctctgccacctcttagggtcttgtcttaatctgcacggtcaagctaggacattgtcacacttatcttccagtcagtggggaaggggaaagagagagt

SEQ ID NO: 40234 - DNA, 257 bp, Homo sapiens
acactggaggaagttgctgctgttgattcaggtactatagcaggatttgggtgtggacatccttggctgagagatgcaaaaacttttccccaagatctactgggaagaaatttgattcataaaagtttcataaggaggccgggtgtggtggctcatggctgtaatcccagcactttggaaggcagaggcgggtggattacctgagtttaggagttcgagaccagcctggccaacatggtgaaaccctgtctctgcaa

SEQ ID NO: 40235 - DNA, 1236 bp, Homo sapiens
tttttatagaggggtgtcccttacatttagaaaatgaaataattttgtatttgtgaaaagttacattccatccattttctggaaaaaaaaatgggtattgttctttaaaatgttcatgagctgggaggatgattattctggtttccaggggaaactctcaagcagtacatatgtgatactcagttttgtagactgcagaccataaccagcaattgccagttgcaaaaatgtgaaaaagaaataacttattttaaccactttgtacagcatattatttcccactagaaaaaaatctgcaaataatgaatttacaattataaataatcagacatgacatcataaatcaatcttcctccctactagcaagaggaaattccaatggctttttttccatcctaacacaaattacttttattgtaaacaaatgcttgcaacaaaatgcttttgttgtaaaatgattgatgttggggtaaagtctacttagcttccccacaaggtctttctggctagtctgcaggtagtagatgatggttccatctcggcattgtctatcctctccatattcagactgtgtgactgagcttccttgatttatatagcatctgacccaaaatcacaaaaaagtcactcctgatgacatttgcatggggagtctttcatttggacttcagttcttaattgccgaaataagtactagtgaattatgtagcgtttttacccaaaactaatcttctgtacaaagttgtgtgcatattgagatgattagttaaggcagtgtagttttttaaattttttctgtataaatttctttccttcttccccacctcaggcacctaccctactcctttcaaagcactttatatccctcttgaaatacaaagaaattgaaaaaaaaaaaaaagtaactgtctttaaaggaatttgtcttctattaggagacacagacttttattttgctttattctattctctttgtacttggagagcgtaatcaacttgtctcataatgggctagtgatgaaacaagggtgatagttggaaacagtcattacaacatggttatttttgttatatagaagactatcatgtaaataagtgcaatcgtgttcttacgtactggctaaaaaaaaaatattgcaactataaggatttttaaatgagggttgtgaattccaggaaatttcactgcaaaatttcttttggttttgttttttaataaaatggaaccagatgctt

SEQ ID NO: 40236 - DNA, 621 bp, Homo sapiens
atgaaattaataataataattcaataaattgaattatgccatatgtatcttttggggattggcttctttcactcagtataatttccttgatgttcatctaagttgttgcatttatcaatagtttttttctttttattgctgagtagggttccatggtactgatgtttaaccattcagtcactgaaagaaatgtgcagtttccggatttagttattacaaataaagtactataaatatttgtacaagtgttcctgcatgaaaatcagttttaatttctctgggatatatgcccaggagcacaattgctgaattgtatggtgatatggtttgactcagatctcatcttgaatttccacatgttgtgggagggacccggtgggaggtgactgatttgtgggggcatgtctttcctgcgctgttctcgtgatggtgaataagtctcacgagatctgatggttttaaaaaggggtgtctccctgcacaaactcattctctgtttgcctaccgccatccgcttaagatgtgacctgctcctccttgccttccgccgcgattgtgaggcctcctcagctatgtggaactgtaaatcgaattaaacctctttcttttgtaaaatgccca

SEQ ID NO: 40237 - DNA, 254 bp, Homo sapiens
ggttctgcgggggctgaaggcaggggctgctggagggggaatgggaggccagcagggtgccctgggcccttcaataaccacctcccaacccttgggacgggggtggttctgtatgaagtcacatttgaacagagtattccaaccacagtcgaatccagacacctcatttcacagatggggaaagtgtagctgggctgggtgtgggggctaagggtgctcttcttggtcacagccgagccccaggcttgtgggga

SEQ ID NO: 40238 - DNA, 339 bp, Homo sapiens
ttcaatcaaatcaagttgacacttagtattaacaatcagagtagttatgttctaggatttgaatggagtcacaaaaagacatcattttcgatattcaaagactacaattttcagcacctatggcgttttagtagagaaaagaatctaaatgtacaatttgccaagtcaaatattattcaattttactttatctttttgctatatcagtctcatttaatagagtcatgagcagcctgaaacagaactgtttatcttactacaagcttttcaaatataaaatttcacagaggcaagctctttataaaattttagtattggagataactgccctctatgaat

SEQ ID NO: 40239 - DNA, 420 bp, Homo sapiens
gtctttgcttttggtagcaaaataatactgatttcataaatgaattaggaagtattcccttattttctggcagagactacacagaaatagtgtaaattcttctttaagcctttgctagaattctccaatgaaatcattcgggcctattttcattttaaaattataaagttctattaagttgtagcactattcaaattatctatgccatactgagtgacttgcagtatgttgtactttctggaaaacttagtttattttcatcaaagttgtccaaatttatttctgtagatttttaaaaatagtatccttttcatgtccacaggctccagagtgggtgggagcatcccaaatctgataatctggaaatccgaaatggctccaaaatctgaaactttaagagtaccaacaagacactcaaag

SEQ ID NO: 40240 - DNA, 370 bp, Homo sapiens
caaagcatgttaattgtgttgcctcctttcctttcagtgataaagctatgtgacattttagatacatggacaacagaaagacggaattggacaaagaatgaaaatgcagggaagaaataaatcagcaaacaaaacactgaacgtgaaattggaaagtggttgtaatgggaaggatgaagatgtcccaaaggaagtaacactggcaacaactttcacattaaagaaacttttggggaaattttacaaatttaaatacaaaggataaaacactggaagcgatccatacttagaaaggaatatgacaattcactaaagcaaagcaagatgcttacttcatatcataaattacatgatttatgtgctaagaagc

SEQ ID NO: 40241 - DNA, 2562 bp, Homo sapiens
cgcctaggagtgacttctccaaaaagtgtgttagttcccggtcacctgagctccgggtgacgcggctgcggtagctgcggatacaagccttccgcgggtcctgcctggcgaccccgacctcctcctgctgtctctccgctccgccaccccgaacccgccaaggtcctgtccttttcctcctgtcctttgccagcgttgggccggaccgggccgagccgggccgcccgggcgcagtctttaaccatggcgtccctcttcaagaagaaaaccgtggatgatgtaataaaggaacagaatcgagagttacgaggtacacagagggctataatcagagatcgagcagctttagagaaacaagaaaaacagctggaattagaaattaagaaaatggccaagattggtaataaggaagcttgcaaagttttagccaaacaacttgtgcatctacggaaacagaagacgagaacttttgctgtaagttcaaaagttacttctatgtctacacaaacaaaagtgatgaattcccaaatgaagatggctggagcaatgtctaccacagcaaaaacaatgcaggcagttaacaagaagatggatccacaaaagacattacaaacaatgcagaatttccagaaggaaaacatgaaaatggaaatgactgaagaaatgatcaatgatacacttgatgacatctttgacggttctgatgacgaagaagaaagccaggatattgtgaatcaagttcttgatgaaattggaattgaaatttctggaaagatggccaaagctccatcagctgctcgaagcttaccatctgcctctacttcaaaggctacaatctcagatgaagagattgaacggcaactcaaggctttaggagtagattagtcaaaagaagtcatactattttgcttacttataattatgtagtataaaccaagcacagtgcagatttcttttacaaaacacatgtattttgcaaaaaaaaaaaaaatgaagaccatgagtgaacagttgtttcctaacccatggctatttagaatcttttgccaaagaatgacaatgatgcaaaaatgggaacagtttggattttaattagaactgtttaggagtgatgatgtgtaaaaagttgacttctcttttgcatggcacagagaaattatattccttacttcatgtcagtttatgttctaaatctttttcactgaatataaaaatcttgttaaatgccattaggcaccaacttaaagagggttgtaaaaatattaaaagtatatcgttaattctgtatctgttgcttgtcttttgtaagtgattatgtgttatgaccataggtggttacagctgccaaattatttttaaatggtcaaaaagaagagtgctatttaaacatctgtcttaaacaaaaactgtcataacttttcttttttctttttccattaggagaacattctagttggtaaatttcaaaatgtgcttgacacctgccttaaatagcacagacctattgtgcacatctttaaattatttcagctggcagaaaagaattacatttaaaactgaaatcaaggcctcaatacaaagattatcctggctcttttctatctctgtgggcctaattgaaatatgtactcttattttagacacgcctctgttaaaacagaccaggttttcctggtctcagacctatgatgacttgtccctttgatgtcactactgtgaattgaatataattagtaaaaatagacgatgaataaataacactttatagtaagaaaacaatatattttggccatctaaaaatgagaattataattatatgaattataatttaaactgtttaattttgtttaatgtgtatattgaatcttccaaattgaagccattattctcaattaagtactacaactatgacaatgcttgacctacatttctaaaataaaaattcacattttttgataaataaactacagttttaccagaaattactatctaaatgtgtattagcagtattttttaaggtgaaattgccttggtatctaatgaatgtgtagacagggagataaaatgaaggattgccagactagttagaatagaatttaggattaggttagttttgaaaaatgatgttgtaatatatgggttctaacacatcctaccataaaaactggaggagatatgtgtaacctggttaatttgggatggtggacattttgggctaatactgacaaaatacatcttaggactagtatacatgtgacacggattgctaggaggaatgaaaaactaaactgtatagtttatattccgtaaaccattttataatgttcaaagattaggttttgttattgatagtattaaatacacagtttctcttaacagtgatgggtgaaaacattttaccggattatggaatgtttaccagaacatgttttgattcttgaatgtacataataatgccatctaacttatttacgttcttgtttacatgtgggagcttttgttttcaaaaattattttgttaaaaaatctcaataaagatttattattgttgttcttttctta

SEQ ID NO: 40242 - DNA, 1977 bp, Homo sapiens
cgcctaggagtgacttctccaaaaagtgtgttagttcccggtcacctgagctccgggtgacgcggctgcggtagctgcggatacaagccttccgcgggtcctgcctggcgaccccgacctcctcctgctgtctctccgctccgccaccccgaacccgccaaggtcctgtccttttcctcctgtcctttgccagcgttgggccggaccgggccgagccgggccgcccgggcgcagtctttaaccatggcgtccctcttcaagaagaaaaccgtggatgatgtaataaaggaacagaatcgagagttacgaggtacacagagggctataatcagagatcgagcagctttagagaaacaagaaaaacagctggaattagaaattaagaaaatggccaagattggtaataaggaagcttgcaaagttttagccaaacaacttgtgcatctacggaaacagaagacgagaacttttgctgtaagttcaaaagttacttctatgtctacacaaacaaaagtgatgaattcccaaatgaagatggctggagcaatgtctaccacagcaaaaacaatgcaggcagttaacaagaagatggatccacaaaagacattacaaacaatgcagaatttccagaaggaaaacatgaaaatggaaatgactgaagaaatgatcaatgatacacttgatgacatctttgacggttctgatgacgaagaagaaagccaggatattgtgaatcaagttcttgatgaaattggaattgaaatttctggaaagatggccaaagctccatcagctgctcgaagcttaccatctgcctctacttcaaaggctacaatctcagatgaagagattgaacggcaactcaaggctttaggagtagattagtcaaaagaagtcatactattttgcttacttataattatgtagtataaaccaagcacagtgcagatttcttttacaaaacacatgtattttgcaaaaaaaaaaaaaatgaagaccatgagtgaacagttgtttcctaacccatggctatttagaatcttttgccaaagaatgacaatgatgcaaaaatgggaacagtttggattttaattagaactgtttaggagtgatgatgtgtaaaaagttgacttctcttttgcatggcacagagaaattatattccttacttcatgtcagtttatgttctaaatctttttcactgaatataaaaatcttgttaaatgccattaggcaccaacttaaagagggttgtaaaaatattaaaagtatatcgttaattctgtatctgttgcttgtcttttgtaagtgattatgtgttatgaccataggtggttacagctgccaaattatttttaaatggtcaaaaagaagagtgctatttaaacatctgtcttaaacaaaaactgtcataacttttcttttttctttttccattaggagaacattctagttggtaaatttcaaaatgtgcttgacacctgccttaaatagcacagacctattgtgcacatctttaaattatttcagctggcagaaaagaattacatttaaaactgaaatcaaggcctcaatacaaagattatcctggctcttttctatctctgtgggcctaattgaaatatgtactcttattttagacacgcctctgttaaaacagaccaggttttcctggtctcagacctatgatgacttgtccctttgatgtcactactgtgaattgaatataattagtaaaaatagacgatgaataaataacactttatagtaagaaaacaatatattttggccatctaaaaatgagaattataattatatgaattataatttaaactgtttaattttgtttaatgtgtatattgaatcttccaaattgaagccattattctcaattaagtactacaactatgacaatgcttgacctacatttctaaaataaaaattcacattttttgataaataaactacagttttacc

SEQ ID NO: 40243 - DNA, 680 bp, Homo sapiens
tgcatattcttcctctactagcttaatggatacaatttgtgaaataatatttaaaaatcttaaacatgtagctgtgactatcacatttttttgtctattagaattaattttttaaaaaagagtagacttgtttgctataagataatttgtgttgaaatgaacattattccagatttaatggctcaaatatgtatttatcaatttacttcactgacattttgaaggatttttttagtttgttcactgagtttgccttctgtaatatacaaaatagttgggctagactgtaaatatgtaagtctaacctgaagtttgtttgaaagtaactgctttgctccttctcccatatcccctagtcaatgatacacttgatgacatctttgacggttctgatgacgaagaagaaagccaggatattgtgaatcaagttcttgatgaaattggaattgaaatttctggaaagatggccaaagctccatcagctgctcgaagcttaccatctgcctctacttcaaaggctacaatctcagatgaagagattgaacggcaactcaaggctttaggagtagattagtcaaaagaagtcatactattttgcttacttataattatgtagtataaaccaagcacagtgcagatttcttttacaaaacacatgtattttgcaaaaaaaaaaaaaa

SEQ ID NO: 40244 - DNA, 361 bp, Homo sapiens
gatgctgagacgactctcttaatttccaccgctacagtcaatgatacacttgatgacatctttgacggttctgatgacgaagaagaaagccaggatattgtgaatcaagttcttgatgaaattggaattgaaatttctggaaagatggccaaagctccatcagctgctcgaagcttaccatctgcctctacttcaaaggctacaatctcagatgaagagattgaacggcaactcaaggctttaggagtagattagtcaaaagaagtcatactattttgcttacttataattatgtagtataaaccaagcacagtgcagatttcttttacaaaacacatgtattttgcaaaaaaaaaaaaaa

SEQ ID NO: 40245 - DNA, 2539 bp, Homo sapiens
gcggccgctccaacatcagaatctgagctccgggtgacgcggctgcggtagctgcggatacaagccttccgcgggtcctgcctggcgaccccgacctcctcctgctgtctctccgctccgccaccccgaacccgccaaggtcctgtccttttcctcctgtcctttgccagcgttgggccggaccgggccgagccgggccgcccgggcgcagtctttaaccatggcgtccctcttcaagaagaaaaccgtggatgatgtaataaaggaacagaatcgagagttacgaggtacacagagggctataatcagagatcgagcagctttagagaaacaagaaaaacagctggaattagaaattaagaaaatggccaagattggtaataaggaagcttgcaaagttttagccaaacaacttgtgcatctacggaaacagaagacgagaacttttgctgtaagttcaaaagttacttctatgtctacacaaacaaaagtgatgaattcccaaatgaagatggctggagcaatgtctaccacagcaaaaacaatgcaggcagttaacaagaagatggatccacaaaagacattacaaacaatgcagaatttccagaaggaaaacatgaaaatggaaatgactgaagaaatgatcaatgatacacttgatgacatctttgacggttctgatgacgaagaagaaagccaggatattgtgaatcaagttcttgatgaaattggaattgaaatttctggaaagatggccaaagctccatcagctgctcgaagcttaccatctgcctctacttcaaaggctacaatctcagatgaagagattgaacggcaactcaaggctttaggagtagattagtcaaaagaagtcatactattttgcttacttataattatgtagtataaaccaagcacagtgcagatttcttttacaaaacacatgtattttgcaaaaaaaaaaaaaatgaagaccatgagtgaacagttgtttcctaacccatggctatttagaatcttttgccaaagaatgacaatgatgcaaaaatgggaacagtttggattttaattagaactgtttaggagtgatgatgtgtaaaaagttgacttctcttttgcatggcacagagaaattatattccttacttcatgtcagtttatgttctaaatctttttcactgaatataaaaatcttgttaaatgccattaggcaccaacttaaagagggttgtaaaaatattaaaagtatatcgttaattctgtatctgttgcttgtcttttgtaagtgattatgtgttatgaccataggtggttacagctgccaaattatttttaaatggtcaaaaagaagagtgctatttaaacatctgtcttaaacaaaaactgtcataacttttcttttttctttttccattaggagaacattctagttggtaaatttcaaaatgtgcttgacacctgccttaaatagcacagacctattgtgcacatctttaaattatttcagctggcagaaaagaattacatttaaaactgaaatcaaggcctcaatacaaagattatcctggctcttttctatctctgtgggcctaattgaaatatgtactcttattttagacacgcctctgttaaaacagaccaggttttcctggtctcagacctatgatgacttgtccctttgatgtcactactgtgaattgaatataattagtaaaaatagacgatgaataaataacactttatagtaagaaaacaatatattttggccatctaaaaatgagaattataattatatgaattataatttaaactgtttaattttgtttaatgtgtatattgaatcttccaaattgaagccattattctcaattaagtactacaactatgacaatgcttgacctacatttctaaaataaaaattcacattttttgataaataaactacagttttaccagaaattactatctaaatgtgtattagcagtattttttaaggtgaaattgccttggtatctaatgaatgtgtagacagggagataaaatgaaggattgccagactagttagaatagaatttaggattaggttagttttgaaaaatgatgttgtaatatatgggttctaacacatcctaccataaaaactggaggagatatgtgtaacctggttaatttgggatggtggacattttgggctaatactgacaaaatacatcttaggactagtatacatgtgacacggattgctaggaggaatgaaaaactaaactgtatagtttatattccgtaaaccattttataatgttcaaagattaggttttgttattgatagtattaaatacacagtttctcttaacagtgatgggtgaaaacattttaccggattatggaatgtttaccagaacatgttttgattcttgaatgtacataataatgccatctaacttatttacgttcttgtttacatgtgggagcttttgttttcaaaaattattttgttaaaaaatctcaataaagatttattattgttgttcttttctta

SEQ ID NO: 40246 - DNA, 2628 bp, Homo sapiens
acaggatcatcagtacttgtatgagagatatcagttatattagcaacattagtactagtgctagcattagtagtatttgttcgaacgggagtacttatattattaatagtagtactagtgctaacatcagtagtacctgttagagaagaagtagtggcaataagtacagtagtactaatggtggcatcagcagtacttgtcagagaaggagtcactgaaatgggaacggtagcaatagtactcacagtagtactacttgtaggagaaggcatagtggtattaggaacagtattactagtgttagcatcagcagtatttgtaggggaaggtgtggttgtaatagatgtaataaaggaacagaatcgagagttacgaggtacacagagggctataatcagagatcgagcagctttagagaaacaagaaaaacagctggaattagaaattaagaaaatggccaagattggtaataaggaagcttgcaaagttttagccaaacaacttgtgcatctacggaaacagaagacgagaacttttgctgtaagttcaaaagttacttctatgtctacacaaacaaaagtgatgaattcccaaatgaagatggctggagcaatgtctaccacagcaaaaacaatgcaggcagttaacaagaagatggatccacaaaagacattacaaacaatgcagaatttccagaaggaaaacatgaaaatggaaatgactgaagaaatgatcaatgatacacttgatgacatctttgacggttctgatgacgaagaagaaagccaggatattgtgaatcaagttcttgatgaaattggaattgaaatttctggaaagatggccaaagctccatcagctgctcgaagcttaccatctgcctctacttcaaaggctacaatctcagatgaagagattgaacggcaactcaaggctttaggagtagattagtcaaaagaagtcatactattttgcttacttataattatgtagtataaaccaagcacagtgcagatttcttttacaaaacacatgtattttgcaaaaaaaaaaaaaatgaagaccatgagtgaacagttgtttcctaacccatggctatttagaatcttttgccaaagaatgacaatgatgcaaaaatgggaacagtttggattttaattagaactgtttaggagtgatgatgtgtaaaaagttgacttctcttttgcatggcacagagaaattatattccttacttcatgtcagtttatgttctaaatctttttcactgaatataaaaatcttgttaaatgccattaggcaccaacttaaagagggttgtaaaaatattaaaagtatatcgttaattctgtatctgttgcttgtcttttgtaagtgattatgtgttatgaccataggtggttacagctgccaaattatttttaaatggtcaaaaagaagagtgctatttaaacatctgtcttaaacaaaaactgtcataacttttcttttttctttttccattaggagaacattctagttggtaaatttcaaaatgtgcttgacacctgccttaaatagcacagacctattgtgcacatctttaaattatttcagctggcagaaaagaattacatttaaaactgaaatcaaggcctcaatacaaagattatcctggctcttttctatctctgtgggcctaattgaaatatgtactcttattttagacacgcctctgttaaaacagaccaggttttcctggtctcagacctatgatgacttgtccctttgatgtcactactgtgaattgaatataattagtaaaaatagacgatgaataaataacactttatagtaagaaaacaatatattttggccatctaaaaatgagaattataattatatgaattataatttaaactgtttaattttgtttaatgtgtatattgaatcttccaaattgaagccattattctcaattaagtactacaactatgacaatgcttgacctacatttctaaaataaaaattcacattttttgataaataaactacagttttaccagaaattactatctaaatgtgtattagcagtattttttaaggtgaaattgccttggtatctaatgaatgtgtagacagggagataaaatgaaggattgccagactagttagaatagaatttaggattaggttagttttgaaaaatgatgttgtaatatatgggttctaacacatcctaccataaaaactggaggagatatgtgtaacctggttaatttgggatggtggacattttgggctaatactgacaaaatacatcttaggactagtatacatgtgacacggattgctaggaggaatgaaaaactaaactgtatagtttatattccgtaaaccattttataatgttcaaagattaggttttgttattgatagtattaaatacacagtttctcttaacagtgatgggtgaaaacattttaccggattatggaatgtttaccagaacatgttttgattcttgaatgtacataataatgccatctaacttatttacgttcttgtttacatgtgggagcttttgttttcaaaaattattttgttaaaaaatctcaataaagatttattattgttgttcttttctta

SEQ ID NO: 40247 - DNA, 1287 bp, Homo sapiens
cgcctaggagtgacttctccaaaaagtgtgttagttcccggtcacctgagctccgggtgacgcggctgcggtagctgcggatacaagccttccgcgggtcctgcctggcgaccccgacctcctcctgctgtctctccgctccgccaccccgaacccgccaaggtcctgtccttttcctcctgtcctttgccagcgttgggccggaccgggccgagccgggccgcccgggcgcagtctttaaccatggcgtccctcttcaagaagaaaaccgtggatgatgtaataaaggaacagaatcgagagttacgaggtacacagagggctataatcagagatcgagcagctttagagaaacaagaaaaacagctggaattagaaattaagaaaatggccaagattggtaataaggaagcttgcaaagttttagccaaacaacttgtgcatctacggaaacagaagacgagaacttttgctgtaagttcaaaagttacttctatgtctacacaaacaaaagtgatgaattcccaaatgaagatggctggagcaatgtctaccacagcaaaaacaatgcaggcagttaacaagaagatggatccacaaaagacattacaaacaatgcagaatttccagaaggaaaacatgaaaatggaaatgactgaagaaatgatcaatgatacacttgatgacatctttgacggttctgatgacgaagaagaaagccaggatattgtgaatcaagttcttgatgaaattggaattgaaatttctggaaagatggccaaagctccatcagctgctcgaagcttaccatctgcctctacttcaaaggctacaatctcagatgaagagattgaacggcaactcaaggctttaggagtagattagtcaaaagaagtcatactattttgcttacttataattatgtagtataaaccaagcacagtgcagatttcttttacaaaacacatgtattttgcaaaaaaaaaaaaaatgaagaccatgagtgaacagttgtttcctaacccatggctatttagaatcttttgccaaagaatgacaatgatgcaaaaatgggaacagtttggattttaattagaactgtttaggagtgatgatgtgtaaaaagttgacttctcttttgcatggcacagagaaattatattccttacttcatgtcagtttatgttctaaatctttttcactgaatataaaaatcttgttaaatgccattaggcaccaacttaaagagggttgtaaaaatattaaaagtatatcgttaattctgta

SEQ ID NO: 40248 - DNA, 1200 bp, Homo sapiens
atataaactatacagtttatattccgtaaaccattttataatgttcaaagattaggtttgttattgatagtattaaatacaaaacctaatcttggtaaatttcaaaatgtgcttgacacctgccttaaatagcacagacctattgtgcacatctttaaattatttcagctggcagaaaagaattacatttaaaactgaaatcaaggcctcaatacaaagattatcctggctcttttctatctctgtgggcctaattgaaatatgtactcttattttagacacgcctctgttaaaacagaccaggttttcctggtctcagacctatgatgacttgtccctttgatgtcactactgtgaattgaatataattagtaaaaatagacgatgaataaataacactttatagtaagaaaacaatatattttggccatctaaaaatgagaattataattatatgaattataatttaaactgtttaattttgtttaatgtgtatattgaatcttccaaattgaagccattattctcaattaagtactacaactatgacaatgcttgacctacatttctaaaataaaaattcacattttttgataaataaactacagttttaccagaaattactatctaaatgtgtattagcagtattttttaaggtgaaattgccttggtatctaatgaatgtgtagacagggagataaaatgaaggattgccagactagttagaatagaatttaggattaggttagttttgaaaaatgatgttgtaatatatgggttctaacacatcctaccataaaaactggaggagatatgtgtaacctggttaatttgggatggtggacattttgggctaatactgacaaaatacatcttaggactagtatacatgtgacacggattgctaggaggaatgaaaaactaaactgtatagtttatattccgtaaaccattttataatgttcaaagattaggttttgttattgatagtattaaatacacagtttctcttaacagtgatgggtgaaaacattttaccggattatggaatgtttaccagaacatgttttgattcttgaatgtacataataatgccatctaacttatttacgttcttgtttacatgtgggagcttttgttttcaaaaattattttgttaaaaaatctcaataaagatttattattgttgttcttttctta

SEQ ID NO: 40249 - DNA, 991 bp, Homo sapiens
cgcctaggagtgacttctccaaaaagtgtgttagttcccggtcacctgagctccgggtgacgcggctgcggtagctgcggatacaagccttccgcgggtcctgcctggcgaccccgacctcctcctgctgtctctccgctccgccaccccgaacccgccaaggtcctgtccttttcctcctgtcctttgccagcgttgggccggaccgggccgagccgggccgcccgggcgcagtctttaaccatggcgtccctcttcaagaagaaaaccgtggatgatgtaataaaggaacagaatcgagagttacgaggtacacagagggctataatcagagatcgagcagctttagagaaacaagaaaaacagctggaattagaaattaagaaaatggccaagattggtaataaggaagcttgcaaagttttagccaaacaacttgtgcatctacggaaacagaagacgagaacttttgctgtaagttcaaaagttacttctatgtctacacaaacaaaagtgatgaattcccaaatgaagatggctggagcaatgtctaccacagcaaaaacaatgcaggcagttaacaagaagatggatccacaaaagacattacaaacaatgcagaatttccagaaggaaaacatgaaaatggaaatgactgaagaaatgatcaatgatacacttgatgacatctttgacggttctgatgacgaagaagaaagccaggatattgtgaatcaagttcttgatgaaattggaattgaaatttctggaaagatggccaaagctccatcagctgctcgaagcttaccatctgcctctacttcaaaggctacaatctcagatgaagagattgaacggcaactcaaggctttaggagtagattagtcaaaagaagtcatactattttgcttacttataattatgtagtataaaccaagcacagtgcagatttcttttacaaaacacatgtattttgcaaaaaaaaaaaaaa

SEQ ID NO: 40250 - DNA, 983 bp, Homo sapiens
  misc_feature (968)..(969): n is a, c, g, or t
cgcctaggagtgacttctccaaaaagtgtgttagttcccggtcacctgagctccgggtgacgcggctgcggtagctgcggatacaagccttccgcgggtcctgcctggcgaccccgacctcctcctgctgtctctccgctccgccaccccgaacccgccaaggtcctgtccttttcctcctgtcctttgccagcgttgggccggaccgggccgagccgggccgcccgggcgcagtctttaaccatggcgtccctcttcaagaagaaaaccgtggatgatgtaataaaggaacagaatcgagagttacgaggtacacagagggctataatcagagatcgagcagctttagagaaacaagaaaaacagctggaattagaaattaagaaaatggccaagattggtaataaggaagcttgcaaagttttagccaaacaacttgtgcatctacggaaacagaagacgagaacttttgctgtaagttcaaaagttacttctatgtctacacaaacaaaagtgatgaattcccaaatgaagatggctggagcaatgtctaccacagcaaaaacaatgcaggcagttaacaagaagatggatccacaaaagacattacaaacaatgcagaatttccagaaggaaaacatgaaaatggaaatgactgaagaaatgatcaatgatacacttgatgacatctttgacggttctgatgacgaagaagaaagccaggatattgtgaatcaagttcttgatgaaattggaattgaaatttctggaaagatggccaaagctccatcagctgctcgaagcttaccatctgcctctacttcaaaggctacaatctcagatgaagagattgaacggcaactcaaggctttaggagtagattagtcaaaagaagtcatactattttgcttacttataattatgtagtataacacttacccggggatttcattacaaaccagatgtgnnttccccccctctta

SEQ ID NO: 40251 - DNA, 876 bp, Homo sapiens
gcggccgctccaacatcagaatctgagctccgggtgacgcggctgcggtagctgcggatacaagccttccgcgggtcctgcctggcgaccccgacctcctcctgctgtctctccgctccgccaccccgaacccgccaaggtcctgtccttttcctcctgtcctttgccagcgttgggccggaccgggccgagccgggccgcccgggcgcagtctttaaccatggcgtccctcttcaagaagaaaaccgtggatggaattagaaattaagaaaatggccaagattggtaataaggaagcttgcaaagttttagccaaacaacttgtgcatctacggaaacagaagacgagaacttttgctgtaagttcaaaagttacttctatgtctacacaaacaaaagtgatgaattcccaaatgaagatggctggagcaatgtctaccacagcaaaaacaatgcaggcagttaacaagaagatggatccacaaaagacattacaaacaatgcagaatttccagaaggaaaacatgaaaatggaaatgactgaagaaatgatcaatgatacacttgatgacatctttgacggttctgatgacgaagaagaaagccaggatattgtgaatcaagttcttgatgaaattggaattgaaatttctggaaagatggccaaagctccatcagctgctcgaagcttaccatctgcctctacttcaaaggctacaatctcagatgaagagattgaacggcaactcaaggctttaggagtagattagtcaaaagaagtcatactattttgcttacttataattatgtagtataaaccaagcacagtgcagatttcttttacaaaacacatgtattttgcaaaaaaaaaaaaaa

SEQ ID NO: 40252 - DNA, 839 bp, Homo sapiens
cgcctaggagtgacttctccaaaaagtgtgttagttcccggtcacctgagctccgggtgacgcggctgcggtagctgcggatacaagccttccgcgggtcctgcctggcgaccccgacctcctcctgctgtctctccgctccgccaccccgaacccgccaaggtcctgtccttttcctcctgtcctttgccagcgttgggccggaccgggccgagccgggccgcccgggcgcagtctttaaccatggcgtccctcttcaagaagaaaaccgtggatgatgtaataaaggaacagaatcgagagttacgaggtacacagagggctataatcagagatcgagcagctttagagaaacaagaaaaacagctggaattagaaattaagaaaatggccaagattggtaataaggaagacaatgcaggcagttaacaagaagatggatccacaaaagacattacaaacaatgcagaatttccagaaggaaaacatgaaaatggaaatgactgaagaaatgatcaatgatacacttgatgacatctttgacggttctgatgacgaagaagaaagccaggatattgtgaatcaagttcttgatgaaattggaattgaaatttctggaaagatggccaaagctccatcagctgctcgaagcttaccatctgcctctacttcaaaggctacaatctcagatgaagagattgaacggcaactcaaggctttaggagtagattagtcaaaagaagtcatactattttgcttacttataattatgtagtataaaccaagcacagtgcagatttcttttacaaaacacatgtattttgcaaaaaaaaaaaaaa

SEQ ID NO: 40253 - DNA, 5115 bp, Homo sapiens
aacaagatgagctgatagggttcccaggctgcctggagttacataacccattgtgcttccaggacagctcacaatcttaggatttgccctaacaagcaaactcagaaaactgctgaggaaggcacgggagggtggctgtgcgaggtactgccggggctgagctctcatggaggctctctctgttctctgaagtgcctttggagtttatgtctgcacatggcattggtttttcaattcgggcagcccgtcagggctcagcctctgccaggactctgccacggcaagctcattcggacaaacgcctgtgatgtgtgcaacagcaccgatcttccggaagtcgagatcattagcctgctggaggagcagctgccccattataagttaagagccgacaccatctacggttatgaccacgacgactggctccatacacctctcatttctccagatgccaacattgacctcacaaccgagcaaattgaagagacgttaaaatacttccttttatgtgctgaaagagttggccagatgactaagacatataatgacatagatgctgtcactcggcttcttgaggagaaagagcgggatttagaattggccgctcgcatcggccagtcgttgttgaagaagaacaagaccctaaccgagaggaacgagctgctggaggagcaggtggaacacatcagggaggaggtgtctcagctccggcatgagctgtccatgaaggatgagctgcttcagttctacaccagcgctgcggaggagagtgagcccgagtccgtttgctcaaccccgttgaagaggaatgagtcgtcctcctcagtccagaattactttcatttggattctcttcaaaagaagctgaaagaccttgaagaggagaatgttgtacttcgatccgaggccagccagctgaagacagagaccatcacctatgaggagaaggagcagcagctggtcaatgactgcgtgaaggagctgagggatgccaatgtccagattgctagtatctcagaggaactggccaagaagacggaagatgctgcccgccagcaagaggagatcacacacctgctatcgcaaatagttgatttgcagaaaaaggcaaaagcttgcgcagtggaaaatgaagaacttgtccagcatctgggggctgctaaggatgcccagcggcagctcacagccgagctgcgtgagctggaggacaagtacgcagagtgcatggagatgctgcatgaggcgcaggaggagctgaagaacctccggaacaaaaccatgcccaataccacgtctcggcgctaccactcgctgggcctgtttcccatggattccttggcagcagagattgagggaacgatgcgcaaggagctgcagttggaagaggccgagtctccagacatcactcaccagaagcgtgtctttgagacagtaagaaacatcaaccaggttgtcaagcagagatctctgaccccttctcccatgaacatccccggctccaaccagtcctcggccatgaactccctcctgtccagctgcgtcagcaccccccggtccagcttctacggcagcgacataggcaacgtcgtcctcgacaacaagaccaacagcatcattctggaaacagaggcagccgacctgggaaacgatgagcggagtaagaagccggggacgccgggcaccccaggctcccacgacctggagacggcgctgaggcggctgtccctgcgccgggagaactacctctcggagaggaggttctttgaggaggagcaagagaggaagctccaggagctggcggagaagggcgagctgcgcagcggctccctcacacccactgagagcatcatgtccctgggcacgcactcccgcttctccgagttcaccggcttctctggcatgtccttcagcagccgctcctacctgcctgagaagctccagatcgtgaagccgctggaaggttctgccacacttcaccactggcagcagttggcccaacctcaccttgggggcatcctggacccccggcccggtgtggtcaccaagggcttccggacgctggatgttgacctggacgaagtgtactgccttaacgactttgaagaagatgacacaggtgaccacatttctctcccacgcctagctacctccactccagttcagcacccagagacctcagcgcaccatcctgggaagtgcatgtctcagaccaactccaccttcaccttcaccacctgtcgcatcctgcatccttcagatgagctcactcgggtcacaccaagccttaactcagccccaactccagcttgtggcagcaccagccacttgaaatccacgccggtggccacaccatgcactccacggagactgagcctggctgagtccttcactaacacccgtgagtccacgaccaccatgagcacatccctggggctcgtgtggctgttgaaggagcggggcatttctgctgccgtgtacgacccccagagctgggacagggccggccggggctccctcctgcactcctacacgcccaagatggctgtgatcccctctactccgccgaactcgcctatgcagacacccacatcctccccaccctcctttgagttcaagtgcacgagccctccctacgacaatttcctggcttccaagccagccagctccatcctgagggaagtgagagaaaagaacgtccgcagcagcgagagccagaccgacgtgtccgtctccaacctcaacctcgtggacaaagtcaggaggtttggggtggccaaagtggtgaactcagggcgagcccatgtccccaccttgactgaggagcagggacccctcctctgtgggcccccggggccagcaccagcccttgttcccagaggcctggtacctgagggcctgcccctcagatgccccactgtcaccagtgccatcggtgggctgcagctcaatagtggcatccggcggaatcgcagcttccccaccatggtgggatctagcatgcagatgaaagctcctgtgactctcacctcgggcatcttgatgggtgctaagctctccaaacaaactagcttacggtgaggactggaggggggccggttgccctagaggagacccacgttctcctctcttgctcccacctccctctcttccccccacagtgcactccctccctctgcccttctctgtccaccccctcctaagctagacaaatcaacctcgtgcctaatggaggaagtgtggaaactttgtaaaatgtgtacataggacttggagaccttgtgtccgccctgctctttcttccgatcccacaggaagtgcccctgcactgtcatcactctcacgaggacgtcacctgtgctaacctgggggaaggtggggtcctttcttctttccttttgagaagcactgaaactcccaagtgtgttcttatcccatggataggaaaccagtgaattccgtggctggcacaccacgagctgtcacgcggcacgggtcataacacatctgggtgtcatcggacacctcacctcgcccaccctgtaggagcgtaaggagcctccatcctcagccacgtgcagctgacgtggctttcctgatcggagggcttttcttttatgggtggcccagcttcttcaagaccttcactgctctgcctcagtggacagtcgtttcttttttgaggtgtgaccttttgttttcatgccttccccttgaagtcatcctgtgttttgtaatcagctgtcaggccaaatgtctgacccgaaagagaatgtatttacactcatgctgcgttgttcagcagcccctctgtgttctgtgtgatttgttttatttttccttttttttacatatatatgcagggaagtaatggtactggtagtgtatgttttctatgtggttcaaatatgaatttcgaacacaccaagccgctaatgagatagcagcttttttctgggacccagagtcacaaccaaattgatttaagaccggacccaagacacctttaacaataggactgaaaggaaaaaggatagggaaaaagcttattaaagaaatgtgtcaacaccaaatgtagaggggaagaaccacaaccaggcataataccaaaccggttccagggggaaacaaggctttggtattccgctggctccagcgctttttctgaaacccgaggctggccagggtgctgtcaccgtgcggtctttgattgcagccattcaatgcccacatgcttttccttcttgtttcagaacagcacatggtcacaacaagatattttctttccctccaaagccttttgtctccttgtgcctctttttatccttaggaaaagatccaggtgcttgtgaaaagaatcatgaatgcaacaagggaggctggtcctgttgctgtcgccgattaagttttaaacttttatttattatttatgtctgccgtattttaaataaacattctcgttccttccagttccagtcatagtgtgtctgtggcattccagtccaaccatgtgacttatttattctaatttgagggctgcactgtacaccatggtgtcctgtgacaccgtgttccagacatttatggaaggaaaacatcccatataaatgaaactgtcatgctgtgtcctccccggcagcagaagatgtgtccttccattgagtgagggtaaccttatgtccaccaaggatactttgagaaagcccctaaggaacaagcctcagtcccacggtttcagactatttattctctgaacacaagagtattggttaattatgttctcagctctccctgctgttgtatgtgtgcattcactgcaagtaacttatatctttttatttgaatgtattttaaagcagtagatagaataacaaaggaatatgaaaaccatggactgaatggaccattttatgtattcagagagagaagccactcatcattgccagaaataccatgtaaaaattggcagttcagaggttgcaatacttagtatagtaaataaataaacggtcaacattgtgcaaccactaccaaaaagtgtgttgtaatgcatcaaaaatcaacacaattttattcactaatgagtatcaataaaataagttcaaatgatggaaacca

SEQ ID NO: 40254 - DNA, 2284 bp, Homo sapiens
gccaggagctttgtgtacacccctccacttcagctgagccagggcatgtctgcggcccaggccagggcgcagtgtgtgccctgggggcccaggcctgcatggctcctctgggtagggggtcgggggcacccccaaggatggtcccttagggtgatgttttggctttggggtgacttcagcaatgtccctgcgagacaagggcggggaagaagaatgttttgaatacgactgccaggatgaagagaggaagccaacccacaggcagcatgacacccaggacctcttggaagaggttttatgtgctgaaagagttggccagatgactaagacatataatgacatagatgctgtcactcggcttcttgaggagaaagagcgggatttagaattggccgctcgcatcggccagtcgttgttgaagaagaacaagaccctaaccgagaggaacgagctgctggaggagcaggtggaacacatcagggaggaggtgtctcagctccggcatgagctgtccatgaaggatgagctgcttcagttctacaccagcgctgcggaggagagtgagcccgagtccgtttgctcaaccccgttgaagaggaatgagtcgtcctcctcagtccagaattactttcatttggattctcttcaaaagaagctgaaagaccttgaagaggagaatgttgtacttcgatccgaggccagccagctgaagacagagaccatcacctatgaggagaaggagcagcagctggtcaatgactgcgtgaaggagctgagggatgccaatgtccagattgctagtatctcagaggaactggccaagaagacggaagatgctgcccgccagcaagaggagatcacacacctgctatcgcaaatagttgatttgcagaaaaaggcaaaagcttgcgcagtggaaaatgaagaacttgtccagcatctgggggctgctaaggatgcccagcggcagctcacagccgagctgcgtgagctggaggacaagtacgcagagtgcatggagatgctgcatgaggcgcaggaggagctgaagaacctccggaacaaaaccatgcccaataccacgtctcggcgctaccactcgctgggcctgtttcccatggattccttggcagcagagattgagggaacgatgcgcaaggagctgcagttggaagaggccgagtctccagacatcactcaccagaagcgtgtctttgagacagtaagaaacatcaaccaggttgtcaagcagagatctctgaccccttctcccatgaacatccccggctccaaccagtcctcggccatgaactccctcctgtccagctgcgtcagcaccccccggtccagcttctacggcagcgacataggcaacgtcgtcctcgacaacaagaccaacagcatcattctggaaacagaggcagccgacctgggaaacgatgagcggagtaagaagccggggacgccgggcaccccaggctcccacgacctggagacggcgctgaggcggctgtccctgcgccgggagaactacctctcggagaggaggttctttgaggaggagcaagagaggaagctccaggagctggcggagaagggcgagctgcgcagcggctccctcacacccactgagagcatcatgtccctgggcacgcactcccgcttctccgagttcaccggcttctctggcatgtccttcagcagccgctcctacctgcctgagaagctccagatcgtgaagccgctggaaggttctgccacacttcaccactggcagcagttggcccaacctcaccttgggggcatcctggacccccggcccggtgtggtcaccaagggcttccggacgctggatgttgacctggacgaagtgtactgccttaacgactttgaagaagatgacacaggtgaccacatttctctcccacgcctagctacctccactccagttcagcacccagagacctcaggtgagaggtcccaagcacgtgtgactgtctcaggcagcagaagttacccgagccggcctcaggcttccccagaggagatgcaggagccgccagcggccacggaggaggaggaggaggaggaggaggaggaggaggaggggtctggtgagggcaccacgataagtcctgtaaacttggcacctttcccggaggcagagttttgggccattctcacctctgttccaggcaccatccgtagtggttctctgtctgtagcttccgctcgtctgtgtgggtgatgattaaagcattctcattgcacagttctgttttta

SEQ ID NO: 40255 - DNA, 861 bp, Homo sapiens
  misc_feature (194)..(194): n is a, c, g, or t
  misc_feature (406)..(406): n is a, c, g, or t
  misc_feature (434)..(434): n is a, c, g, or t
cattcctctgtgccggtccccgagatcgaccaggtgacatgtgcaccctcatcctcacgcagcttgacccctctgcgcttcctcctcataggtgatggtcctctttctcacctgctgccctcggatcggaagtaccacattcgccctcttcaagttctttcagctgtctttggaaggagaacccaccatggagngtaattctggactggaggagcacgactcattcctctttcaacgggggttgagcaacggactcgggctcactctcctccgcagcgctggggtagaactgaacagctcatccttcagtggacagctcatgccggagctgagacacctcctccctgatgtggtccacctgctcctccagcagctcgttcctctcggttagggtcttgttcttctncaacacgactggccgatgcgagcggccnattctaaatcccgctctttctcctcaagaagccgagtgacagcatctatgtcattatatgtcttagtcatctggccaactctttcagcacataaaaggaagtattttaacgtctcttcaatttgctcggttgtgaggtcaatgttggcatctggagaaatgagaggtgtatggagccagtcgtcgtggtcataaccgtagatggtgtcggctcttaacttataatggggcagctgctcctccagcaggctaatgatctcgacttccggaagatcggtgctgttgcacacatcagtaatggtgcaggcatcccggtaccctctgtagctgggagcatcttccacagcctcgcttatgtagtgttcctcagggatgcccaggctgcaggctaggactgcatggttgcatgcctccgaaggggcacgccc

SEQ ID NO: 40256 - DNA, 524 bp, Homo sapiens
aggcgtactagaggatcccggtcatctgctacacattctgcctgggaacactcagtagggagacactttggagacaggaggtgatgaacctttttatgtgcagctggtatgatagaaggaaattgggaaaacttgtatgctaggcacttttgtccagagcctgctgtcccatggagaaaaagttttaagcactgaaaaaatttgattaatgtatttaaatgtattatttgaagcatcattcacttgttgatttttacaatcccatgtcttaaaaaggatgaatccatgttattgtattgtaaataatttagatgattaaaatggattgtttaaaaagttttagattatagttttactttatttcagtgatatgttttatgttttaattattacgtttgtgggacaaggtctcgcttgttgcctaggctcgagtacggtagtgcgattatggctcgctgtagcctccacctcccagctgaagtgatcgtcctgcctcagtctctcgggctgggaccacaggcatg

SEQ ID NO: 40257 - DNA, 1030 bp, Homo sapiens
  misc_feature (194)..(194): n is a, c, g, or t
  misc_feature (406)..(406): n is a, c, g, or t
  misc_feature (434)..(434): n is a, c, g, or t
cattcctctgtgccggtccccgagatcgaccaggtgacatgtgcaccctcatcctcacgcagcttgacccctctgcgcttcctcctcataggtgatggtcctctttctcacctgctgccctcggatcggaagtaccacattcgccctcttcaagttctttcagctgtctttggaaggagaacccaccatggagngtaattctggactggaggagcacgactcattcctctttcaacgggggttgagcaacggactcgggctcactctcctccgcagcgctggggtagaactgaacagctcatccttcagtggacagctcatgccggagctgagacacctcctccctgatgtggtccacctgctcctccagcagctcgttcctctcggttagggtcttgttcttctncaacacgactggccgatgcgagcggccnattctaaatcccgctctttctcctcaagaagccgagtgacagcatctatgtcattatatgtcttagtcatctggccaactctttcagcacataaaaggaagtattttaacgtctcttcaatttgctcggttgtgaggtcaatgttggcatctggagaaatgagaggtgtatggagccagtcgtcgtggtcataaccgtagatggtgtcggctcttaacttataatggggcagctgctcctccagcaggctaatgatctcgacttccggaagatcggtgctgttgcacacatctagtcataagggaactgaagggtaggaagattagctggtggcccccaaatcaattgtgtcaatttgtgcatgcctttggagtttatgtctgcacatggcattggtttttcaattcgggcagcccgtcagggctcagcctctgccaggactctgccacggcaagctcattcggacaaacgcctgtgatggaatgcagaaaggggccctgttatgctaatttctagagagagcatttgatctttgcaaaaccacagaaacattcacctctgccttttaaatatgctataaatgatttgggggccac

SEQ ID NO: 40258 - DNA, 421 bp, Homo sapiens
atttttacaatcccatgtcttaaaaatcaacaagtgaatgatgcttcaaataatacatttaaatacatcattcacttgttgatttttacaatcccatgtcttaaaaaggatgaatccatgttattgtattgtaaataatttagatgattaaaatggattgtttaaaaagaaaaaaaaaaaaaaaaaaaaaaaaaaaaaaaaaaaaaaaaaaaaaaagaagaaaaaagaaaaaaaagaagaaaaaaaaaaaaaaatggggggcgtgcaaagaactagtgatttcacgagggtgggaagcgaagatactagtagctagtgcgggccgaggctcgcgtgccagcggtggcgcgcccgactggcgactggcgtcgggcgtagctggcggtcgggtgtgtgtgtacgacgggtcggcggcgtagat

SEQ ID NO: 40259 - DNA, 4906 bp, Homo sapiens
gccaggagctttgtgtacacccctccacttcagctgagccagggcatgtctgcggcccaggccagggcgcagtgtgtgccctgggggcccaggcctgcatggctcctctgggtagggggtcgggggcacccccaaggatggtcccttagggtgatgttttggctttggggtgacttcagcaatgtccctgcgagacaagggcggggaagaagaatgttttgaatacgactgccaggatgaagagaggaagccaacccacaggcagcatgacacccaggacctcttggaagaggttttatgtgctgaaagagttggccagatgactaagacatataatgacatagatgctgtcactcggcttcttgaggagaaagagcgggatttagaattggccgctcgcatcggccagtcgttgttgaagaagaacaagaccctaaccgagaggaacgagctgctggaggagcaggtggaacacatcagggaggaggtgtctcagctccggcatgagctgtccatgaaggatgagctgcttcagttctacaccagcgctgcggaggagagtgagcccgagtccgtttgctcaaccccgttgaagaggaatgagtcgtcctcctcagtccagaattactttcatttggattctcttcaaaagaagctgaaagaccttgaagaggagaatgttgtacttcgatccgaggccagccagctgaagacagagaccatcacctatgaggagaaggagcagcagctggtcaatgactgcgtgaaggagctgagggatgccaatgtccagattgctagtatctcagaggaactggccaagaagacggaagatgctgcccgccagcaagaggagatcacacacctgctatcgcaaatagttgatttgcagaaaaaggcaaaagcttgcgcagtggaaaatgaagaacttgtccagcatctgggggctgctaaggatgcccagcggcagctcacagccgagctgcgtgagctggaggacaagtacgcagagtgcatggagatgctgcatgaggcgcaggaggagctgaagaacctccggaacaaaaccatgcccaataccacgtctcggcgctaccactcgctgggcctgtttcccatggattccttggcagcagagattgagggaacgatgcgcaaggagctgcagttggaagaggccgagtctccagacatcactcaccagaagcgtgtctttgagacagtaagaaacatcaaccaggttgtcaagcagagatctctgaccccttctcccatgaacatccccggctccaaccagtcctcggccatgaactccctcctgtccagctgcgtcagcaccccccggtccagcttctacggcagcgacataggcaacgtcgtcctcgacaacaagaccaacagcatcattctggaaacagaggcagccgacctgggaaacgatgagcggagtaagaagccggggacgccgggcaccccaggctcccacgacctggagacggcgctgaggcggctgtccctgcgccgggagaactacctctcggagaggaggttctttgaggaggagcaagagaggaagctccaggagctggcggagaagggcgagctgcgcagcggctccctcacacccactgagagcatcatgtccctgggcacgcactcccgcttctccgagttcaccggcttctctggcatgtccttcagcagccgctcctacctgcctgagaagctccagatcgtgaagccgctggaaggttctgccacacttcaccactggcagcagttggcccaacctcaccttgggggcatcctggacccccggcccggtgtggtcaccaagggcttccggacgctggatgttgacctggacgaagtgtactgccttaacgactttgaagaagatgacacaggtgaccacatttctctcccacgcctagctacctccactccagttcagcacccagagacctcagcgcaccatcctgggaagtgcatgtctcagaccaactccaccttcaccttcaccacctgtcgcatcctgcatccttcagatgagctcactcgggtcacaccaagccttaactcagccccaactccagcttgtggcagcaccagccacttgaaatccacgccggtggccacaccatgcactccacggagactgagcctggctgagtccttcactaacacccgtgagtccacgaccaccatgagcacatccctggggctcgtgtggctgttgaaggagcggggcatttctgctgccgtgtacgacccccagagctgggacagggccggccggggctccctcctgcactcctacacgcccaagatggctgtgatcccctctactccgccgaactcgcctatgcagacacccacatcctccccaccctcctttgagttcaagtgcacgagccctccctacgacaatttcctggcttccaagccagccagctccatcctgagggaagtgagagaaaagaacgtccgcagcagcgagagccagaccgacgtgtccgtctccaacctcaacctcgtggacaaagtcaggaggtttggggtggccaaagtggtgaactcagggcgagcccatgtccccaccttgactgaggagcagggacccctcctctgtgggcccccggggccagcaccagcccttgttcccagaggcctggtacctgagggcctgcccctcagatgccccactgtcaccagtgccatcggtgggctgcagctcaatagtggcatccggcggaatcgcagcttccccaccatggtgggatctagcatgcagatgaaagctcctgtgactctcacctcgggcatcttgatgggtgctaagctctccaaacaaactagcttacggtgaggactggaggggggccggttgccctagaggagacccacgttctcctctcttgctcccacctccctctcttccccccacagtgcactccctccctctgcccttctctgtccaccccctcctaagctagacaaatcaacctcgtgcctaatggaggaagtgtggaaactttgtaaaatgtgtacataggacttggagaccttgtgtccgccctgctctttcttccgatcccacaggaagtgcccctgcactgtcatcactctcacgaggacgtcacctgtgctaacctgggggaaggtggggtcctttcttctttccttttgagaagcactgaaactcccaagtgtgttcttatcccatggataggaaaccagtgaattccgtggctggcacaccacgagctgtcacgcggcacgggtcataacacatctgggtgtcatcggacacctcacctcgcccaccctgtaggagcgtaaggagcctccatcctcagccacgtgcagctgacgtggctttcctgatcggagggcttttcttttatgggtggcccagcttcttcaagaccttcactgctctgcctcagtggacagtcgtttcttttttgaggtgtgaccttttgttttcatgccttccccttgaagtcatcctgtgttttgtaatcagctgtcaggccaaatgtctgacccgaaagagaatgtatttacactcatgctgcgttgttcagcagcccctctgtgttctgtgtgatttgttttatttttccttttttttacatatatatgcagggaagtaatggtactggtagtgtatgttttctatgtggttcaaatatgaatttcgaacacaccaagccgctaatgagatagcagcttttttctgggacccagagtcacaaccaaattgatttaagaccggacccaagacacctttaacaataggactgaaaggaaaaaggatagggaaaaagcttattaaagaaatgtgtcaacaccaaatgtagaggggaagaaccacaaccaggcataataccaaaccggttccagggggaaacaaggctttggtattccgctggctccagcgctttttctgaaacccgaggctggccagggtgctgtcaccgtgcggtctttgattgcagccattcaatgcccacatgcttttccttcttgtttcagaacagcacatggtcacaacaagatattttctttccctccaaagccttttgtctccttgtgcctctttttatccttaggaaaagatccaggtgcttgtgaaaagaatcatgaatgcaacaagggaggctggtcctgttgctgtcgccgattaagttttaaacttttatttattatttatgtctgccgtattttaaataaacattctcgttccttccagttccagtcatagtgtgtctgtggcattccagtccaaccatgtgacttatttattctaatttgagggctgcactgtacaccatggtgtcctgtgacaccgtgttccagacatttatggaaggaaaacatcccatataaatgaaactgtcatgctgtgtcctccccggcagcagaagatgtgtccttccattgagtgagggtaaccttatgtccaccaaggatactttgagaaagcccctaaggaacaagcctcagtcccacggtttcagactatttattctctgaacacaagagtattggttaattatgttctcagctctccctgctgttgtatgtgtgcattcactgcaagtaacttatatctttttatttgaatgtattttaaagcagtagatagaataacaaaggaatatgaaaaccatggactgaatggaccattttatgtattcagagagagaagccactcatcattgccagaaataccatgtaaaaattggcagttcagaggttgcaatacttagtatagtaaataaataaacggtcaacattgtgcaaccactaccaaaaagtgtgttgtaatgcatcaaaaatcaacacaattttattcactaatgagtatcaataaaataagttcaaatgatggaaacca

SEQ ID NO: 40260 - DNA, 4609 bp, Homo sapiens
gccaggagctttgtgtacacccctccacttcagctgagccagggcatgtctgcggcccaggccagggcgcagtgtgtgccctgggggcccaggcctgcatggctcctctgggtagggggtcgggggcacccccaaggatggtcccttagggtgatgttttggctttggggtgacttcagcaatgtccctgcgagacaagggcggggaagaagaatgttttgaatacgactgccaggatgaagagaggaagccaacccacaggcagcatgacacccaggacctcttggaagaggttttatgtgctgaaagagttggccagatgactaagacatataatgacatagatgctgtcactcggcttcttgaggagaaagagcgggatttagaattggccgctcgcatcggccagtcgttgttgaagaagaacaagaccctaaccgagaggaacgagctgctggaggagcaggtggaacacatcagggaggaggtgtctcagctccggcatgagctgtccatgaaggatgagctgcttcagttctacaccagcgctgcggaggagagtgagcccgagtccgtttgctcaaccccgttgaagaggaatgagtcgtcctcctcagtccagaattactttcatttggattctcttcaaaagaagctgaaagaccttgaagaggagaatgttgtacttcgatccgaggccagccagctgaagacagagaccatcacctatgaggagaaggagcagcagctggtcaatgactgcgtgaaggagctgagggatgccaatgtccagattgctagtatctcagaggaactggccaagaagacggaagatgctgcccgccagcaagaggagatcacacacctgctatcgcaaatagttgatttgcagaaaaaggcaaaagcttgcgcagtggaaaatgaagaacttgtccagcatctgggggctgctaaggatgcccagcggcagctcacagccgagctgcgtgagctggaggacaagtacgcagagtgcatggagatgctgcatgaggcgcaggaggagctgaagaacctccggaacaaaaccatgcccaataccacgtctcggcgctaccactcgctgggcctgtttcccatggattccttggcagcagagattgagggaacgatgcgcaaggagctgcagttggaagaggccgagtctccagacatcactcaccagaagcgtgtctttgagacagtaagaaacatcaaccaggttgtcaagcagagatctctgaccccttctcccatgaacatccccggctccaaccagtcctcggccatgaactccctcctgtccagctgcgtcagcaccccccggtccagcttctacggcagcgacataggcaacgtcgtcctcgacaacaagaccaacagcatcattctggaaacagaggcagccgacctgggaaacgatgagcggagtaagaagccggggacgccgggcaccccaggctcccacgacctggagacggcgctgaggcggctgtccctgcgccgggagaactacctctcggagaggaggttctttgaggaggagcaagagaggaagctccaggagctggcggagaagggcgagctgcgcagcggctccctcacacccactgagagcatcatgtccctgggcacgcactcccgcttctccgagttcaccggcttctctggcatgtccttcagcagccgctcctacctgcctgagaagctccagatcgtgaagccgctggaaggttctgccacacttcaccactggcagcagttggcccaacctcaccttgggggcatcctggacccccggcccggtgtggtcaccaagggcttccggacgctggatgttgacctggacgaagtgtactgccttaacgactttgaagaagatgacacaggtgaccacatttctctcccacgcctagctacctccactccagttcagcacccagagacctcaggtgagaggtcccaagcacgtgtgactgtctcaggcagcagaagttacccgagccggcctcaggcttccccagaggagatgcaggagccgccagcggccacggaggaggaggaggaggaggaggaggaggaggaggaggggtctggtgagggcaccacgataagtcctgtaaacttggcacctttcccggaggcagagttttgggccattctcacctctgttccaggcaccatccgtagtggttctctgtctgtagcttccgctcgtctgtgtgggtgatgattaaagcattctcattgcacagttctgtttttaaatacagagtctgatgcctcctatttgtaacaatgggtgtagctcccctgcccatcttggaggtgcatggcccatcagggatctttaaagtgggagcaggaaagctgctaaaaaaaaaaaaaaaaaaagtgggcttttgggtccctgaaaacatcagtgcccttcttcctggtctgggtgtctccctgagtctaaggggaagattctcaagtcccctggtgatttccaagtggagctgagcagttttagggaaattgagtgctgggtcattcagaaggtaaatgagatcatctgttacctgtacgctgtattaaaatagaaccaggaaaggctcaggatttcagacatttcgtcagccttttcactttcccagcttcaatggaggtatatatgtcattttcttttcagcttacacatgtgttcaaagtggatttttaaaaagtgttttagcaatactccttaaccaaataaaccttcggagaacgtcactaagcttttccagagagaagaccctagatgaagttggaaaagagctctggctgactccacccactgtccccaagcattaaaggttgtggccatgagtttacagaattacccacattccagttgccactgggatgaaaagctttgtgctcagagctctgggaatcatgggatcacatggttactgtttaccccaacagcatgctctgtctagactggacctcccagccccttgtgttgggaaggcaaagcttttgtggagtcaggggggagactgagaaaaaatgaattaaccctgtgttgtcatcctcatgacattcctgaggattcaccaggttagaagtgaggacgtttatctttgtgattcataattttcatttgtgaaggccacaacactccccttgaaatacagggcaggaaagagctgaggttcttggtggtgtctcccattcccctggctaatttcagacagctgtggtcaagggattttacttgggatcaacttttccttttttccttgacattaattttagagaagtcatcaagtcatgtgatttgtttagcacataggtttatttatggtttgattttttttaggcagttatattactagattaagcttgtgagggaatgaaaatgttttttatttgttatctacacactcgaaaaagagaaaccagctgcggtactgtcccatttttgtcatcagcaccagtgtccgtcaggaaggcaggtggtggtgcagaaacatgatgcctggctgattttcgtggctaaaggggtaggccttatgttgattgggatgctcccctacagccttacaggtagaatagaaggtgagttctggaagtgcaaagaagcaccattaagtgcatcttctagaagttgtacagaaggactaaagcttatcaagtcaacaaagaacttaccttggaggatagagagagagaagggaccaattatgaggactgacatcctggccactctccttaaaataaacactgacatttttcttgcttgttctctctgtactcaaacctgtggcaaattcatcctagcaacgttatttgacgaggggcatgaacatttatagttgaaactgtagaaagggtcaggttggaggtgtgtaataaaaaagaattacctaggttgccaaaggtaatttaggaagggtctgatcatttagatgagagttctttggggcttattttctgggtaaggctcatctttaaaaactggcttcagaggggagaggggagaacaatgaattggctctattttctctattgggaattacaggaccattttgattcttagaatgtaaaaagcatatcgctaagtaaatcatcctggaggtcccaagtagctctatgcctgcaatcatggagacacaggcagacagataagcttcatggggaaggcatggggcatcctctgtcttgggatttgtatccatggtggtctggtccctgccttttaatccgtcctctacgcttgggcttttctgttaccaaacagcactatcccaggaactattgtctgcctgggaacactcagtagggagacactttggagacaggaggtgatgaacctttttatgtgcagctggtatgatagaaggaaattgggaaaacttgtatgctaggcacttttgtccagagcctgctgtcccatggagaaaaagttttaagcactgaaaaaatttgattaatgtatttaaatgtattatttgaagcatcattcacttgttgatttttacaatcccatgtcttaaaaaggatgaatccatgttattgtattgtaaataatttagatgattaaaatggattgtttaaaaag

SEQ ID NO: 40261 - DNA, 4662 bp, Homo sapiens
gccaggagctttgtgtacacccctccacttcagctgagccagggcatgtctgcggcccaggccagggcgcagtgtgtgccctgggggcccaggcctgcatggctcctctgggtagggggtcgggggcacccccaaggatggtcccttagggtgatgttttggctttggggtgacttcagcaatgtccctgcgagacaagggcggggaagaagaatgttttgaatacgactgccaggatgaagagaggaagccaacccacaggcagcatgacacccaggacctcttggaagaggttttatgtgctgaaagagttggccagatgactaagacatataatgacatagatgctgtcactcggcttcttgaggagaaagagcgggatttagaattggccgctcgcatcggccagtcgttgttgaagaagaacaagaccctaaccgagaggaacgagctgctggaggagcaggtggaacacatcagggaggaggtgtctcagctccggcatgagctgtccatgaaggatgagctgcttcagttctacaccagcgctgcggaggagagtgagcccgagtccgtttgctcaaccccgttgaagaggaatgagtcgtcctcctcagtccagaattactttcatttggattctcttcaaaagaagctgaaagaccttgaagaggagaatgttgtacttcgatccgaggccagccagctgaagacagagaccatcacctatgaggagaaggagcagcagctggtcaatgactgcgtgaaggagctgagggatgccaatgtccagattgctagtatctcagaggaactggccaagaagacggaagatgctgcccgccagcaagaggagatcacacacctgctatcgcaaatagttgatttgcagaaaaaggcaaaagcttgcgcagtggaaaatgaagaacttgtccagcatctgggggctgctaaggatgcccagcggcagctcacagccgagctgcgtgagctggaggacaagtacgcagagtgcatggagatgctgcatgaggcgcaggaggagctgaagaacctccggaacaaaaccatgcccaataccacgtctcggcgctaccactcgctgggcctgtttcccatggattccttggcagcagagattgagggaacgatgcgcaaggagctgcagttggaagaggccgagtctccagacatcactcaccagaagcgtgtctttgagacagtaagaaacatcaaccaggttgtcaagcagagatctctgaccccttctcccatgaacatccccggctccaaccagtcctcggccatgaactccctcctgtccagctgcgtcagcaccccccggtccagcttctacggcagcgacataggcaacgtcgtcctcgacaacaagaccaacagcatcattctggaaacagaggcagccgacctgggaaacgatgagcggagtaagaagccggggacgccgggcaccccaggctcccacgacctggagacggcgctgaggcggctgtccctgcgccgggagaactacctctcggagaggaggttctttgaggaggagcaagagaggaagctccaggagctggcggagaagggcgagctgcgcagcggctccctcacacccactgagagcatcatgtccctgggcacgcactcccgcttctccgagttcaccggcttctctggcatgtccttcagcagccgctcctacctgcctgagaagctccagatcgtgaagccgctggaaggttctgccacacttcaccactggcagcagttggcccaacctcaccttgggggcatcctggacccccggcccggtgtggtcaccaagggcttccggacgctggatgttgacctggacgaagtgtactgccttaacgactttgaagaagatgacacaggtgaccacatttctctcccacgcctagctacctccactccagttcagcacccagagacctcagcgcaccatcctgggaagtgcatgtctcagaccaactccaccttcaccttcaccacctgtcgcatcctgcatccttcagatgagctcactcgggtcacaccaagccttaactcagccccaactccagcttgtggcagcaccagccacttgaaatccacgccggtggccacaccatgcactccacggagactgagcctggctgagtccttcactaacacccgtgagtccacgaccaccatgagcacatccctggggctcgtgtggctgttgaaggagcggggcatttctgctgccgtgtacgacccccagagctgggacagggccggccggggctccctcctgcactcctacacgcccaagatggctgtgatcccctctactccgccgaactcgcctatgcagacacccacatcctccccaccctcctttgagttcaagtgcacgagccctccctacgacaatttcctggcttccaagccagccagctccatcctgagggaagtgagagaaaagaacgtccgcagcagcgagagccagaccgacgtgtccgtctccaacctcaacctcgtggacaaagtcaggaggtttggggtggccaaagtggtgaactcagggcgagcccatgtccccaccttgactgaggagcagggacccctcctctgtgggcccccggggccagcaccagcccttgttcccagaggcctggtacctgagggcctgcccctcagatgccccactgtcaccagtgccatcggtgggctgcagctcaatagtggcatccggcggaatcgcagcttccccaccatggtgggatctagcatgcagatgaaagctcctgtgactctcacctcgggcatcttgatgggtgctaagctctccaaacaaactagcttacggtgaggactggaggggggccggttgccctagaggagacccacgttctcctctcttgctcccacctccctctttccttttgagaagcactgaaactcccaagtgtgttcttatcccatggataggaaaccagtgaattccgtggctggcacaccacgagctgtcacgcggcacgggtcataacacatctgggtgtcatcggacacctcacctcgcccaccctgtaggagcgtaaggagcctccatcctcagccacgtgcagctgacgtggctttcctgatcggagggcttttcttttatgggtggcccagcttcttcaagaccttcactgctctgcctcagtggacagtcgtttcttttttgaggtgtgaccttttgttttcatgccttccccttgaagtcatcctgtgttttgtaatcagctgtcaggccaaatgtctgacccgaaagagaatgtatttacactcatgctgcgttgttcagcagcccctctgtgttctgtgtgatttgttttatttttccttttttttacatatatatgcagggaagtaatggtactggtagtgtatgttttctatgtggttcaaatatgaatttcgaacacaccaagccgctaatgagatagcagcttttttctgggacccagagtcacaaccaaattgatttaagaccggacccaagacacctttaacaataggactgaaaggaaaaaggatagggaaaaagcttattaaagaaatgtgtcaacaccaaatgtagaggggaagaaccacaaccaggcataataccaaaccggttccagggggaaacaaggctttggtattccgctggctccagcgctttttctgaaacccgaggctggccagggtgctgtcaccgtgcggtctttgattgcagccattcaatgcccacatgcttttccttcttgtttcagaacagcacatggtcacaacaagatattttctttccctccaaagccttttgtctccttgtgcctctttttatccttaggaaaagatccaggtgcttgtgaaaagaatcatgaatgcaacaagggaggctggtcctgttgctgtcgccgattaagttttaaacttttatttattatttatgtctgccgtattttaaataaacattctcgttccttccagttccagtcatagtgtgtctgtggcattccagtccaaccatgtgacttatttattctaatttgagggctgcactgtacaccatggtgtcctgtgacaccgtgttccagacatttatggaaggaaaacatcccatataaatgaaactgtcatgctgtgtcctccccggcagcagaagatgtgtccttccattgagtgagggtaaccttatgtccaccaaggatactttgagaaagcccctaaggaacaagcctcagtcccacggtttcagactatttattctctgaacacaagagtattggttaattatgttctcagctctccctgctgttgtatgtgtgcattcactgcaagtaacttatatctttttatttgaatgtattttaaagcagtagatagaataacaaaggaatatgaaaaccatggactgaatggaccattttatgtattcagagagagaagccactcatcattgccagaaataccatgtaaaaattggcagttcagaggttgcaatacttagtatagtaaataaataaacggtcaacattgtgcaaccactaccaaaaagtgtgttgtaatgcatcaaaaatcaacacaattttattcactaatgagtatcaataaaataagttcaaatgatggaaacca

SEQ ID NO: 40262 - DNA, 3915 bp, Homo sapiens
taatcagctcggtacctttccaaagcggagatgctgcatgaggcgcaggaggagctgaagaacctccggaacaaaaccatgcccaataccacgtctcggcgctaccactcgctgggcctgtttcccatggattccttggcagcagagattgagggaacgatgcgcaaggagctgcagttggaagaggccgagtctccagacatcactcaccagaagcgtgtctttgagacagtaagaaacatcaaccaggttgtcaagcagagatctctgaccccttctcccatgaacatccccggctccaaccagtcctcggccatgaactccctcctgtccagctgcgtcagcaccccccggtccagcttctacggcagcgacataggcaacgtcgtcctcgacaacaagaccaacagcatcattctggaaacagaggcagccgacctgggaaacgatgagcggagtaagaagccggggacgccgggcaccccaggctcccacgacctggagacggcgctgaggcggctgtccctgcgccgggagaactacctctcggagaggaggttctttgaggaggagcaagagaggaagctccaggagctggcggagaagggcgagctgcgcagcggctccctcacacccactgagagcatcatgtccctgggcacgcactcccgcttctccgagttcaccggcttctctggcatgtccttcagcagccgctcctacctgcctgagaagctccagatcgtgaagccgctggaaggttctgccacacttcaccactggcagcagttggcccaacctcaccttgggggcatcctggacccccggcccggtgtggtcaccaagggcttccggacgctggatgttgacctggacgaagtgtactgccttaacgactttgaagaagatgacacaggtgaccacatttctctcccacgcctagctacctccactccagttcagcacccagagacctcagcgcaccatcctgggaagtgcatgtctcagaccaactccaccttcaccttcaccacctgtcgcatcctgcatccttcagatgagctcactcgggtcacaccaagccttaactcagccccaactccagcttgtggcagcaccagccacttgaaatccacgccggtggccacaccatgcactccacggagactgagcctggctgagtccttcactaacacccgtgagtccacgaccaccatgagcacatccctggggctcgtgtggctgttgaaggagcggggcatttctgctgccgtgtacgacccccagagctgggacagggccggccggggctccctcctgcactcctacacgcccaagatggctgtgatcccctctactccgccgaactcgcctatgcagacacccacatcctccccaccctcctttgagttcaagtgcacgagccctccctacgacaatttcctggcttccaagccagccagctccatcctgagggaagtgagagaaaagaacgtccgcagcagcgagagccagaccgacgtgtccgtctccaacctcaacctcgtggacaaagtcaggaggtttggggtggccaaagtggtgaactcagggcgagcccatgtccccaccttgactgaggagcagggacccctcctctgtgggcccccggggccagcaccagcccttgttcccagaggcctggtacctgagggcctgcccctcagatgccccactgtcaccagtgccatcggtgggctgcagctcaatagtggcatccggcggaatcgcagcttccccaccatggtgggatctagcatgcagatgaaagctcctgtgactctcacctcgggcatcttgatgggtgctaagctctccaaacaaactagcttacggtgaggactggaggggggccggttgccctagaggagacccacgttctcctctcttgctcccacctccctctcttccccccacagtgcactccctccctctgcccttctctgtccaccccctcctaagctagacaaatcaacctcgtgcctaatggaggaagtgtggaaactttgtaaaatgtgtacataggacttggagaccttgtgtccgccctgctctttcttccgatcccacaggaagtgcccctgcactgtcatcactctcacgaggacgtcacctgtgctaacctgggggaaggtggggtcctttcttctttccttttgagaagcactgaaactcccaagtgtgttcttatcccatggataggaaaccagtgaattccgtggctggcacaccacgagctgtcacgcggcacgggtcataacacatctgggtgtcatcggacacctcacctcgcccaccctgtaggagcgtaaggagcctccatcctcagccacgtgcagctgacgtggctttcctgatcggagggcttttcttttatgggtggcccagcttcttcaagaccttcactgctctgcctcagtggacagtcgtttcttttttgaggtgtgaccttttgttttcatgccttccccttgaagtcatcctgtgttttgtaatcagctgtcaggccaaatgtctgacccgaaagagaatgtatttacactcatgctgcgttgttcagcagcccctctgtgttctgtgtgatttgttttatttttccttttttttacatatatatgcagggaagtaatggtactggtagtgtatgttttctatgtggttcaaatatgaatttcgaacacaccaagccgctaatgagatagcagcttttttctgggacccagagtcacaaccaaattgatttaagaccggacccaagacacctttaacaataggactgaaaggaaaaaggatagggaaaaagcttattaaagaaatgtgtcaacaccaaatgtagaggggaagaaccacaaccaggcataataccaaaccggttccagggggaaacaaggctttggtattccgctggctccagcgctttttctgaaacccgaggctggccagggtgctgtcaccgtgcggtctttgattgcagccattcaatgcccacatgcttttccttcttgtttcagaacagcacatggtcacaacaagatattttctttccctccaaagccttttgtctccttgtgcctctttttatccttaggaaaagatccaggtgcttgtgaaaagaatcatgaatgcaacaagggaggctggtcctgttgctgtcgccgattaagttttaaacttttatttattatttatgtctgccgtattttaaataaacattctcgttccttccagttccagtcatagtgtgtctgtggcattccagtccaaccatgtgacttatttattctaatttgagggctgcactgtacaccatggtgtcctgtgacaccgtgttccagacatttatggaaggaaaacatcccatataaatgaaactgtcatgctgtgtcctccccggcagcagaagatgtgtccttccattgagtgagggtaaccttatgtccaccaaggatactttgagaaagcccctaaggaacaagcctcagtcccacggtttcagactatttattctctgaacacaagagtattggttaattatgttctcagctctccctgctgttgtatgtgtgcattcactgcaagtaacttatatctttttatttgaatgtattttaaagcagtagatagaataacaaaggaatatgaaaaccatggactgaatggaccattttatgtattcagagagagaagccactcatcattgccagaaataccatgtaaaaattggcagttcagaggttgcaatacttagtatagtaaataaataaacggtcaacattgtgcaaccactaccaaaaagtgtgttgtaatgcatcaaaaatcaacacaattttattcactaatgagtatcaataaaataagttcaaatgatggaaacca

SEQ ID NO: 40263 - DNA, 3180 bp, Homo sapiens
agaaacctagtctggattgggtcggaagctggaatttggtgctctgcagaccagtgctcaaaattgtggttatttttgaggactcgccttcaatccagaacatttgcgtttcaccttcctcgcccagatccagttaacaaggtagctcatcacttcttgcatctgttgagtgacatgctggattttaatttttattgtggttgtacttggatgcaaggaatatgttttgttcctcccaatttagcgcaccatcctgggaagtgcatgtctcagaccaactccaccttcaccttcaccacctgtcgcatcctgcatccttcagatgagctcactcgggtcacaccaagccttaactcagccccaactccagcttgtggcagcaccagccacttgaaatccacgccggtggccacaccatgcactccacggagactgagcctggctgagtccttcactaacacccgtgagtccacgaccaccatgagcacatccctggggctcgtgtggctgttgaaggagcggggcatttctgctgccgtgtacgacccccagagctgggacagggccggccggggctccctcctgcactcctacacgcccaagatggctgtgatcccctctactccgccgaactcgcctatgcagacacccacatcctccccaccctcctttgagttcaagtgcacgagccctccctacgacaatttcctggcttccaagccagccagctccatcctgagggaagtgagagaaaagaacgtccgcagcagcgagagccagaccgacgtgtccgtctccaacctcaacctcgtggacaaagtcaggaggtttggggtggccaaagtggtgaactcagggcgagcccatgtccccaccttgactgaggagcagggacccctcctctgtgggcccccggggccagcaccagcccttgttcccagaggcctggtacctgagggcctgcccctcagatgccccactgtcaccagtgccatcggtgggctgcagctcaatagtggcatccggcggaatcgcagcttccccaccatggtgggatctagcatgcagatgaaagctcctgtgactctcacctcgggcatcttgatgggtgctaagctctccaaacaaactagcttacggtgaggactggaggggggccggttgccctagaggagacccacgttctcctctcttgctcccacctccctctcttccccccacagtgcactccctccctctgcccttctctgtccaccccctcctaagctagacaaatcaacctcgtgcctaatggaggaagtgtggaaactttgtaaaatgtgtacataggacttggagaccttgtgtccgccctgctctttcttccgatcccacaggaagtgcccctgcactgtcatcactctcacgaggacgtcacctgtgctaacctgggggaaggtggggtcctttcttctttccttttgagaagcactgaaactcccaagtgtgttcttatcccatggataggaaaccagtgaattccgtggctggcacaccacgagctgtcacgcggcacgggtcataacacatctgggtgtcatcggacacctcacctcgcccaccctgtaggagcgtaaggagcctccatcctcagccacgtgcagctgacgtggctttcctgatcggagggcttttcttttatgggtggcccagcttcttcaagaccttcactgctctgcctcagtggacagtcgtttcttttttgaggtgtgaccttttgttttcatgccttccccttgaagtcatcctgtgttttgtaatcagctgtcaggccaaatgtctgacccgaaagagaatgtatttacactcatgctgcgttgttcagcagcccctctgtgttctgtgtgatttgttttatttttccttttttttacatatatatgcagggaagtaatggtactggtagtgtatgttttctatgtggttcaaatatgaatttcgaacacaccaagccgctaatgagatagcagcttttttctgggacccagagtcacaaccaaattgatttaagaccggacccaagacacctttaacaataggactgaaaggaaaaaggatagggaaaaagcttattaaagaaatgtgtcaacaccaaatgtagaggggaagaaccacaaccaggcataataccaaaccggttccagggggaaacaaggctttggtattccgctggctccagcgctttttctgaaacccgaggctggccagggtgctgtcaccgtgcggtctttgattgcagccattcaatgcccacatgcttttccttcttgtttcagaacagcacatggtcacaacaagatattttctttccctccaaagccttttgtctccttgtgcctctttttatccttaggaaaagatccaggtgcttgtgaaaagaatcatgaatgcaacaagggaggctggtcctgttgctgtcgccgattaagttttaaacttttatttattatttatgtctgccgtattttaaataaacattctcgttccttccagttccagtcatagtgtgtctgtggcattccagtccaaccatgtgacttatttattctaatttgagggctgcactgtacaccatggtgtcctgtgacaccgtgttccagacatttatggaaggaaaacatcccatataaatgaaactgtcatgctgtgtcctccccggcagcagaagatgtgtccttccattgagtgagggtaaccttatgtccaccaaggatactttgagaaagcccctaaggaacaagcctcagtcccacggtttcagactatttattctctgaacacaagagtattggttaattatgttctcagctctccctgctgttgtatgtgtgcattcactgcaagtaacttatatctttttatttgaatgtattttaaagcagtagatagaataacaaaggaatatgaaaaccatggactgaatggaccattttatgtattcagagagagaagccactcatcattgccagaaataccatgtaaaaattggcagttcagaggttgcaatacttagtatagtaaataaataaacggtcaacattgtgcaaccactaccaaaaagtgtgttgtaatgcatcaaaaatcaacacaattttattcactaatgagtatcaataaaataagttcaaatgatggaaacca

SEQ ID NO: 40264 - DNA, 3483 bp, Homo sapiens
  misc_feature (14)..(14): n is a, c, g, or t
cactgacctggagncgagtttcatgagctgaatcgcgtaccacactcagcatggttctggagacggcgctgaggcggctgtccctgcgccgggagaactacctctcggagaggaggttctttgaggaggagcaagagaggaagctccaggagctggcggagaagggcgagctgcgcagcggctccctcacacccactgagagcatcatgtccctgggcacgcactcccgcttctccgagttcaccggcttctctggcatgtccttcagcagccgctcctacctgcctgagaagctccagatcgtgaagccgctggaaggttctgccacacttcaccactggcagcagttggcccaacctcaccttgggggcatcctggacccccggcccggtgtggtcaccaagggcttccggacgctggatgttgacctggacgaagtgtactgccttaacgactttgaagaagatgacacaggaagggaggtgcagcagcatcctggcagtcagtggtgacatgcggagagcccacgggtccaggcgtcctggtgcgcaccatcctgggaagtgcatgtctcagaccaactccaccttcaccttcaccacctgtcgcatcctgcatccttcagatgagctcactcgggtcacaccaagccttaactcagccccaactccagcttgtggcagcaccagccacttgaaatccacgccggtggccacaccatgcactccacggagactgagcctggctgagtccttcactaacacccgtgagtccacgaccaccatgagcacatccctggggctcgtgtggctgttgaaggagcggggcatttctgctgccgtgtacgacccccagagctgggacagggccggccggggctccctcctgcactcctacacgcccaagatggctgtgatcccctctactccgccgaactcgcctatgcagacacccacatcctccccaccctcctttgagttcaagtgcacgagccctccctacgacaatttcctggcttccaagccagccagctccatcctgagggaagtgagagaaaagaacgtccgcagcagcgagagccagaccgacgtgtccgtctccaacctcaacctcgtggacaaagtcaggaggtttggggtggccaaagtggtgaactcagggcgagcccatgtccccaccttgactgaggagcagggacccctcctctgtgggcccccggggccagcaccagcccttgttcccagaggcctggtacctgagggcctgcccctcagatgccccactgtcaccagtgccatcggtgggctgcagctcaatagtggcatccggcggaatcgcagcttccccaccatggtgggatctagcatgcagatgaaagctcctgtgactctcacctcgggcatcttgatgggtgctaagctctccaaacaaactagcttacggtgaggactggaggggggccggttgccctagaggagacccacgttctcctctcttgctcccacctccctctcttccccccacagtgcactccctccctctgcccttctctgtccaccccctcctaagctagacaaatcaacctcgtgcctaatggaggaagtgtggaaactttgtaaaatgtgtacataggacttggagaccttgtgtccgccctgctctttcttccgatcccacaggaagtgcccctgcactgtcatcactctcacgaggacgtcacctgtgctaacctgggggaaggtggggtcctttcttctttccttttgagaagcactgaaactcccaagtgtgttcttatcccatggataggaaaccagtgaattccgtggctggcacaccacgagctgtcacgcggcacgggtcataacacatctgggtgtcatcggacacctcacctcgcccaccctgtaggagcgtaaggagcctccatcctcagccacgtgcagctgacgtggctttcctgatcggagggcttttcttttatgggtggcccagcttcttcaagaccttcactgctctgcctcagtggacagtcgtttcttttttgaggtgtgaccttttgttttcatgccttccccttgaagtcatcctgtgttttgtaatcagctgtcaggccaaatgtctgacccgaaagagaatgtatttacactcatgctgcgttgttcagcagcccctctgtgttctgtgtgatttgttttatttttccttttttttacatatatatgcagggaagtaatggtactggtagtgtatgttttctatgtggttcaaatatgaatttcgaacacaccaagccgctaatgagatagcagcttttttctgggacccagagtcacaaccaaattgatttaagaccggacccaagacacctttaacaataggactgaaaggaaaaaggatagggaaaaagcttattaaagaaatgtgtcaacaccaaatgtagaggggaagaaccacaaccaggcataataccaaaccggttccagggggaaacaaggctttggtattccgctggctccagcgctttttctgaaacccgaggctggccagggtgctgtcaccgtgcggtctttgattgcagccattcaatgcccacatgcttttccttcttgtttcagaacagcacatggtcacaacaagatattttctttccctccaaagccttttgtctccttgtgcctctttttatccttaggaaaagatccaggtgcttgtgaaaagaatcatgaatgcaacaagggaggctggtcctgttgctgtcgccgattaagttttaaacttttatttattatttatgtctgccgtattttaaataaacattctcgttccttccagttccagtcatagtgtgtctgtggcattccagtccaaccatgtgacttatttattctaatttgagggctgcactgtacaccatggtgtcctgtgacaccgtgttccagacatttatggaaggaaaacatcccatataaatgaaactgtcatgctgtgtcctccccggcagcagaagatgtgtccttccattgagtgagggtaaccttatgtccaccaaggatactttgagaaagcccctaaggaacaagcctcagtcccacggtttcagactatttattctctgaacacaagagtattggttaattatgttctcagctctccctgctgttgtatgtgtgcattcactgcaagtaacttatatctttttatttgaatgtattttaaagcagtagatagaataacaaaggaatatgaaaaccatggactgaatggaccattttatgtattcagagagagaagccactcatcattgccagaaataccatgtaaaaattggcagttcagaggttgcaatacttagtatagtaaataaataaacggtcaacattgtgcaaccactaccaaaaagtgtgttgtaatgcatcaaaaatcaacacaattttattcactaatgagtatcaataaaataagttcaaatgatggaaacca

SEQ ID NO: 40265 - DNA, 3387 bp, Homo sapiens
actctagagactccccacctagggcgagctgataactcaggagcgagctgctaactcaggcgcgagctgctaactcagggcgagctgcgcagcggctccctcacacccactgagagcatcatgtccctgggcacgcactcccgcttctccgagttcaccggcttctctggcatgtccttcagcagccgctcctacctgcctgagaagctccagatcgtgaagccgctggaaggttctgccacacttcaccactggcagcagttggcccaacctcaccttgggggcatcctggacccccggcccggtgtggtcaccaagggcttccggacgctggatgttgacctggacgaagtgtactgccttaacgactttgaagaagatgacacaggtgaccacatttctctcccacgcctagctacctccactccagttcagcacccagagacctcagcgcaccatcctgggaagtgcatgtctcagaccaactccaccttcaccttcaccacctgtcgcatcctgcatccttcagatgagctcactcgggtcacaccaagccttaactcagccccaactccagcttgtggcagcaccagccacttgaaatccacgccggtggccacaccatgcactccacggagactgagcctggctgagtccttcactaacacccgtgagtccacgaccaccatgagcacatccctggggctcgtgtggctgttgaaggagcggggcatttctgctgccgtgtacgacccccagagctgggacagggccggccggggctccctcctgcactcctacacgcccaagatggctgtgatcccctctactccgccgaactcgcctatgcagacacccacatcctccccaccctcctttgagttcaagtgcacgagccctccctacgacaatttcctggcttccaagccagccagctccatcctgagggaagtgagagaaaagaacgtccgcagcagcgagagccagaccgacgtgtccgtctccaacctcaacctcgtggacaaagtcaggaggtttggggtggccaaagtggtgaactcagggcgagcccatgtccccaccttgactgaggagcagggacccctcctctgtgggcccccggggccagcaccagcccttgttcccagaggcctggtacctgagggcctgcccctcagatgccccactgtcaccagtgccatcggtgggctgcagctcaatagtggcatccggcggaatcgcagcttccccaccatggtgggatctagcatgcagatgaaagctcctgtgactctcacctcgggcatcttgatgggtgctaagctctccaaacaaactagcttacggtgaggactggaggggggccggttgccctagaggagacccacgttctcctctcttgctcccacctccctctcttccccccacagtgcactccctccctctgcccttctctgtccaccccctcctaagctagacaaatcaacctcgtgcctaatggaggaagtgtggaaactttgtaaaatgtgtacataggacttggagaccttgtgtccgccctgctctttcttccgatcccacaggaagtgcccctgcactgtcatcactctcacgaggacgtcacctgtgctaacctgggggaaggtggggtcctttcttctttccttttgagaagcactgaaactcccaagtgtgttcttatcccatggataggaaaccagtgaattccgtggctggcacaccacgagctgtcacgcggcacgggtcataacacatctgggtgtcatcggacacctcacctcgcccaccctgtaggagcgtaaggagcctccatcctcagccacgtgcagctgacgtggctttcctgatcggagggcttttcttttatgggtggcccagcttcttcaagaccttcactgctctgcctcagtggacagtcgtttcttttttgaggtgtgaccttttgttttcatgccttccccttgaagtcatcctgtgttttgtaatcagctgtcaggccaaatgtctgacccgaaagagaatgtatttacactcatgctgcgttgttcagcagcccctctgtgttctgtgtgatttgttttatttttccttttttttacatatatatgcagggaagtaatggtactggtagtgtatgttttctatgtggttcaaatatgaatttcgaacacaccaagccgctaatgagatagcagcttttttctgggacccagagtcacaaccaaattgatttaagaccggacccaagacacctttaacaataggactgaaaggaaaaaggatagggaaaaagcttattaaagaaatgtgtcaacaccaaatgtagaggggaagaaccacaaccaggcataataccaaaccggttccagggggaaacaaggctttggtattccgctggctccagcgctttttctgaaacccgaggctggccagggtgctgtcaccgtgcggtctttgattgcagccattcaatgcccacatgcttttccttcttgtttcagaacagcacatggtcacaacaagatattttctttccctccaaagccttttgtctccttgtgcctctttttatccttaggaaaagatccaggtgcttgtgaaaagaatcatgaatgcaacaagggaggctggtcctgttgctgtcgccgattaagttttaaacttttatttattatttatgtctgccgtattttaaataaacattctcgttccttccagttccagtcatagtgtgtctgtggcattccagtccaaccatgtgacttatttattctaatttgagggctgcactgtacaccatggtgtcctgtgacaccgtgttccagacatttatggaaggaaaacatcccatataaatgaaactgtcatgctgtgtcctccccggcagcagaagatgtgtccttccattgagtgagggtaaccttatgtccaccaaggatactttgagaaagcccctaaggaacaagcctcagtcccacggtttcagactatttattctctgaacacaagagtattggttaattatgttctcagctctccctgctgttgtatgtgtgcattcactgcaagtaacttatatctttttatttgaatgtattttaaagcagtagatagaataacaaaggaatatgaaaaccatggactgaatggaccattttatgtattcagagagagaagccactcatcattgccagaaataccatgtaaaaattggcagttcagaggttgcaatacttagtatagtaaataaataaacggtcaacattgtgcaaccactaccaaaaagtgtgttgtaatgcatcaaaaatcaacacaattttattcactaatgagtatcaataaaataagttcaaatgatggaaacca

SEQ ID NO: 40266 - DNA, 5022 bp, Homo sapiens
gccaggagctttgtgtacacccctccacttcagctgagccagggcatgtctgcggcccaggccagggcgcagtgtgtgccctgggggcccaggcctgcatggctcctctgggtagggggtcgggggcacccccaaggatggtcccttagggtgatgttttggctttggggtgacttcagcaatgtccctgcgagacaagggcggggaagaagaatgttttgaatacgactgccaggatgaagagaggaagccaacccacaggcagcatgacacccaggacctcttggaagaggttttatgtgctgaaagagttggccagatgactaagacatataatgacatagatgctgtcactcggcttcttgaggagaaagagcgggatttagaattggccgctcgcatcggccagtcgttgttgaagaagaacaagaccctaaccgagaggaacgagctgctggaggagcaggtggaacacatcagggaggaggtgtctcagctccggcatgagctgtccatgaaggatgagctgcttcagttctacaccagcgctgcggaggagagtgagcccgagtccgtttgctcaaccccgttgaagaggaatgagtcgtcctcctcagtccagaattactttcatttggattctcttcaaaagaagctgaaagaccttgaagaggagaatgttgtacttcgatccgaggccagccagctgaagacagagaccatcacctatgaggagaaggagcagcagctggtcaatgactgcgtgaaggagctgagggatgccaatgtccagattgctagtatctcagaggaactggccaagaagacggaagatgctgcccgccagcaagaggagatcacacacctgctatcgcaaatagttgatttgcagaaaaaggcaaaagcttgcgcagtggaaaatgaagaacttgtccagcatctgggggctgctaaggatgcccagcggcagctcacagccgagctgcgtgagctggaggacaagtacgcagagtgcatggagatgctgcatgaggcgcaggaggagctgaagaacctccggaacaaaaccatgcccaataccacgtctcggcgctaccactcgctgggcctgtttcccatggattccttggcagcagagattgagggaacgatgcgcaaggagctgcagttggaagaggccgagtctccagacatcactcaccagaagcgtgtctttgagacagtaagaaacatcaaccaggttgtcaagcagagatctctgaccccttctcccatgaacatccccggctccaaccagtcctcggccatgaactccctcctgtccagctgcgtcagcaccccccggtccagcttctacggcagcgacataggcaacgtcgtcctcgacaacaagaccaacagcatcattctggaaacagaggcagccgacctgggaaacgatgagcggagtaagaagccggggacgccgggcaccccaggctcccacgacctggagacggcgctgaggcggctgtccctgcgccgggagaactacctctcggagaggaggttctttgaggaggagcaagagaggaagctccaggagctggcggagaagggcgagctgcgcagcggctccctcacacccactgagagcatcatgtccctgggcacgcactcccgcttctccgagttcaccggcttctctggcatgtccttcagcagccgctcctacctgcctgagaagctccagatcgtgaagccgctggaaggttctgccacacttcaccactggcagcagttggcccaacctcaccttgggggcatcctggacccccggcccggtgtggtcaccaagggcttccggacgctggatgttgacctggacgaagtgtactgccttaacgactttgaagaagatgacacaggtgaccacatttctctcccacgcctagctacctccactccagttcagcacccagagacctcagcgcaccatcctgggaagtgcatgtctcagaccaactccaccttcaccttcaccacctgtcgcatcctgcatccttcagatgagctcactcgggtcacaccaagccttaactcagccccaactccagcttgtggcagcaccagccacttgaaatccacgccggtggccacaccatgcactccacggagactgagcctggctgagtccttcactaacacccgtgagtccacgaccaccatgagcacatccctggggctcgtgtggctgttgaaggagcggggcatttctgctgccgtgtacgacccccagagctgggacagggccggccggggctccctcctgcactcctacacgcccaagatggctgtgatcccctctactccgccgaactcgcctatgcagacacccacatcctccccaccctcctttgagttcaagtgcacgagccctccctacgacaatttcctggcttccaagccagccagctccatcctgagggaagtgagagaaaagaacgtccgcagcagcgagagccagaccgacgtgtccgtctccaacctcaacctcgtggacaaagtcaggaggtttggggtggccaaagtggtgaactcagggcgagcccatgtccccaccttgactgaggagcagggacccctcctctgtgggcccccggggccagcaccagcccttgttcccagaggcctggtacctgagggcctgcccctcagatgccccactgtcaccagtgccatcggtgggctgcagctcaatagtggcatccggcggaatcgcagcttccccaccatggtgggatctagcatgcagatgaaagctcctgtgactctcacctcgggcatcttgatgggtgctaagctctccaaacaaactagcttacggtgaggactggaggggggccggttgccctagaggagacccacgttctcctctcttgctcccacctccctctcttccccccacagtgcactccctccctctgcccttctctgtccaccccctcctaagctagacaaatcaacctcgtgcctaatggaggaagtgtggaaactttgtaaaatgtgtacataggacttggagaccttgtgtccgccctgctctttcttccgatcccacaggaagtgcccctgcactgtcatcactctcacgaggacgtcacctgtgctaacctgggggaaggtggggtcctttcttctttccttttgagaagcactgaaactcccaagtgtgttcttatcccatggataggaaaccagtgaattccgtggctggcacaccacgagctgtcacgcggcacgggtcataacacatctgggtgtcatcggacacctcacctcgcccaccctgtaggagcgtaaggagcctccatcctcagccacgtgcagctgacgtggctttcctgatcggagggcttttcttttatgggtggcccagcttcttcaagaccttcactgctctgcctcagtggacagtcgtttcttttttgaggtgtgaccttttgttttcatgccttccccttgaagtcatcctgtgttttgtaatcagctgtcaggccaaatgtctgacccgaaagagaatgtatttacactcatgctgcgttgttcagcagcccctctgtgttctgtgtgatttgttttatttttccttttttttacatatatatgcagggaagtaatggtactggtagtgtatgttttctatgtggttcaaatatgaatttcgaacacaccaagccgctaatgagatagcagcttttttctgggacccagagtcacaaccaaattgatttaagaccggacccaagacacctttaacaataggactgaaaggaaaaaggatagggaaaaagcttattaaagaaatgtgtcaacaccaaatgtagaggggaagaaccacaaccaggcataataccaaaccggttccagggggaaacaaggctttggtattccgctggctccagcgctttttctgaaacccgaggctggccagggtgctgtcaccgtgcggtctttgattgcagccattcaatgcccacatgcttttccttcttgtttcagaacagcacatggtcacaacaagatattttctttccctccaaagccttttgtctccttgtgcctctttttatccttaggaaaagatccaggtgcttgtgaaaagaatcatgaatgcaacaagggaggctggtcctgttgctgtcgccgattaagttttaaacttttatttattatttatgtctgccgtattttaaataaacattctcgttccttccagttccagtcatagtgtgtctgtggcattccagtccaaccatgtgacttatttattctaatttgagggctgcactgtacaccatggtgtcctgtgacaccgtgttccagacatttatggaaggaaaacatcccatataaatgaaactgtcatgctgtgtcctccccggcagcagaagatgtgtccttccattgagtgagggtaaccttatgtccaccaaggatactttgagaaagcccctaaggaacaagcctcagtcccacggtttcagactatttattctctgaacacaagagtattggttaattatgttctcagctctccctgctgttgtatgtgtgcattcactgcaagtaacttatatctttttatttgaatgtattttaaagcagtagatagaataacaaaggaatatgaaaaccatggactgaatggaccattttatgtattcagagagagaagccactcatcattgccagaaataccatgtaaaaattggcagttcagaggttgcaatacttagtatagtaaataaataaacggtcaacattgtgcaaccactaccaaaaagtgtgttgtaatgcatcaaaaatcaacacaattttattcactaatgagtatcaataaaataagttcaaatgatggaaaccacactggtattctgatttgtattttgtttttatcttttcatcaaggagacgatctctttatgtaagacttgaaagtgtttagctctttgcaaaattaaatgaaaggcatatacttca

SEQ ID NO: 40267 - DNA, 1215 bp, Homo sapiens
ctcggtaccgaaatgtgcactcttctatatctacacactcgaaaaagagaaaccagctgcggtactgtcccatttttgtcatcagcaccagtgtccgtcaggaaggcaggtggtggtgcagaaacatgatgcctggctgattttcgtggctaaaggggtaggccttatgttgattgggatgctcccctacagccttacaggtagaatagaaggtgagttctggaagtgcaaagaagcaccattaagtgcatcttctagaagttgtacagaaggactaaagcttatcaagtcaacaaagaacttaccttggaggatagagagagagaagggaccaattatgaggactgacatcctggccactctccttaaaataaacactgacatttttcttgcttgttctctctgtactcaaacctgtggcaaattcatcctagcaacgttatttgacgaggggcatgaacatttatagttgaaactgtagaaagggtcaggttggaggtgtgtaataaaaaagaattacctaggttgccaaaggtaatttaggaagggtctgatcatttagatgagagttctttggggcttattttctgggtaaggctcatctttaaaaactggcttcagaggggagaggggagaacaatgaattggctctattttctctattgggaattacaggaccattttgattcttagaatgtaaaaagcatatcgctaagtaaatcatcctggaggtcccaagtagctctatgcctgcaatcatggagacacaggcagacagataagcttcatggggaaggcatggggcatcctctgtcttgggatttgtatccatggtggtctggtccctgccttttaatccgtcctctacgcttgggcttttctgttaccaaacagcactatcccaggaactattgtctgcctgggaacactcagtagggagacactttggagacaggaggtgatgaacctttttatgtgcagctggtatgatagaaggaaattgggaaaacttgtatgctaggcacttttgtccagagcctgctgtcccatggagaaaaagttttaagcactgaaaaaatttgattaatgtatttaaatgtattatttgaagcatcattcacttgttgatttttacaatcccatgtcttaaaaaggatgaatccatgttattgtattgtaaataatttagatgattaaaatggattgtttaaaaag

SEQ ID NO: 40268 - DNA, 2160 bp, Homo sapiens
gccaggagctttgtgtacacccctccacttcagctgagccagggcatgtctgcggcccaggccagggcgcagtgtgtgccctgggggcccaggcctgcatggctcctctgggtagggggtcgggggcacccccaaggatggtcccttagggtgatgttttggctttggggtgacttcagcaatgtccctgcgagacaagggcggggaagaagaatgttttgaatacgactgccaggatgaagagaggaagccaacccacaggcagcatgacacccaggacctcttggaagaggttttatgtgctgaaagagttggccagatgactaagacatataatgacatagatgctgtcactcggcttcttgaggagaaagagcgggatttagaattggccgctcgcatcggccagtcgttgttgaagaagaacaagaccctaaccgagaggaacgagctgctggaggagcaggtggaacacatcagggaggaggtgtctcagctccggcatgagctgtccatgaaggatgagctgcttcagttctacaccagcgctgcggaggagagtgagcccgagtccgtttgctcaaccccgttgaagaggaatgagtcgtcctcctcagtccagaattactttcatttggattctcttcaaaagaagctgaaagaccttgaagaggagaatgttgtacttcgatccgaggccagccagctgaagacagagaccatcacctatgaggagaaggagcagcagctggtcaatgactgcgtgaaggagctgagggatgccaatgtccagattgctagtatctcagaggaactggccaagaagacggaagatgctgcccgccagcaagaggagatcacacacctgctatcgcaaatagttgatttgcagaaaaaggcaaaagcttgcgcagtggaaaatgaagaacttgtccagcatctgggggctgctaaggatgcccagcggcagctcacagccgagctgcgtgagctggaggacaagtacgcagagtgcatggagatgctgcatgaggcgcaggaggagctgaagaacctccggaacaaaaccatgcccaataccacgtctcggcgctaccactcgctgggcctgtttcccatggattccttggcagcagagattgagggaacgatgcgcaaggagctgcagttggaagaggccgagtctccagacatcactcaccagaagcgtgtctttgagacagtaagaaacatcaaccaggttgtcaagcagagatctctgaccccttctcccatgaacatccccggctccaaccagtcctcggccatgaactccctcctgtccagctgcgtcagcaccccccggtccagcttctacggcagcgacataggcaacgtcgtcctcgacaacaagaccaacagcatcattctggaaacagaggcagccgacctgggaaacgatgagcggagtaagaagccggggacgccgggcaccccaggctcccacgacctggagacggcgctgaggcggctgtccctgcgccgggagaactacctctcggagaggaggttctttgaggaggagcaagagaggaagctccaggagctggcggagaagggcgagctgcgcagcggctccctcacacccactgagagcatcatgtccctgggcacgcactcccgcttctccgagttcaccggcttctctggcatgtccttcagcagccgctcctacctgcctgagaagctccagatcgtgaagccgctggaaggttctgccacacttcaccactggcagcagttggcccaacctcaccttgggggcatcctggacccccggcccggtgtggtcaccaagggcttccggacgctggatgttgacctggacgaagtgtactgccttaacgactttgaagaagatgacacaggtgaccacatttctctcccacgcctagctacctccactccagttcagcacccagagacctcaggtgagaggtcccaagcacgtgtgactgtctcaggcagcagaagttacccgagccggcctcaggcttccccagaggagatgcaggagccgccagcggccacggaggaggaggaggaggagcataaagcacgaggtccctcagcaccttttggctcattcccactggggcgctgaacagctgttgcagagct

SEQ ID NO: 40269 - DNA, 307 bp, Homo sapiens
agaacttgctctcttcctgcacccagggctttaggaatcagcccgttgcttctctgtagcaagcatgaggagcctctgatgatcccagtcttgggtgactcactgtctctctgttgtgtctcaaggaagggaggtgcagcagcatcctggcagtcagtggtgacatgcggagagcccacgggtccaggcgtcctggtggtattttggaagggccaaatctctggctttagcactttggaaacttgttgatcttccttggtcttctacggctattcattgcttctggggaatggtgacttgtgaattt

SEQ ID NO: 40270 - DNA, 445 bp, Homo sapiens
cacgcatggacagatggtgaattatgaattcctttgttatttctagatgcttatgttttcctcatttgacactgagcaccattgactccttcaggaaacacaggtcttttgaatctctgttctccctctttccttttgtagaaagagcgggatttagaattggccgctcgcatcggccagtcgttgttgaagaagaacaagaccctaaccgagaggaacgagctgctggaggagcaggtggaacacatcagggaggaggtaagacattggaggccgaggcttccagaggggcccgccacaggcctgggagctggaggcatggctgaaggagatgagagaatggagtcctagttggaaggacgctcccgagggcacgaccgcggcctgagcccagaactgtctcttctgaaacgttcacctggggactaaaagccaccttccgcag

SEQ ID NO: 40271 - DNA, 2967 bp, Homo sapiens
acattaagactatatgaagaagatgacacagcgcaccatcctgggaagtgcatgtctcagaccaactccaccttcaccttcaccacctgtcgcatcctgcatccttcagatgagctcactcgggtcacaccaagccttaactcagccccaactccagcttgtggcagcaccagccacttgaaatccacgccggtggccacaccatgcactccacggagactgagcctggctgagtccttcactaacacccgtgagtccacgaccaccatgagcacatccctggggctcgtgtggctgttgaaggagcggggcatttctgctgccgtgtacgacccccagagctgggacagggccggccggggctccctcctgcactcctacacgcccaagatggctgtgatcccctctactccgccgaactcgcctatgcagacacccacatcctccccaccctcctttgagttcaagtgcacgagccctccctacgacaatttcctggcttccaagccagccagctccatcctgagggaagtgagagaaaagaacgtccgcagcagcgagagccagaccgacgtgtccgtctccaacctcaacctcgtggacaaagtcaggaggtttggggtggccaaagtggtgaactcagggcgagcccatgtccccaccttgactgaggagcagggacccctcctctgtgggcccccggggccagcaccagcccttgttcccagaggcctggtacctgagggcctgcccctcagatgccccactgtcaccagtgccatcggtgggctgcagctcaatagtggcatccggcggaatcgcagcttccccaccatggtgggatctagcatgcagatgaaagctcctgtgactctcacctcgggcatcttgatgggtgctaagctctccaaacaaactagcttacggtgaggactggaggggggccggttgccctagaggagacccacgttctcctctcttgctcccacctccctctcttccccccacagtgcactccctccctctgcccttctctgtccaccccctcctaagctagacaaatcaacctcgtgcctaatggaggaagtgtggaaactttgtaaaatgtgtacataggacttggagaccttgtgtccgccctgctctttcttccgatcccacaggaagtgcccctgcactgtcatcactctcacgaggacgtcacctgtgctaacctgggggaaggtggggtcctttcttctttccttttgagaagcactgaaactcccaagtgtgttcttatcccatggataggaaaccagtgaattccgtggctggcacaccacgagctgtcacgcggcacgggtcataacacatctgggtgtcatcggacacctcacctcgcccaccctgtaggagcgtaaggagcctccatcctcagccacgtgcagctgacgtggctttcctgatcggagggcttttcttttatgggtggcccagcttcttcaagaccttcactgctctgcctcagtggacagtcgtttcttttttgaggtgtgaccttttgttttcatgccttccccttgaagtcatcctgtgttttgtaatcagctgtcaggccaaatgtctgacccgaaagagaatgtatttacactcatgctgcgttgttcagcagcccctctgtgttctgtgtgatttgttttatttttccttttttttacatatatatgcagggaagtaatggtactggtagtgtatgttttctatgtggttcaaatatgaatttcgaacacaccaagccgctaatgagatagcagcttttttctgggacccagagtcacaaccaaattgatttaagaccggacccaagacacctttaacaataggactgaaaggaaaaaggatagggaaaaagcttattaaagaaatgtgtcaacaccaaatgtagaggggaagaaccacaaccaggcataataccaaaccggttccagggggaaacaaggctttggtattccgctggctccagcgctttttctgaaacccgaggctggccagggtgctgtcaccgtgcggtctttgattgcagccattcaatgcccacatgcttttccttcttgtttcagaacagcacatggtcacaacaagatattttctttccctccaaagccttttgtctccttgtgcctctttttatccttaggaaaagatccaggtgcttgtgaaaagaatcatgaatgcaacaagggaggctggtcctgttgctgtcgccgattaagttttaaacttttatttattatttatgtctgccgtattttaaataaacattctcgttccttccagttccagtcatagtgtgtctgtggcattccagtccaaccatgtgacttatttattctaatttgagggctgcactgtacaccatggtgtcctgtgacaccgtgttccagacatttatggaaggaaaacatcccatataaatgaaactgtcatgctgtgtcctccccggcagcagaagatgtgtccttccattgagtgagggtaaccttatgtccaccaaggatactttgagaaagcccctaaggaacaagcctcagtcccacggtttcagactatttattctctgaacacaagagtattggttaattatgttctcagctctccctgctgttgtatgtgtgcattcactgcaagtaacttatatctttttatttgaatgtattttaaagcagtagatagaataacaaaggaatatgaaaaccatggactgaatggaccattttatgtattcagagagagaagccactcatcattgccagaaataccatgtaaaaattggcagttcagaggttgcaatacttagtatagtaaataaataaacggtcaacattgtgcaaccactaccaaaaagtgtgttgtaatgcatcaaaaatcaacacaattttattcactaatgagtatcaataaaataagttcaaatgatggaaacca

SEQ ID NO: 40272 - DNA, 4257 bp, Homo sapiens
gccaggagctttgtgtacacccctccacttcagctgagccagggcatgtctgcggcccaggccagggcgcagtgtgtgccctgggggcccaggcctgcatggctcctctgggtagggggtcgggggcacccccaaggatggtcccttagggtgatgttttggctttggggtgacttcagcaatgtccctgcgagacaagggcggggaagaagaatgttttgaatacgactgccaggatgaagagaggaagccaacccacaggcagcatgacacccaggacctcttggaagaggttttatgtgctgaaagagttggccagatgactaagacatataatgacatagatgctgtcactcggcttcttgaggagaaagagcgggatttagaattggccgctcgcatcggccagtcgttgttgaagaagaacaagaccctaaccgagaggaacgagctgctggaggagcaggtggaacacatcagggaggaggtgtctcagctccggcatgagctgtccatgaaggatgagctgcttcagttctacaccagcgctgcggaggagagtgagcccgagtccgtttgctcaaccccgttgaagaggaatgagtcgtcctcctcagtccagaattactttcatttggattctcttcaaaagaagctgaaagaccttgaagaggagaatgttgtacttcgatccgaggccagccagctgaagacagagaccatcacctatgaggagaaggagcagcagctggtcaatgactgcgtgaaggagctgagggatgccaatgtccagattgctagtatctcagaggaactggccaagaagacggaagatgctgcccgccagcaagaggagatcacacacctgctatcgcaaatagttgatttgcagaaaaaggcaaaagcttgcgcagtggaaaatgaagaacttgtccagcatctgggggctgctaaggatgcccagcggcagctcacagccgagctgcgtgagctggaggacaagtacgcagagtgcatggagatgctgcatgaggcgcaggaggagctgaagaacctccggaacaaaaccatgcccaataccacgtctcggcgctaccactcgctgggcctgtttcccatggattccttggcagcagagattgagggaacgatgcgcaaggagctgcagttggaagaggccgagtctccagacatcactcaccagaagcgtgtctttgagacagtaagaaacatcaaccaggttgtcaagcagagatctctgaccccttctcccatgaacatccccggctccaaccagtcctcggccatgaactccctcctgtccagctgcgtcagcaccccccggtccagcttctacggcagcgacataggcaacgtcgtcctcgacaacaagaccaacagcatcattctggaaacagaggcagccgacctgggaaacgatgagcggagtaagaagccggggacgccgggcaccccaggctcccacgacctggagacggcgctgaggcggctgtccctgcgccgggagaactacctctcggagaggaggttctttgaggaggagcaagagaggaagctccaggagctggcggagaagggcgagctgcgcagcggctccctcacacccactgagagcatcatgtccctgggcacgcactcccgcttctccgagttcaccggcttctctggcatgtccttcagcagccgctcctacctgcctgagaagctccagatcgtgaagccgctggaaggttctgccacacttcaccactggcagcagttggcccaacctcaccttgggggcatcctggacccccggcccggtgtggtcaccaagggcttccggacgctggatgttgacctggacgaagtgtactgccttaacgactttgaagaagatgacacaggtgaccacatttctctcccacgcctagctacctccactccagttcagcacccagagacctcagcgcaccatcctgggaagtgcatgtctcagaccaactccaccttcaccttcaccacctgtcgcatcctgcatccttcagatgagctcactcgggtcacaccaagccttaactcagccccaactccagcttgtggcagcaccagccacttgaaatccacgccggtggccacaccatgcactccacggagactgagcctggctgagtccttcactaacacccgtgagtccacgaccaccatgagcacatccctggggctcgtgtggctgttgaaggagcggggcatttctgctgccgtgtacgacccccagagctgggacagggccggccggggctccctcctgcactcctacacgcccaagatggctgtgatcccctctactccgccgaactcgcctatgcagacacccacatcctccccaccctcctttgagttcaagtgcacgagccctccctacgacaatttcctggcttccaagccagccagctccatcctgagggaagtgagagaaaagaacgtccgcagcagcgagagccagaccgacgtgtccgtctccaacctcaacctcgtggacaaagtcaggaggtttggggtggccaaagtggtgaactcagggcgagcccatgtccccaccttgactgaggagcagggacccctcctctgtgggcccccggggccagcaccagcccttgttcccagaggcctggtacctgagggcctgcccctcagatgccccactgtcaccagtgccatcggtgggctgcagctcaatagtggcatccggcggaatcgcagcttccccaccatggtgggatctagcatgcagatgaaagctcctgtgactctcacctcgggcatcttgatgggtgctaagctctccaaacaaactagcttacggtgaggactggaggggggccggttgccctagaggagacccacgttctcctctcttgctcccacctccctctcttccccccacagtgcactccctccctctgcccttctctgtccaccccctcctaagctagacaaatcaacctcgtgcctaatggaggaagtgtggaaactttgtaaaatgtgtacataggacttggagaccttgtgtccgccctgctctttcttccgatcccacaggaagtgcccctgcactgtcatcactctcacgaggacgtcacctgtgctaacctgggggaaggtggggtcctttcttctttccttttgagaagcactgaaactcccaagtgtgttcttatcccatggataggaaaccagtgaattccgtggctggcacaccacgagctgtcacgcggcacgggtcataacacatctgggtgtcatcggacacctcacctcgcccaccctgtaggagcgtaaggagcctccatcctcagccacgtgcagctgacgtggctttcctgatcggagggcttttcttttatgggtggcccagcttcttcaagaccttcactgctctgcctcagtggacagtcgtttcttttttgaggtgtgaccttttgttttcatgccttccccttgaagtcatcctgtgttttgtaatcagctgtcaggccaaatgtctgacccgaaagagaatgtatttacactcatgctgcgttgttcagcagcccctctgtgttctgtgtgatttgttttatttttccttttttttacatatatatgcagggaagtaatggtactggtagtgtatgttttctatgtggttcaaatatgaatttcgaacacaccaagccgctaatgagatagcagcttttttctgggacccagagtcacaaccaaattgatttaagaccggacccaagacacctttaacaataggactgaaaggaaaaaggatagggaaaaagcttattaaagaaatgtgtcaacaccaaatgtagaggggaagaaccacaaccaggcataataccaaaccggttccagggggaaacaaggctttggtattccgctggctccagcgctttttctgaaacccgaggctggccagggtgctgtcaccgtgcggtctttgattgcagccattcaatgcccacatgcttttccttcttgtttcagaacagcacatggtcacaacaagatattttctttccctccaaagccttttgtctccttgtgcctctttttatccttaggaaaagatccaggtgcttgtgaaaagaatcatgaatgcaacaagggaggctggtcctgttgctgtcgccgattaagttttaaacttttatttattatttatgtctgccgtattttaaataaacattctcgttccttcca

SEQ ID NO: 40273 - DNA, 2977 bp, Homo sapiens
gccaggagctttgtgtacacccctccacttcagctgagccagggcatgtctgcggcccaggccagggcgcagtgtgtgccctgggggcccaggcctgcatggctcctctgggtagggggtcgggggcacccccaaggatggtcccttagggtgatgttttggctttggggtgacttcagcaatgtccctgcgagacaagggcggggaagaagaatgttttgaatacgactgccaggatgaagagaggaagccaacccacaggcagcatgacacccaggacctcttggaagaggttttatgtgctgaaagagttggccagatgactaagacatataatgacatagatgctgtcactcggcttcttgaggagaaagagcgggatttagaattggccgctcgcatcggccagtcgttgttgaagaagaacaagaccctaaccgagaggaacgagctgctggaggagcaggtggaacacatcagggaggaggtgtctcagctccggcatgagctgtccatgaaggatgagctgcttcagttctacaccagcgctgcggaggagagtgagcccgagtccgtttgctcaaccccgttgaagaggaatgagtcgtcctcctcagtccagaattactttcatttggattctcttcaaaagaagctgaaagaccttgaagaggagaatgttgtacttcgatccgaggccagccagctgaagacagagaccatcacctatgaggagaaggagcagcagctggtcaatgactgcgtgaaggagctgagggatgccaatgtccagattgctagtatctcagaggaactggccaagaagacggaagatgctgcccgccagcaagaggagatcacacacctgctatcgcaaatagttgatttgcagaaaaaggcaaaagcttgcgcagtggaaaatgaagaacttgtccagcatctgggggctgctaaggatgcccagcggcagctcacagccgagctgcgtgagctggaggacaagtacgcagagtgcatggagatgctgcatgaggcgcaggaggagctgaagaacctccggaacaaaaccatgcccaataccacgtctcggcgctaccactcgctgggcctgtttcccatggattccttggcagcagagattgagggaacgatgcgcaaggagctgcagttggaagaggccgagtctccagacatcactcaccagaagcgtgtctttgagacagtaagaaacatcaaccaggttgtcaagcagagatctctgaccccttctcccatgaacatccccggctccaaccagtcctcggccatgaactccctcctgtccagctgcgtcagcaccccccggtccagcttctacggcagcgacataggcaacgtcgtcctcgacaacaagaccaacagcatcattctggaaacagaggcagccgacctgggaaacgatgagcggagtaagaagccggggacgccgggcaccccaggctcccacgacctggagacggcgctgaggcggctgtccctgcgccgggagaactacctctcggagaggaggttctttgaggaggagcaagagaggaagctccaggagctggcggagaagggcgagctgcgcagcggctccctcacacccactgagagcatcatgtccctgggcacgcactcccgcttctccgagttcaccggcttctctggcatgtccttcagcagccgctcctacctgcctgagaagctccagatcgtgaagccgctggaaggttctgccacacttcaccactggcagcagttggcccaacctcaccttgggggcatcctggacccccggcccggtgtggtcaccaagggcttccggacgctggatgttgacctggacgaagtgtactgccttaacgactttgaagaagatgacacaggtgaccacatttctctcccacgcctagctacctccactccagttcagcacccagagacctcagcgcaccatcctgggaagtgcatgtctcagaccaactccaccttcaccttcaccacctgtcgcatcctgcatccttcagatgagctcactcgggtcacaccaagccttaactcagccccaactccagcttgtggcagcaccagccacttgaaatccacgccggtggccacaccatgcactccacggagactgagcctggctgagtccttcactaacacccgtgagtccacgaccaccatgagcacatccctggggctcgtgtggctgttgaaggagcggggcatttctgctgccgtgtacgacccccagagctgggacagggccggccggggctccctcctgcactcctacacgcccaagatggctgtgatcccctctactccgccgaactcgcctatgcagacacccacatcctccccaccctcctttgagttcaagtgcacgagccctccctacgacaatttcctggcttccaagccagccagctccatcctgagggaagtgagagaaaagaacgtccgcagcagcgagagccagaccgacgtgtccgtctccaacctcaacctcgtggacaaagtcaggaggtttggggtggccaaagtggtgaactcagggcgagcccatgtccccaccttgactgaggagcagggacccctcctctgtgggcccccggggccagcaccagcccttgttcccagaggcctggtacctgagggcctgcccctcagatgccccactgtcaccagtgccatcggtgggctgcagctcaatagtggcatccggcggaatcgcagcttccccaccatggtgggatctagcatgcagatgaaagctcctgtgactctcacctcgggcatcttgatgggtgctaagctctccaaacaaactagcttacggtgaggactggaggggggccggttgccctagaggagacccacgttctcctctcttgctcccacctccctgagctgcagcccaccgatggcactggtgacagtggggcatctg

SEQ ID NO: 40274 - DNA, 435 bp, Homo sapiens
gcattttcgtctaatcctccaaagttcttgcaccttcaagaccctcgtacagacattcattattcttcctcaatagaagaagggcggtttgttctcgagaagtgcgagctatgcgtgacatgcaaacaggaggtcgagggtcagcatgcatagcccagtctatcatctccgtgaagtggagcgcaatgaaataccagaattagctgcttcatgtcttaaaatgagggaagagaaaagcccaagcaaaggcaaggggcatcaatcgcagtgcgcctggtaacaaggttttggagggaaatctgtgtacctctcctgcgcgcactagcgcctttcaagatactctaaaaagaaaaaagtcccctttcccccaaaccggggaccaaccacctcgcccccagcggcccaccctccagcttcttcgccccaacaaagact

SEQ ID NO: 40275 - DNA, 1023 bp, Homo sapiens
  misc_feature (459)..(459): n is a, c, g, or t
gttttaccataatgatgacacaggtgcttaaccagctccgtgagctattggggtggctccttgccttgatttagtcttgtgcccacacactgacccatgcagacttagccatgcatccagcacaaattacgctattttacatgtttggtttaatgtattcgtacctgctagacattgtagccaaaagattgtttgctgcctaatcctagccagctcttagggtgactgcctaagcctgtattgctggcttcacaagtttttttgtttcaggtaaataaaaatcaaagagcgttcgaggcagccgcattgactcaccttgcagacaagcaagcagagccgcagagcagtgacccgtgcccagcgcctcgcagctagagctggattggaatccagggctttgcaggcttcctgcttcactcaatcctctttctgttgcctctggcctcaaggtgttggccntgggaggaagtagcagattaaattccatgggcacgaagtccgtagctgacgaatacttaatatgttgcagtttcacagtgaaagttggcaagtccagggtgggaacatgcctcaagcagctgagtcttctggattttacttctgttctttgcctctcaatttttgattttgttatataaaaagcaaatcagtaactattgcattatattctgcagtgactcaacagcgacacttaattcagccaacccaaggtttactgaactgctcgtggtgcccgggaaccgtgctgggataggatacagggacccaacccagtcctgatcattagcttagccagagaggtaaactgactgacaatcaatctgcccagggatcaattactatggaagctcatagtgtgggcccctaacccagactgtgggtctgaggaggtctcctggaggtagtgctatcctaacagagacctgaagggtacttggaatccagccacagaatactatttaccatctcattttactctcatgagaattctccccactgtaggcaggatgggtgttgatttaa

SEQ ID NO: 40276 - DNA, 1276 bp, Homo sapiens
  misc_feature (712)..(712): n is a, c, g, or t
agaccaaggcaggattagagtttgggactttcagatcccaccccccgacctccggggaggagagagggattgaaggttaagttgatcttcaatggccaatgatttaatcaatcatgcctgtgtaatgaagccttcataaaaacctaaaaaaggacggggtttggagagcttcctgtaagcgaacccgtgaatggttccaggatggatggcgcaccctggaaagggcgtggaagctccgagccccttcccacagactttcccccatccatctcttcatctggtgttcatctgatagcctttgtaatgtccttaagtagtaaatccggaaaacagtggaggaagaagagaatcaccacatatcgtatttagaggtcctgcagaaagggcagagcgagtttcatgtttgagtgcagcggatgcatgggcaaagcattacacagccgctccatggaagtgacaatgagccttgtctttcacacgtaactccaggaaccaggggaaacaaaaccaattccacccagaggtaaataaaaatcaaagagcgttcgaggcagccgcattgactcaccttgcagacaagcaagcagagccgcagagcagtgacccgtgcccagcgcctcgcagctagagctggattggaatccagggctttgcaggcttcctgcttcactcaatcctctttctgttgcctctggcctcaaggtgttggccntgggaggaagtagcagattaaattccatgggcacgaagtccgtagctgacgaatacttaatatgttgcagtttcacagtgaaagttggcaagtccagggtgggaacatgcctcaagcagctgagtcttctggattttacttctgttctttgcctctcaatttttgattttgttatataaaaagcaaatcagtaactattgcattatattctgcagtgactcaacagcgacacttaattcagccaacccaaggtttactgaactgctcgtggtgcccgggaaccgtgctgggataggatacagggacccaacccagtcctgatcattagcttagccagagaggtaaactgactgacaatcaatctgcccagggatcaattactatggaagctcatagtgtgggcccctaacccagactgtgggtctgaggaggtctcctggaggtagtgctatcctaacagagacctgaagggtacttggaatccagccacagaatactatttaccatctcattttactctcatgagaattctccccactgtaggcaggatgggtgttgatttaa

SEQ ID NO: 40277 - DNA, 1152 bp, Homo sapiens
agaccaaggcaggattagagtttgggactttcagatcccaccccccgacctccggggaggagagagggattgaaggttaagttgatcttcaatggccaatgatttaatcaatcatgcctgtgtaatgaagccttcataaaaacctaaaaaaggacggggtttggagagcttcctgtaagcgaacccgtgaatggttccaggatggatggcgcaccctggaaagggcgtggaagctccgagccccttcccacagactttcccccatccatctcttcatctggtgttcatctgatagcctttgtaatgtccttaagtagtaaatccggaaaacagtggaggaagaagagaatcaccacatatcgtatttagaggtcctgcagaaagggcagagcgagtttcatgtttgagtgcagcggatgcatgggcaaagcattacacagccgctccatggaagtgacaatgagccttgtctttcacacgtaactccaggaaccaggggaaacaaaaccaattccacccagaggtacagacaaagaagagcaccctcccaaaggagcccgcatgataagtggccacggcgaacatcactgtgatcagtcagaaaggcaggcgagttattagcttagccctgaacctcctacttaatgtagaaccagtggtgatggttaacagaccctggctgcagtgacaagcctgggacctgctcgaggaaatccaattgaaaagcagccaagaggaacaacaagctagaaacagatgttccagctaccaggatgtgcacgcatttaacctgaacatgtagttggggtgggatggtagcattcgtttctaaatatagtgatttcacttcttcccccatatagatattgtcaagtttaattatagccatccacattagttttgtcaaattttcagcaatttctttaaaataagaagatgtcagaatgataactgctattaagggaattcagggtgtttggtttatctacccagtcttactaaaacatttcagttaaatcatccactcttaaactccagtctcatagcaattaaaaattatcttttaaaaaattgcccaaatgaaattccaacagttcatgtaattatttgatttaatattaccatgttagtaaaatatctttaagatagtta

SEQ ID NO: 40278 - DNA, 1358 bp, Homo sapiens
  misc_feature (794)..(794): n is a, c, g, or t
agaccaaggcaggattagagtttgggactttcagatcccaccccccgacctccggggaggagagagggattgaaggttaagttgatcttcaatggccaatgatttaatcaatcatgcctgtgtaatgaagccttcataaaaacctaaaaaaggacggggtttggagagcttcctgtaagcgaacccgtgaatggttccaggatggatggcgcaccctggaaagggcgtggaagctccgagccccttcccacagactttcccccatccatctcttcatctggtgttcatctgatagcctttgtaatgtccttaagtagtaaatccggaaaacagtggaggaagaagagaatcaccacatatcgtatttagaggtcctgcagaaagggcagagcgagtttcatgtttgagtgcagcggatgcatgggcaaagcattacacagccgctccatggaagtgacaatgagccttgtctttcacacgtaactccaggaaccaggggaaacaaaaccaattccacccagaggtacagacaaagaagagcaccctcccaaaggagcccgcatgataagtggccacggcgaacatcactgtgatcagtcagaaaggtaaataaaaatcaaagagcgttcgaggcagccgcattgactcaccttgcagacaagcaagcagagccgcagagcagtgacccgtgcccagcgcctcgcagctagagctggattggaatccagggctttgcaggcttcctgcttcactcaatcctctttctgttgcctctggcctcaaggtgttggccntgggaggaagtagcagattaaattccatgggcacgaagtccgtagctgacgaatacttaatatgttgcagtttcacagtgaaagttggcaagtccagggtgggaacatgcctcaagcagctgagtcttctggattttacttctgttctttgcctctcaatttttgattttgttatataaaaagcaaatcagtaactattgcattatattctgcagtgactcaacagcgacacttaattcagccaacccaaggtttactgaactgctcgtggtgcccgggaaccgtgctgggataggatacagggacccaacccagtcctgatcattagcttagccagagaggtaaactgactgacaatcaatctgcccagggatcaattactatggaagctcatagtgtgggcccctaacccagactgtgggtctgaggaggtctcctggaggtagtgctatcctaacagagacctgaagggtacttggaatccagccacagaatactatttaccatctcattttactctcatgagaattctccccactgtaggcaggatgggtgttgatttaa

SEQ ID NO: 40279 - DNA, 1098 bp, Homo sapiens
agaccaaggcaggattagagtttgggactttcagatcccaccccccgacctccggggaggagagagggattgaaggttaagttgatcttcaatggccaatgatttaatcaatcatgcctgtgtaatgaagccttcataaaaacctaaaaaaggacggggtttggagagcttcctgtaagcgaacccgtgaatggttccaggatggatggcgcaccctggaaagggcgtggaagctccgagccccttcccacagactttcccccatccatctcttcatctggtgttcatctgatagcctttgtaatgtccttaagtagtaaatccggaaaacagtggaggaagaagagaatcaccacatatcgtatttagaggtcctgcagaaagggcagagcgagtttcatgtttgagtgcagcggatgcatgggcaaagcattacacagccgctccatggaagtgacaatgagccttgtctttcacacgtaactccaggaaccaggggaaacaaaaccaattccacccagaggtacagacaaagaagagcaccctcccaaaggagcccgcatgataagtggccacggcgaacatcactgtgatcagtcagaaaggcaggcgagttattagcttagccctgaacctcctacttaatgtagaaccagtggtgatggttaacagaccctggctgcagtgacaagcctgggacctgctcgaggaaatccaattgaaaagcagccaagaggaacaacaagctagaaacagatgttccagctaccaggatgtgcacgcatttaacctgaacatgtagttggggtgggatggtagcattcgtttctaaatatagtgatttcactgtcaaattttcagcaatttctttaaaataagaagatgtcagaatgataactgctattaagggaattcagggtgtttggtttatctacccagtcttactaaaacatttcagttaaatcatccactcttaaactccagtctcatagcaattaaaaattatcttttaaaaaattgcccaaatgaaattccaacagttcatgtaattatttgatttaatattaccatgttagtaaaatatctttaagatagtta

SEQ ID NO: 40280 - DNA, 588 bp, Homo sapiens
agaaagtagaaatgggaagcaaattcactaattcccccttgtcagttagcaaactttctaaatgctttttgtgtgcccttgaatttggacatccccttttctacagtcagcctggaacatttataaagtggaagccactgaactgtctaaaggcctttagaaaattgtctaagcatctttgcaattgcctcttttcttccaaccctacccccacctgaccccttggatgtggaccacacatacgatgctatgccataagcatcaaacatttcccacttgtgattttatgccaaatcataaccatgattcagaacactaaagtgctctgtttcattctaacctagtttcctgtaaactacatacagtgatagtttcttttttgtttttcagagtggaggaagaagagaatcaccacatatcgtatttagaggtcctgcagaaagggcagagcgagtttcatgtttgagtgcagcggatgcatgggcaaagcattacacagccgctccatggaagtgacaatgagccttgtctttcacacgtaactccaggaaccaggggaaacaaaaccaattccacccagaggtacag

SEQ ID NO: 40281 - DNA, 415 bp, Homo sapiens
ttgtgttggcggccctataggaggggttttcaccagactgttctaatctttgctagtcttgaggtgtgcgaagatgactccccaatttttaattatagcttttacctctgtattgagctccaaacttgcatattcagctgtccacttggtagttccacctggatgtgtaatgagcatctcagatattacgtgaccaaatcaaaactttttacttcccacatctttgctatttattaaatggcaccaccgtctgaccagttactcaaataaaaacaaccatgaatcatcccagattcctttttctttttgaggcagggtctcactctgtcacccaggctagagtgcagtgagctgagatcgtaccactgcactccagcctgggcgacgaacggcgtgagactctctctaaattaat

SEQ ID NO: 40282 - DNA, 606 bp, Homo sapiens
taacacttaacaatttaatgaattacatcacaggtacactttcttaaacttggaggctccgcagatctgggtcatcttggatagctgcaaagaagcaaactgtggtgtttggcttctattatgtgtgtaataatgtctataaatattggtaaatgcccattaatgtccagtattctccagtcatcaacaaattctgtctggatgttcaagcttccctataaactctctcttcaatcagtagttttggaaaggtgctaccgaagcctgcaggttaatagagaaccctttcaggggctaccacgagaagggaggggaatgaaacatcaagtctgtggggctgtgatcctgatccagagttgttttgccaaaggtttcttttaattcaagttaggaaacctctgacataaacgattacagttagcagtgaagttagtatctatggttagtatgagtgtgtaaaacacattttgggaaccactgttttagcaaatggcttagctttaagttttgctactcctattgtgaactgatagctgtcactccaggttttttcttattgtattatacctgattttcccattaaacattaaagatgtttatttttaa

SEQ ID NO: 40283 - DNA, 679 bp, Homo sapiens
actggaggcctggccttcccttcttacttttaggtactctccatctgcaggggcctggactccacaagctcccagattcttcttcatcctgctgaggaagcctcaggagaaagcccagcacagggctggaagcttcgtgggcagttttaaaataggtgaagagctgtcctagaggagagggagcacagaggttgacatcaggacctgggaggagaagttgtgaggcctgggcttgggtgtctggaaacccagggtttctgttaattaacagctgtgtctctttaggcagggttcatcaccccacgagccttggctttctcatgcttaagatgggtgcaaggatacaccctcagagttccattatggggatagattgaggggattcctctcaagtgcttagcaaagggtctggcacacagcaagcattcagtaaaaattaactgctgatgttgttgtacttaaaatttttctaatggctagagccatgtgtcaacagagggtccccttagtaggaaatatttaaacagaagttgttcctgcctgtgatagaaacaatttctaaccaagtgtaatttgttacctctttgacctgtagtcatgtctgtgtctgccattttatgctgagtgagtgattttacagggaaaaagaaaagtaagagtaataaacaggaaaaaaaaa

SEQ ID NO: 40284 - DNA, 213 bp, Homo sapiens
gctgttcctattggcgactgcacaattcttagcaacactgaagtgctggaggtgaagctctccgtgtgttgtcttcagatgacgaatgtattcttctgatgacttgggacaaattctccctccaaaatgccactgtctgtgaatacaccctcctgtaaaactctggccatagtacagggtgaaaggttttatggacaaaaaacaatgttgcag

SEQ ID NO: 40285 - DNA, 234 bp, Homo sapiens
catttctgtagagagaagaaaggggtgtgtgtgtgtgtgtgtgtgtgtgcgtgtactatgatgatatacaaaaacatgtctgcaagggttcataaaaaactcaggagagagtaacagggtggctgggagactcttcccttctgtatcttctgagttttggactatgcgaatgtatcatcctttcaaaaagtgaacaaaagattaatttccccctcctatctgtgtccccacccc

SEQ ID NO: 40286 - DNA, 413 bp, Homo sapiens
aaatgtccaattatcttaacacacaaatgttagctataaggggccttttgtgttttattataccaagttgttgctagctctaccttattaaaatcttcagttttaaaggctgaaagatcaaaaagagataaaaatgtattaatgctgattgttaaccaaccagtaagtatttattaagcatcttctatgggcttggtaacatattaattgagaataaggaaacattaagatataatactatttttattgagttgattatgtgccagctatttgcacacatttatctcacttaatttttacaattgccaactgaagcccagagagattgacttgttcacagtcactcagccagtaagtggtagagccatgattcattcaaacctaggtttgtctgacctcaaagctcattcttt

SEQ ID NO: 40287 - DNA, 392 bp, Homo sapiens
tcatgattaaaatatcttacctttctgaaaatataaatatttttgtcttttttgcccaacatagtctgtttcctgcattttattttcctttctgttttgaactctattactcagatttttcaggaatgagctatttcttcatatttaagaattgaagacaaaaagactgattggggtcaggtgcggtggctcacgcctatcatcccagcactctgggaggcctaagcaggcagattgcttcagcccagcagtttgagaccagcctgagcaacatggccaaaccccatctctacaaaaaatacaaaaattagccacgcgtggtggcatgtacctgtagccccagctaccagggggctgaggtgtgaggatcacctgagcccagaaagtcttgg

SEQ ID NO: 40288 - DNA, 278 bp, Homo sapiens
ttcacctcattaccattttatgtgtatgatgaaaatgtttaagatttactctcttagcaaatatcaagtttacagtacagtattgttaattacagtcactgtgctatacattagatctacaggactttctcccagatccatagaatttctccattatgtaaactccaaaagaatgaaattctgtggatgaagccttaattttactcttgataattaattttagttctgataatttgtgttaaacaaaaaaaataggagggcttgttttgctgcatagt

SEQ ID NO: 40289 - DNA, 92 bp, Homo sapiens
gtaaactgcagcctaagggagttacttcaataggccagtttcctgacaaaggtcgaatcctttctcatcagaatttaaaaattatagaacat

SEQ ID NO: 40290 - DNA, 372 bp, Homo sapiens
caaatccctggaactttaggtatgagccaccgcccctggcctccatgtttttgcctacccttcattcccaatgtcgaccctagataataattatgctctattctgaataagtttatcccatcacattttttaaaattgagaggaaggaaaccaaagtaatacagatgaatatgtattaatacaaaataatgtaaaaattgtagtttttagtatctccatatcatgttctgttgatagagtgtgttggtgcacacctgtaatcccagctactgggaaggctaaggcatgagaattgcttgaactcgggaggcaaaagtttcagtgagccgaggtgatgccactgcattccagtctgggcaacaaagtgagact

SEQ ID NO: 40291 - DNA, 398 bp, Homo sapiens
gaattcctgcctcagtctctgcttctgggagcccagcctaagcctttaagagtgggttcccactgtgagccgtcgtaatctggagtagggttgtggagtttgacagctagggaagaactggaggtgatgatgctagctggggccatccaggaagggtatcaatagagtcctgtgaagaaacacatcttagaggggaagcaaagtttgatgttacctctgtctcactctaaagcttggatttgtaaccatgaccttgtactattcttcactctctgcttataatattttttgtttctgtttttgatagagtgtcttgctttgtcacccaggctggattgcagtgagctgagactgtgccactgcactcaagcctggatgacagagcgagactctgtcta

SEQ ID NO: 40292 - DNA, 568 bp, Homo sapiens
ttcccacatgcacagtccaaagacagccacagctatctgctctgccctagttcaaatgaagtctcaggagtttagaaattgtctgaggtgctttgacttctaatttaatacttttagggtttttttgtttttgtttttggtttttactctctgtgtattcatttgtttaaatagttaatatggtcatggttatgagagaataaaattcaacttagtgtacaacaaaatatggattccaggaagcttagagggtggctaccagtgagacaatgagcagtatccccccagggtgggcagcatgtcgcacatctaaaatttgtggggtttttttgtttttttaagacggagtctcgctgtgtcgcccaggctggagtgcagtggcgtgatctcggctcactgcaagctctgcctcccgggttcatgccattctcctgcctcagcctcccgagtagctgggactataggggaacaccaccacacccagctaattttttgggtattttcagtagagacagggtttcaccgtgttagccaggatggtctcaatctcctgacctcatgatccacc

SEQ ID NO: 40293 - DNA, 491 bp, Homo sapiens
ttcccacatgcacagtccaaagacagccacagctatctgctctgccctagttcaaatgaagtctcaggagtttagaaattgtctgaggtgctttgacttctaatttaatacttttagggtttttttgtttttgtttttggtttttactctctgtgtattcatttgtttaaatagttaatatggtcatggttatgagagaataaaattcaacttagtgtacaacaaaatatggactccagcctgggtgacagagtgaaagactccgtctcaaaaaaaaaaaataaagaaagaaagaaaaagtttttgtcaaagtggatcaaaagacaagacccaactctgttgtctacaagaaacccactttaatatagacacaaatagatgaaaagtaaaccaacagagaaaaatatgccatcctaacactaatcaaaagaaagcaggaggagctaacttaatttcacagtggactttaaagcaaggaaagttattaggga

SEQ ID NO: 40294 - DNA, 343 bp, Homo sapiens
tcgacagataccttgagaccataagctagcatacctaaggacaaaaatataatactttaaggctgatagagcagatgatactgttgaatttctctatcaaatatagaaagatttgccccttgatttcttattttttaaggtgattaaagtctttattgtctaacatctagccaaatattctgttacttgtagccaaaagcattcctaggtataagttcataaaaataaaataatattttaatatgacttatagtattttaaaatattatacaaaatattaataaaagcctcattagaaaagcttgttacgtctttctataacttcatttatggataaacaatg

SEQ ID NO: 40295 - DNA, 226 bp, Homo sapiens
ggagaggaaaatgggaggtgggaatttactgggtccttactgagcaccagggagcaggattgctgtgggctggcttccatggatctagcctgcacctcagcttggctgcgtggttacctgagatgctcacaggagggagttttaattcagtgatacccttcctggggctcacatcttttattttatttatttatttatttattgaccagagtctcactctgtcacc

SEQ ID NO: 40296 - DNA, 606 bp, Homo sapiens
  misc_feature (28)..(29): n is a, c, g, or t
gagaatctcagctattgaagacttagtnntcaagtccaagttgaataaaccaaccacgaggagctgaagaatctggatggagaccgcgtcagatcccataggttgaggggtgagtcccacaagactagcctccattttagataccaaccacaagaatcaggttgttttacctgtagttctaaccaactggctattaatcagggttcccatgaccccctccttaggttctattaatttgctagaccaattcacagaacttagaggaacttagaggaacactttacttacatatactggtttattataaaagcatattacaaaggatacagatgaagcaatgcatagggcaaggcatgtgggaagggcacagagcttccatgcactctctggggcaccatcatccaggaacctctcatgtccacctatccagaagctccccaatcccagtcttttggatttttatggaagcttcattacttagacatgactaattaaaccagtgacgctggtggtcatcagctcgtctgccttctcctctccccagaggttggacattggttgaaggtcccaaccctctaatcctgcctgggtctttcaagtgaccag

SEQ ID NO: 40297 - DNA, 1355 bp, Homo sapiens
cagcacagtaaggtggatattatagtcttcttctagatgaaaaattgaggctcatagtggtcttgctgctgtgtcatagcaatagaatgagagagccttgcttccctgagtccaaatcccatacttttggcattgttatgaggtctggtcacctgatgcttccatgctattttcccatttcttatctggggataatgagtcatattaagtaatttttttttttgagacggagtttcgttctgtcacccaggctggagtgcagtggtgcgatcttggctcactgcaagctctgcctcccgggttcatgccattcttctgcttcagtctcccgagtagctgggactacaggtgcccaccaccacgcccagctaattttttgtatttttagtagaatgaggtttcaccgtgttagccaggatgatctcgatctcctgacctcgtgatccactcgcctcagcctcccaaagtgctgggattacaggcgtgagccattgcacccagccattttttttttttttaagacgacgtctcactctgtcacctatgctggagtgcagtggcgtgatctaggctcattgcaacctctgcctcccaggttcaagcgattttcctgcctcagcctcccaagtagctgggattacaggtgcccaccacctcgcctggctaatttttgtatttttagtagagatgaggttttgccctgttggctaggttggtcttgaactcctgacctcaggtgatccactcacctcagcctcccaaagtgctgggattacaggcaggagccactgcgcccagccaagtaacttttaacagtgtggtataacctttaaatgacaaggtgatgcttttgacttgtcctcaactttgatttgtactgatttgtccctatagttctgggtggggtgggtcaaaacaaagtctcgagctgtaccaggatcaagcagcacagctcagccatgatccttttaccacttttttcttctgtccttgagactctaattaaagcactggatttttaaaaatcacccttgtaaatatgcacacatttgtctatagttgaggaaattgtgccgttgaagtccattcttggacatggagttaagaaaccctggtttgagaaaaagccccagtgagacagcaggaatccttttaccatacaaccctcaactagtttagtgtgctcaagctcaaataaccaatcccatcaagtgaaaagaatggcagcagggagaaggcctggctcactgaggctctcagcattagtttcctctacctcttgtgtctcacaggtgcacatatgtacagcatatcaaagtgttgaatgtcatgagaataaaatatgaaaactactt

SEQ ID NO: 40298 - DNA, 547 bp, Homo sapiens
tgctttatatatacttacttttttatagataacagtcttttgataaaatacattttgctagagaggactctcagaagaatgtggggaactttgcttggttataggttgatcattgaagcccagtggaattttgcccaactcttttattatacatccctcagttttattgtcagaaataaaatgttatgctgaatggtaagagcctaaaataatacaacattcctttatacaatgtacttggtcccaacttgattgtgatgtcagaaataaacaatatttaatcattttccaaggagctggtctcccttgaaccagccccttgcagtcattgttctcctgactgatgttatcagagatcctatgcaggatctaattcctactcatgccagagcaagccaggagaagctctaccaactcctgggagctacaaagcgataggttcccagagtctaaaactattggaaatgatgtttgtctaaaatggccagagacaacttttataagcttccaggaagtggagaaccagaaaaactgagaaaaaaaaaaa

SEQ ID NO: 40299 - DNA, 565 bp, Homo sapiens
tactcggcacgagggaagaaagggcatcaggaactagggatatagacaagtttcttgaaagtgggaatacttggaattgtattaacagcttaaatcacattcacaggagaaggctgcagtagaggctagagctatttttcctggcaacagacccagagagaagctcaacacttggagtatgaaaggagagttggaaagaaatcaactgtggaataactgcgtgagtcatagtccatgttctccttccctgcatcacatgctcaggctaaaaccagaggactaatatttaaaataattgaatagtcttcgtgagaaggagccctagttggggtgatgcctcatctgagtaaacttcttcccacttttgctgggaagtgggagaagtagggagggggacctccaacctcctcttctttcactacaaggtctaaagcaaaggctgccagtgacagccacttgtgtagacaagagagagctggacaaggccgagctatctgcattgaatgaggtgacttacctcagttgtaggtatgaatctatagccaaggattatgaaaacctgaag

SEQ ID NO: 40300 - DNA, 369 bp, Homo sapiens
catccgcagctcagaatgcaaaaatagatctccatgtggggatgtggcctcttttccccaagtgtggaccagatgtcaggccgccttgtgagtactcaaggaatgttacggcttccttcttcaggacttcactgcttctctccatatggagaaggctccctttccatgcacttcctggatctgaaaaacaagaacaagaaagaggatggctctaaagtctcaggaaatggacctttctatatcctcccttttaaaaagcatttgtatgtaggttttttaggtcttgctgtcaagtcggatacacagctgtcatctgttatatcggtgatttaataacataataaaaatttatagagaaccacaagctca

SEQ ID NO: 40301 - DNA, 1376 bp, Homo sapiens
actagaacttgaaaatatgagtctgtagcctactgagactgcttttgattcccgaaagcacagtagataaggtaatgaaaaacatgtaaacgagctgaaaagtctccactgtctagggctttgattttcaaagtgtgcttctcagctgggcatagtaactcacgcctgtaatcccagcactttgagagagcaaggtgggtggatcacttgaggtcaggagttcaagaacagcctggccaacatggtgaaaccctgtctctactaaaaatacaaaaattagccaggcatggtggcaggcgcctgtaatcccagctacttaggaggctgaggcaggagaatcacttgaacccgggaggaggaggttgcggtgagccgagatcacaccactgcactccagcctgggtgacagagtgagactccatctcccaccccactacccacaaaaaaaagaaaaaaaaagtgtttcttagaccaccagcattagcatcacttgggaatttgcttgaaatgcaaattctcaggccctacccagatctgtagttttctgattatgtataatcagaaagtctggaggctaggcccagcaatctgttttacaatacctccagttgattataatgtatgttaaaatttgcgaaccactggtctagggaaattatttcctaactagtgttttatttctgcttctattgagttttagcctaagtctcaatcgttgagtgcaaaattagcattattgcatagtggcaaggacatggagtcacacaggagctagttgaatcctgggtcatcaagaatttcagggccatgcatggtggctcacacctgtaatcctagcactttgggaggatcatttgaggtcaggaattggagtccagcctcgccaacatgatgaaaccccatctctactaaaaatataaaaattagcctggcatggtgataggcgcctgtagtcccagctacccaggaggctgaggcaggggaatcacttgaacccaggaggcagaggttgcagtgaaccgaaatcatgccattgcactctagcctggacgacagagcaagactctgtctcaaaaaaaaaaaagtatttcaggcaagttcacctcccatagtttcccatctttgaaatgatattaataacatctatctccatgtaagattttttttagaattaagtaagataatatgtaaagtgtctagtacattgctaggatcccaggtgtttgagaaattgcatctagcaatttttcttgttagcaaagagcgcccacctccatctgttctaaactcctcttgtttcttgaatgtatttgctgtcttttgtctctggggctttgtattaactgttatcttttggcatccaacctcctacccct

SEQ ID NO: 40302 - DNA, 1979 bp, Homo sapiens
gaagaaaactccggcccccaagaaaaagagagggcatgggttgcggagccgacatcacggccggggtctttgctgtttagacgcctgggttcccggatcccagacacgcgcacgggcaggaagttagaccggagacagcgagtatagacagcccttctggataggggcagacgggtgggagctccgaaggggtgccggggcggtgatcgggaggtctccagcggcccgaaccagggtgaagaagaagcccgggtttccgcttccctccgggcgcgagaagaggggagccaggccgagccccggccctaccgccgccgccgccatgtggcccccagaccccgaccccgacccggaccccgagcctgccggcggctcccgtcccggccccgcggtccccgggctccgcgccctgctgccggcgcgggctttcctctgctctctcaaaggccgcctcctgctggccgagtcgggtctctcattcatcacttttatctgctatgtggcgtcctcagcatctgccttcctcacagcgcctctgctggagttcctgctggccttgtacttcctctttgctgatgccatgcagctgaatgacaagtggcagggcttgtgctggcccatgatggacttcctgcgctgtgtcaccgcggccctcatctactttgctatctccatcacggccatcgccaagtactcggatggggcttccaaagccgctggggtgtttggcttctttgctaccatcgtgtttgcaactgatttctacctgatctttaacgacgtggccaaattcctcaaacaaggggactctgcagatgagaccacagcccacaagacagaagaagagaattccgactcggactctgactgaaggcctggcgggtgccttggcaacctgagccacacaggcctccacccctgcgcctcacaggggtcgctggcgttggagcggaggcctggacttctgagttgcagagggggctgcggacacagcaggccccctacagcctcaggttctgcctgagcccagcctaccaggcttgcccctcagctcagcactgttgaccacgctgcgtatgagggcatcttgggtatcccactccttctccccatttctgtcccacaggccttcagccctttaacgtctctgccaaaaaccagcacaaggagacaaagcagagccttgtctgtatctgggcagcaggtgttccatgctgctaggtggcgggggtcgggggtcttctgtttcactaacaggaacaaagacagaaaccatgacagggctgccccgccaggccccggtgggtttgtctgcacttggtgctcctgcccacaccagccactttggtgacaatgacccttccaagaatctttggttcaaggagcaccagttccctcttcattcttgaagcagggagaaattgacctttgccttgtcgcccaggaagtggggctcggcacccataactaacacctcccacccttggaaaccatgtcttctgggggtgagatgaccattctgggtctaagactgtttcaaagaagagctcatagactgactggtccagaagacagagggtacaacagtggcatcacagtgacagtgtcatggggagctgggcgggcccagccaaaccctccttcttcctagagcccagccagcaggcaggagttcctggaccctcaggacagtgaacttccagacctcagggcaggtctatgggccactgcaggagatgagaccagccttctgtgttcacctaacgatttatactgtgtatctgtctttgatggaattttgtaactttttatatttttttatgcaaaagcagcttcttaacagatggcattttctgtgactctaggcctcacaaaagagccagagttctggacccatgtttggagcatttgtagccttattctcttgcgtgtgaatctcttaccctgaaaaaaagccataatgaattaagccagactga

SEQ ID NO: 40303 - DNA, 1944 bp, Homo sapiens
ggcgtggcggcgggggatgcgcccctgcgcgagccagtgtcgcctgccctccttccgcacagcccgggtttccgcttccctccgggcgcgagaagaggggagccaggccgagccccggccctaccgccgccgccgccatgtggcccccagaccccgaccccgacccggaccccgagcctgccggcggctcccgtcccggccccgcggtccccgggctccgcgccctgctgccggcgcgggctttcctctgctctctcaaaggccgcctcctgctggccgagtcgggtctctcattcatcacttttatctgctatgtggcgtcctcagcatctgccttcctcacagcgcctctgctggagttcctgctggccttgtacttcctctttgctgatgccatgcagctgaatgacaagtggcagggcttgtgctggcccatgatggacttcctgcgctgtgtcaccgcggccctcatctactttgctatctccatcacggccatcgccaagtactcggatggggcttccaaagccgctggggtgtttggcttctttgctaccatcgtgtttgcaactgatttctacctgatctttaacgacgtggccaaattcctcaaacaaggggactctgcagatgagaccacagcccacaagacagaagaagagaattccgactcggactctgactgaaggcctggcgggtgccttggcaacctgagccacacaggcctccacccctgcgcctcacaggggtcgctggcgttggagcggaggcctggacttctgagttgcagagggggctgcggacacagcaggccccctacagcctcaggttctgcctgagcccagcctaccaggcttgcccctcagctcagcactgttgaccacgctgcgtatgagggcatcttgggtatcccactccttctccccatttctgtcccacaggccttcagccctttaacgtctctgccaaaaaccagcacaaggagacaaagcagagccttgtctgtatctgggcagcaggtgttccatgctgctaggtggcgggggtcgggggtcttctgtttcactaacaggaacaaagacagaaaccatgacagggctgccccgccaggccccggtgggtttgtctgcacttggtgctcctgcccacaccagccactttggtgacaatgacccttccaagaatctttggttcaaggagcaccagttccctcttcattcttgaagcagggagaaattgacctttgccttgtcgcccaggaagtggggctcggcacccataactaacacctcccacccttggaaaccatgtcttctgggggtgagatgaccattctgggtctaagactgtttcaaagaagagctcatagactgactggtccagaagacagagggtacaacagtggcatcacagtgacagtgtcatggggagctgggcgggcccagccaaaccctccttcttcctagagcccagccagcaggcaggagttcctggaccctcaggacagtgaacttccagacctcagggcaggtctatgggccactgcaggagatgagaccagccttctgtgttcacctaacgatttatactgtgtatctgtctttgatggaattttgtaactttttatatttttttatgcaaaagcagcttcttaacagatggcattttctgtgactctaggcctcacaaaagagccagagttctggacccatgtttggagcatttgtagccttattctcttgcgtgtgaatctcttaccctgaaaaaaagccataatgaattaagccagactgaccacttgcttggagtgtgtgcttgaaaaaaccagagcaatactgttgggtattgtatcaggcttcagtacaaactggtaacaccaatgtggatcctgacagctttcagttttagcaaaaatacacgtgaaatctgactaccatttaaaac

SEQ ID NO: 40304 - DNA, 1745 bp, Homo sapiens
  misc_feature (25)..(25): n is a, c, g, or t
  misc_feature (28)..(28): n is a, c, g, or t
ccactaggctaggtacgaggctggnttnaatcggccgagggagaagaggggagccaggccgagccccggccctaccgccgccgccgccatgtggcccccagaccccgaccccgacccggaccccgagcctgccggcggctcccgtcccggccccgcggtccccgggctccgcgccctgctgccggcgcgggctttcctctgctctctcaaaggccgcctcctgctggccgagtcgggtctctcattcatcacttttatctgctatgtggcgtcctcagcatctgccttcctcacagcgcctctgctggagttcctgctggccttgtacttcctctttgctgatgccatgcagctgaatgacaagtggcagggcttgtgctggcccatgatggacttcctgcgctgtgtcaccgcggccctcatctactttgctatctccatcacggccatcgccaagtactcggatggggcttccaaagccgctggggtgtttggcttctttgctaccatcgtgtttgcaactgatttctacctgatctttaacgacgtggccaaattcctcaaacaaggggactctgcagatgagaccacagcccacaagacagaagaagagaattccgactcggactctgactgaaggcctggcgggtgccttggcaacctgagccacacaggcctccacccctgcgcctcacaggggtcgctggcgttggagcggaggcctggacttctgagttgcagagggggctgcggacacagcaggccccctacagcctcaggttctgcctgagcccagcctaccaggcttgcccctcagctcagcactgttgaccacgctgcgtatgagggcatcttgggtatcccactccttctccccatttctgtcccacaggccttcagccctttaacgtctctgccaaaaaccagcacaaggagacaaagcagagccttgtctgtatctgggcagcaggtgttccatgctgctaggtggcgggggtcgggggtcttctgtttcactaacaggaacaaagacagaaaccatgacagggctgccccgccaggccccggtgggtttgtctgcacttggtgctcctgcccacaccagccactttggtgacaatgacccttccaagaatctttggttcaaggagcaccagttccctcttcattcttgaagcagggagaaattgacctttgccttgtcgcccaggaagtggggctcggcacccataactaacacctcccacccttggaaaccatgtcttctgggggtgagatgaccattctgggtctaagactgtttcaaagaagagctcatagactgactggtccagaagacagagggtacaacagtggcatcacagtgacagtgtcatggggagctgggcgggcccagccaaaccctccttcttcctagagcccagccagcaggcaggagttcctggaccctcaggacagtgaacttccagacctcagggcaggtctatgggccactgcaggagatgagaccagccttctgtgttcacctaacgatttatactgtgtatctgtctttgatggaattttgtaactttttatatttttttatgcaaaagcagcttcttaacagatggcattttctgtgactctaggcctcacaaaagagccagagttctggacccatgtttggagcatttgtagccttattctcttgcgtgtgaatctcttaccctgaaaaaaagccataatgaattaagccagactga

SEQ ID NO: 40305 - DNA, 1918 bp, Homo sapiens
ggcgtggcggcgggggatgcgcccctgcgcgagccagtgtcgcctgccctccttccgcacagcccgggtttccgcttccctccgggcgcgagaagaggggagccaggccgagccccggccctaccgccgccgccgccatgtggcccccagaccccgaccccgacccggaccccgagcctgccggcggctcccgtcccggccccgcggtccccgggctccgcgccctgctgccggcgcgggctttcctctgctctctcaaaggccgcctcctgctggccgagtcgggtctctcattcatcacttttatctgctatgtggcgtcctcagcatctgccttcctcacagcgcctctgctggagttcctgctggccttgtacttcctctttgctgatgccatgcagctgaatgacaagtggcagggcttgtgctggcccatgatggacttcctgcgctgtgtcaccgcggccctcatctactttgctatctccatcacggccatcgccaagtactcggatggggcttccaaagccgctggggggtctgtgcctgacactcgggctgtttgtccaagcagatctgaaatgggccgtgaggctggggcagcagcctcccggagcagggagtcagccctgtgatgcatcccatccaccctgtccacaggtgtttggcttctttgctaccatcgtgtttgcaactgatttctacctgatctttaacgacgtggccaaattcctcaaacaaggggactctgcagatgagaccacagcccacaagacagaagaagagaattccgactcggactctgactgaaggcctggcgggtgccttggcaacctgagccacacaggcctccacccctgcgcctcacaggggtcgctggcgttggagcggaggcctggacttctgagttgcagagggggctgcggacacagcaggccccctacagcctcaggttctgcctgagcccagcctaccaggcttgcccctcagctcagcactgttgaccacgctgcgtatgagggcatcttgggtatcccactccttctccccatttctgtcccacaggccttcagccctttaacgtctctgccaaaaaccagcacaaggagacaaagcagagccttgtctgtatctgggcagcaggtgttccatgctgctaggtggcgggggtcgggggtcttctgtttcactaacaggaacaaagacagaaaccatgacagggctgccccgccaggccccggtgggtttgtctgcacttggtgctcctgcccacaccagccactttggtgacaatgacccttccaagaatctttggttcaaggagcaccagttccctcttcattcttgaagcagggagaaattgacctttgccttgtcgcccaggaagtggggctcggcacccataactaacacctcccacccttggaaaccatgtcttctgggggtgagatgaccattctgggtctaagactgtttcaaagaagagctcatagactgactggtccagaagacagagggtacaacagtggcatcacagtgacagtgtcatggggagctgggcgggcccagccaaaccctccttcttcctagagcccagccagcaggcaggagttcctggaccctcaggacagtgaacttccagacctcagggcaggtctatgggccactgcaggagatgagaccagccttctgtgttcacctaacgatttatactgtgtatctgtctttgatggaattttgtaactttttatatttttttatgcaaaagcagcttcttaacagatggcattttctgtgactctaggcctcacaaaagagccagagttctggacccatgtttggagcatttgtagccttattctcttgcgtgtgaatctcttaccctgaaaaaaagccataatgaattaagccagactga

SEQ ID NO: 40306 - DNA, 3038 bp, Homo sapiens
ggcgtggcggcgggggatgcgcccctgcgcgagccagtgtcgcctgccctccttccgcacagcccgggtttccgcttccctccgggcgcgagaagaggggagccaggccgagccccggccctaccgccgccgccgccatgtggcccccagaccccgaccccgacccggaccccgagcctgccggcggctcccgtcccggccccgcggtccccgggctccgcgccctgctgccggcgcgggctttcctctgctctctcaaaggccgcctcctgctggccgagtcgggtctctcattcatcacttttatctgctatgtggcgtcctcagcatctgccttcctcacagcgcctctgctggagttcctgctggccttgtacttcctctttgctgatgccatgcagctgaatgacaagtggcagggcttgtgctggcccatgatggacttcctgcgctgtgtcaccgcggccctcatctactttgctatctccatcacggccatcgccaagtactcggatggggcttccaaagccgctggggtgtttggcttctttgctaccatcgtgtttgcaactgatttctacctgatctttaacgacgtggccaaattcctcaaacaaggggactctgcagatgagaccacagcccacaagacagaagaagagaattccgactcggactctgactgaaggcctggcgggtgccttggcaacctgagccacacaggcctccacccctgcgcctcacaggggtcgctggcgttggagcggaggcctggacttctgagttgcagagggggctgcggacacagcaggccccctacagcctcaggttctgcctgagcccagcctaccaggcttgcccctcagctcagcactgttgaccacgctgcgtatgagggcatcttgggtatcccactccttctccccatttctgtcccacaggccttcagccctttaacgtctctgccaaaaaccagcacaaggagacaaagcagagccttgtctgtatctgggcagcaggtgttccatgctgctaggtggcgggggtcgggggtcttctgtttcactaacaggaacaaagacagaaaccatgacagggctgccccgccaggccccggtgggtttgtctgcacttggtgctcctgcccacaccagccactttggtgacaatgacccttccaagaatctttggttcaaggagcaccagttccctcttcattcttgaagcagggagaaattgacctttgccttgtcgcccaggaagtggggctcggcacccataactaacacctcccacccttggaaaccatgtcttctgggggtgagatgaccattctgggtctaagactgtttcaaagaagagctcatagactgactggtccagaagacagagggtacaacagtggcatcacagtgacagtgtcatggggagctgggcgggcccagccaaaccctccttcttcctagagcccagccagcaggcaggagttcctggaccctcaggacagtgaacttccagacctcagggcaggtctatgggccactgcaggagatgagaccagccttctgtgttcacctaacgatttatactgtgtatctgtctttgatggaattttgtaactttttatatttttttatgcaaaagcagcttcttaacagatggcattttctgtgactctaggcctcacaaaagagccagagttctggacccatgtttggagcatttgtagccttattctcttgcgtgtgaatctcttaccctgaaaaaaagccataatgaattaagccagactgaaaaaaaaaaaaaaaaaaaaaaaaaaaaaaaaaaaaaaaaaaaaaaaaaaaaaaaaaaaaaaaaaaaaaaaggggggggggccccaagaagaattctccccacgggaggcggccccagactacgctccgggccagcacacgtgattcgtgtatgggccaaagaggcggccgcccaataataggggagcgggtatattatatacaagcgcaggagcagccgacgcgcggcgcgggctgaactacaacaaacaagctacagaagcgagaggagcaaaccaccggtgtaaactcggtggagagcctcactcttgtgtcaagtaagaacccccctccctatcaacttcgcgggagcgcgggagcaacaaccataagcttggagcgaacaaacaaaacccccccccgcagaacggaaaccttagacgcacagcgctcgacagagcgggacaacctatatcacacaacgacccccgcagcagcggcgtcccatctaacaaggcgcgccacacacacaccgggcgtcgcacctatctgtgtgcacgatggcacgcggagagaagaaactgtcgtggcgcgtctcaaccagcgagggactttatatgcctctgtgacagacacaaacaactcatctcttcacccaccgaggcggggtccctccggcggcagacgaaacacagcacccgctggagcaggtgggagggtccgcacgcgcaccacgcgcacgcccacccgccacccagccacccgctgtggcagcaggaacgcacggcggggacaggcgcgtgggcacgcgcgggtggtggtgggaggccggcgcagacgcgcgggacggaacggcgtgagtggtccggcggacgagcgcaggcggggccggagggagcagcgagacagagagcacgatctcgggccacggcgcgggcaagcgccagccgacggaggggcggcggtgagcgagaccaccggcaggcggggtggcggcgacgcggagcgagaacacaacaggcggaagcggcgggagcaacagaacggacgagcagggggccacgccgatacaatccgcacacgtgaccagagccacacgacgcactgcaggcctcagacccacaacacaacacacccgacaaggacacgacaaccgcccagcgcacaccaagcaacacaacaacgaagcatactacacagagcgtacagcggtacgaccgcgaccgcgcacacgccgcgccgcttggcatggcagccgccagaaac

SEQ ID NO: 40307 - DNA, 402 bp, Homo sapiens
gggcttgtgctggcccatgatggtgaggacaggggccccaggagggaggggtgccctgcacaaagtggccagatgaggagtccagagtcgtgcacttgggcccttatcctttctctagtgtgctggagtttgcagttggttagaactggatggagagacccagcttcagatcatcccagctccactactcagcagccctgtgacctcaagtgggctgtggtgcctctagagcaggtctgtgaggcagggaacccggagaggggtctctggccaccaggtggcgccggtgctccccaccgggcctacaggaatgagctgccgccacaggaattcaagccatttccacgtgggcaggacaggttaactgaggacttgcagggcttacccagacttcagccatcg

SEQ ID NO: 40308 - DNA, 1794 bp, Homo sapiens
ggcgtggcggcgggggatgcgcccctgcgcgagccagtgtcgcctgccctccttccgcacagcccgggtttccgcttccctccgggcgcgagaagaggggagccaggccgagccccggccctaccgccgccgccgccatgtggcccccagaccccgaccccgacccggaccccgagcctgccggcggctcccgtcccggccccgcggtccccgggctccgcgccctgctgccggcgcgggctttcctctgctctctcaaaggccgcctcctgctggccgagtcgggtctctcattcatcacttttatctgctatgtggcgtcctcagcatctgccttcctcacagcgcctctgctggagttcctgctggccttgtacttcctctttgctgatgccatgcagctgaatgacaagtggcagggcttgtgctggcccatgatggacttcctgcgctgtgtcaccgcggccctcatctactttgctatctccatcacggccatcgccaagtactcggatggggcttccaaagccgctggggtgtttggcttctttgctaccatcgtgtttgcaactgatttctacctgatctttaacgacgtggccaaattcctcaaacaaggggactctgcagatgagaccacagcccacaagacagaagaagagaattccgactcggactctgactgaaggcctggcgggtgccttggcaacctgagccacacaggcctccacccctgcgcctcacaggggtcgctggcgttggagcggaggcctggacttctgagttgcagagggggctgcggacacagcaggccccctacagcctcaggttctgcctgagcccagcctaccaggcttgcccctcagctcagcactgttgaccacgctgcgtatgagggcatcttgggtatcccactccttctccccatttctgtcccacaggccttcagccctttaacgtctctgccaaaaaccagcacaaggagacaaagcagagccttgtctgtatctgggcagcaggtgttccatgctgctaggtggcgggggtcgggggtcttctgtttcactaacaggaacaaagacagaaaccatgacagggctgccccgccaggccccggtgggtttgtctgcacttggtgctcctgcccacaccagccactttggtgacaatgacccttccaagaatctttggttcaaggagcaccagttccctcttcattcttgaagcagggagaaattgacctttgccttgtcgcccaggaagtggggctcggcacccataactaacacctcccacccttggaaaccatgtcttctgggggtgagatgaccattctgggtctaagactgtttcaaagaagagctcatagactgactggtccagaagacagagggtacaacagtggcatcacagtgacagtgtcatggggagctgggcgggcccagccaaaccctccttcttcctagagcccagccagcaggcaggagttcctggaccctcaggacagtgaacttccagacctcagggcaggtctatgggccactgcaggagatgagaccagccttctgtgttcacctaacgatttatactgtgtatctgtctttgatggaattttgtaactttttatatttttttatgcaaaagcagcttcttaacagatggcattttctgtgactctaggcctcacaaaagagccagagttctggacccatgtttggagcatttgtagccttattctcttgcgtgtgaatctcttaccctgaaaaaaagccataatgaattaagccagactga

SEQ ID NO: 40309 - DNA, 1651 bp, Homo sapiens
gaagaaaactccggcccccaagaaaaagagagggcatgggttgcggagccgacatcacggccggggtctttgctgtttagacgcctgggttcccggatcccagacacgcgcacgggcaggaagttagaccggagacagcgaggtctctcattcatcacttttatctgctatgtggcgtcctcagcatctgccttcctcacagcgcctctgctggagttcctgctggccttgtacttcctctttgctgatgccatgcagctgaatgacaagtggcagggcttgtgctggcccatgatggacttcctgcgctgtgtcaccgcggccctcatctactttgctatctccatcacggccatcgccaagtactcggatggggcttccaaagccgctggggtgtttggcttctttgctaccatcgtgtttgcaactgatttctacctgatctttaacgacgtggccaaattcctcaaacaaggggactctgcagatgagaccacagcccacaagacagaagaagagaattccgactcggactctgactgaaggcctggcgggtgccttggcaacctgagccacacaggcctccacccctgcgcctcacaggggtcgctggcgttggagcggaggcctggacttctgagttgcagagggggctgcggacacagcaggccccctacagcctcaggttctgcctgagcccagcctaccaggcttgcccctcagctcagcactgttgaccacgctgcgtatgagggcatcttgggtatcccactccttctccccatttctgtcccacaggccttcagccctttaacgtctctgccaaaaaccagcacaaggagacaaagcagagccttgtctgtatctgggcagcaggtgttccatgctgctaggtggcgggggtcgggggtcttctgtttcactaacaggaacaaagacagaaaccatgacagggctgccccgccaggccccggtgggtttgtctgcacttggtgctcctgcccacaccagccactttggtgacaatgacccttccaagaatctttggttcaaggagcaccagttccctcttcattcttgaagcagggagaaattgacctttgccttgtcgcccaggaagtggggctcggcacccataactaacacctcccacccttggaaaccatgtcttctgggggtgagatgaccattctgggtctaagactgtttcaaagaagagctcatagactgactggtccagaagacagagggtacaacagtggcatcacagtgacagtgtcatggggagctgggcgggcccagccaaaccctccttcttcctagagcccagccagcaggcaggagttcctggaccctcaggacagtgaacttccagacctcagggcaggtctatgggccactgcaggagatgagaccagccttctgtgttcacctaacgatttatactgtgtatctgtctttgatggaattttgtaactttttatatttttttatgcaaaagcagcttcttaacagatggcattttctgtgactctaggcctcacaaaagagccagagttctggacccatgtttggagcatttgtagccttattctcttgcgtgtgaatctcttaccctgaaaaaaagccataatgaattaagccagactga

SEQ ID NO: 40310 - DNA, 1883 bp, Homo sapiens
gaagaaaactccggcccccaagaaaaagagagggcatgggttgcggagccgacatcacggccggggtctttgctgtttagacgcctgggttcccggatcccagacacgcgcacgggcaggaagttagaccggagacagcgagtatagacagcccttctggataggggcagacgggtgggagctccgaaggggtgccggggcggtgatcgggaggtctccagcggcccgaaccagggtgaagaagaagcccgggtttccgcttccctccgggcgcgagaagaggggagccaggccgagccccggccctaccgccgccgccgccatgtggcccccagaccccgaccccgacccggaccccgagcctgccggcggctcccgtcccggccccgcggtccccgggctccgcgccctgctgccggcgcgggctttcctctgctctctcaaaggccgcctcctgctggccgagtcgggtctctcattcatcacttttatctgctatgtggcgtcctcagcatctgccttcctcacagcgcctctgctggagttcctgctggccttgtacttcctctttgctgatgccatgcagctgaatgacaagtggcagggcttgtgctggcccatgatggtgtttggcttctttgctaccatcgtgtttgcaactgatttctacctgatctttaacgacgtggccaaattcctcaaacaaggggactctgcagatgagaccacagcccacaagacagaagaagagaattccgactcggactctgactgaaggcctggcgggtgccttggcaacctgagccacacaggcctccacccctgcgcctcacaggggtcgctggcgttggagcggaggcctggacttctgagttgcagagggggctgcggacacagcaggccccctacagcctcaggttctgcctgagcccagcctaccaggcttgcccctcagctcagcactgttgaccacgctgcgtatgagggcatcttgggtatcccactccttctccccatttctgtcccacaggccttcagccctttaacgtctctgccaaaaaccagcacaaggagacaaagcagagccttgtctgtatctgggcagcaggtgttccatgctgctaggtggcgggggtcgggggtcttctgtttcactaacaggaacaaagacagaaaccatgacagggctgccccgccaggccccggtgggtttgtctgcacttggtgctcctgcccacaccagccactttggtgacaatgacccttccaagaatctttggttcaaggagcaccagttccctcttcattcttgaagcagggagaaattgacctttgccttgtcgcccaggaagtggggctcggcacccataactaacacctcccacccttggaaaccatgtcttctgggggtgagatgaccattctgggtctaagactgtttcaaagaagagctcatagactgactggtccagaagacagagggtacaacagtggcatcacagtgacagtgtcatggggagctgggcgggcccagccaaaccctccttcttcctagagcccagccagcaggcaggagttcctggaccctcaggacagtgaacttccagacctcagggcaggtctatgggccactgcaggagatgagaccagccttctgtgttcacctaacgatttatactgtgtatctgtctttgatggaattttgtaactttttatatttttttatgcaaaagcagcttcttaacagatggcattttctgtgactctaggcctcacaaaagagccagagttctggacccatgtttggagcatttgtagccttattctcttgcgtgtgaatctcttaccctgaaaaaaagccataatgaattaagccagactga

SEQ ID NO: 40311 - DNA, 1881 bp, Homo sapiens
gaagaaaactccggcccccaagaaaaagagagggcatgggttgcggagccgacatcacggccggggtctttgctgtttagacgcctgggttcccggatcccagacacgcgcacgggcaggaagttagaccggagacagcgagtatagacagcccttctggataggggcagacgggtgggagctccgaaggggtgccggggcggtgatcgggaggtctccagcggcccgaaccagggtgaagaagaagggtctctcattcatcacttttatctgctatgtggcgtcctcagcatctgccttcctcacagcgcctctgctggagttcctgctggccttgtacttcctctttgctgatgccatgcagctgaatgacaagtggcagggcttgtgctggcccatgatggacttcctgcgctgtgtcaccgcggccctcatctactttgctatctccatcacggccatcgccaagtactcggatggggcttccaaagccgctggggggtctgtgcctgacactcgggctgtttgtccaagcagatctgaaatgggccgtgaggctggggcagcagcctcccggagcagggagtcagccctgtgatgcatcccatccaccctgtccacaggtgtttggcttctttgctaccatcgtgtttgcaactgatttctacctgatctttaacgacgtggccaaattcctcaaacaaggggactctgcagatgagaccacagcccacaagacagaagaagagaattccgactcggactctgactgaaggcctggcgggtgccttggcaacctgagccacacaggcctccacccctgcgcctcacaggggtcgctggcgttggagcggaggcctggacttctgagttgcagagggggctgcggacacagcaggccccctacagcctcaggttctgcctgagcccagcctaccaggcttgcccctcagctcagcactgttgaccacgctgcgtatgagggcatcttgggtatcccactccttctccccatttctgtcccacaggccttcagccctttaacgtctctgccaaaaaccagcacaaggagacaaagcagagccttgtctgtatctgggcagcaggtgttccatgctgctaggtggcgggggtcgggggtcttctgtttcactaacaggaacaaagacagaaaccatgacagggctgccccgccaggccccggtgggtttgtctgcacttggtgctcctgcccacaccagccactttggtgacaatgacccttccaagaatctttggttcaaggagcaccagttccctcttcattcttgaagcagggagaaattgacctttgccttgtcgcccaggaagtggggctcggcacccataactaacacctcccacccttggaaaccatgtcttctgggggtgagatgaccattctgggtctaagactgtttcaaagaagagctcatagactgactggtccagaagacagagggtacaacagtggcatcacagtgacagtgtcatggggagctgggcgggcccagccaaaccctccttcttcctagagcccagccagcaggcaggagttcctggaccctcaggacagtgaacttccagacctcagggcaggtctatgggccactgcaggagatgagaccagccttctgtgttcacctaacgatttatactgtgtatctgtctttgatggaattttgtaactttttatatttttttatgcaaaagcagcttcttaacagatggcattttctgtgactctaggcctcacaaaagagccagagttctggacccatgtttggagcatttgtagccttattctcttgcgtgtgaatctcttaccctgaaaaaaagccataatgaattaagccagactga

SEQ ID NO: 40312 - DNA, 2383 bp, Homo sapiens
ctcttctgtggcacttatacaaaatatctcttcacctacttagttctacagggttaactttggagcaacatgaataaaatcatcgagaaggccaatattgtttagcaacatgaatacaatacagtttaaagttgtacacatcctgctcaactttattcatgtacatttcctttctgtggttttcttttgcttcttagaaattctgttagtggttagtaaagaatttgaaagtactttctccttgctgttttttttttttttttaagacattcctcccagaatactccagggggcagtgttttataacacattttccccactgggtgattgaaggatggaggatttttgaaaatttgacagctacatgaaacatgagaaaacattttcctcacttctgaagtcggtttgcagctggtaacttgttcatccagaaaacattctaaagcaatgagactttgtgagctgtgcttacagtttgggagaatcatgaagattctttctatattttgcatttacttcccagtgcttcatagctgcattttgtttgtaactaagacagaagaatttcgtaatccttgaaattgaaaaaaaaaaaattgtgtttttaaagagtgaaaacagttagaaaacaagtagaactgtaatcagaacgctgcttcaattgatattaaaaataacctcaataataatgtaaaggttcctttctcttgtgtcagttatattcttagggatagcctagaaggaatatatggttagaactaagtgtgactaatcatctgagccttgaagagaaacttcagtgcctctaaacagatcatctacaaaacaacaggtaaacatttatgccagttaagtgggtcatgtttttgtttcttgggtttttcctaaatttaagtgaggttgggcttaccttgtagataaaattatgttttctttttggtaaatacttgaacgtggataacgtcaaatcagaatattttgtgaggaggtgatgatttgaaattaagctagatttctagggaggtgttggttccaatgaaggatgggaagaaattaaaatagtcttcaaacttcttccttattatatttggttgctttggaaaagattggtcctatcctcaatctaatttattcactattaatattttaaaaacattcctgagatacttaaaaagacccacttagcgattatagttgctcaatgaaacaagaatttatttatgcatagatttttctctgtatcttaccaaaatccactttacttagataacactaaattgttcttaaagactactcatttcccaataatcctttatgatttcaaaatttctagtggctcagaagtgaattttattttatttgtctttcacttgaataaatgagaacccagaaattaataatgttgtttattgcttactgtcaggactatttcaaagactaagaagagtttcttctaacccctccctctcaaaggaatcctaaattattagttgttagataagttttgtatgctaagatattcaggtttatagtttatgtatgtgtgtatatatataaatatatatgtatatataaatattatgttcagtttggagtctggcacaactccattatgtggattagagagtaagatattatggatgataaagtactaaatgaaacataatatttatttataaaagtgtgtagattgttaaatcacaaaaagagtgctatgaccattatgtatgaggaaacaggcctttgacctcctggaaagcactgctcaaaagtcattagtgcccatttttgaattccccaaacagaaagcttcttagaaaacatgctgagattttatttacagggaattctttgacacatttcaattggtgtgtagtcaagtatagcaagtacttaataatgactgaatttcatgttcctacagtcatacatattcattagaagttttatgttgttggtctgatctgattcttctttgtttgtgggtggaacggcactgagagaagtatagttttttaaacttgaacatgttcagtagttacattgccttagaaaacccagacacatagcagtggaaatgaaagaaatggcatcagaagtgacttaatttagcaattgtgattcctcttgtaaaacaaaacaaaaaaacaatgccatattttttggagaaaagttggcaatataggggtttcgttgtctgtttcacaagaagactcatttgttcttttgggggaaccagtgccttacagattttgtatatactgtaattattcaggactagggaacaaacaattgtattgtatttgttacagattgtatatggctttgttttaacattcccctaaataaaatggcttcattctccccttggaaaaaaacatga

SEQ ID NO: 40313 - DNA, 4174 bp, Homo sapiens
  misc_feature (564)..(564): n is a, c, g, or t
  misc_feature (623)..(623): n is a, c, g, or t
  misc_feature (701)..(701): n is a, c, g, or t
  misc_feature (935)..(935): n is a, c, g, or t
  misc_feature (1365)..(1365): n is a, c, g, or t
aagggaccggcacccagggacagggcgggcgcccggggcctgcgcccctcagcggtatctggaaatatttttggttgtcatgatggggtggggtacaggccaggggtgctgcttagcatctggacagcccccactatggagaatgatgaggctgagaaagctccccaggccggggctctcctgtgaggcaagtctcctggcagtcttcaggtgtggcaggggttggggtgggcccgggggtcatgtcccagctcagctggtcctgagaagctgcctggtagacagtcaccggcacagagagctggaaagtgccctcgaccccagaacctgggtcctgtgaggacatccaccctgtgtgaggccagggagtgctcagcagatgggggcagcagggggtgtcagcatgggtgggggttcctgccaaggcaggcagctgagctggccccacctcagagtgcaggggccctcagcttgatcttttctgggctccactcttgactgatggacccatggggcaccctggccccaccctgcctgccttgccccagctcctgcccttgcccngtagggctctgcggcctcccctgtgcctgtgtgcctggctcactagaccctggacctgnggtccctcagctccactctagtccccttactctgtccctctactgcctggcgtcgctcagctcctccctgcctgtccngcgcccagcatcctgtgcccatgacctcacatctgtccctctgcccgggtcccccactcacctgtgttttggtccatctttgtctgctgaccccactatagattttaaaaatacaaatatgcatgcacgtggttaaaaactcgctgatgtcagatggctgggatgaaaggactgcctgctgcctttcctcttgtagtgctcggacacctctgcaggcgaagctccttgtttttnttttttgttgttgttgttgttttttcacttcttattttgaaataattatagattcacaggaagttgcaaaaaaaaaacaaaacaaaacccgtgggagagatcgcacggacccctccccagttcccctgattgcacacacagggcatatctggggtctctggatttgtgtgtcttactttgtgcgtctgtgcacgcatgtgtataactgcagttttatcacgtgtgaatatctgtggccattctcaggcccacgcggcttcctgctcctgcccctgaatgggcacccccaacaccccaaaacctgttctcagctgtaaaatcgtgtcatttcaggagtgtcatagatggatgcatcggcctgtcactttttagccttacccttttccctcaccatagtgccctcagatccacccacttctgtccatctccngctccctgttcttgctgagaagtcccacatggtgtagtggcaccttgattctccctttctggctgttaccagtatagctggctgctgtgagctttcgctgcaggttttgtgtgagctgcagtcttcgtttctcagtgatccatgcccggaagtgagagggccaggtcgtggagtagttgcttgtttggtgttgtgaggacctgcaccctgtcttccagagggccacccgttttgcctccccaccagcagcatgccagtgacctggtttctcctcatgctggccagtgttcaggttcaccactgcatctgtctgggccacatcgcctgtgtttccctggtggcgtggtgacctttccgcggcacacctgcggctgcccctctgtgctgtccttgctgttcctcccgtcatcttagcccacgtgtgtaaatgacatatgttcccctcccttgtgggtgttgtttttgatgtcctgtgaccgctgtcctggagtgtgggccagattcactggctgtcacagctggctatgcccaccctccctgcggcagggtcctcagtgagacctgtgcctactggttctgggtgatgagcgtgaacgttctccgtggctgctggcacgtgggcatgaccacagggtagagtgagactgcagagatgagggcagcaggcccctgcttggcacctgaagccctgggcaactggcaaggactgagccctctcctggctggaaggggctgggccacctgctcttgggcttgtctctggaaggccctctgggggtcttactacctccctgtctcagctcccaccagcctgtgaagccctgtgcagtccatacctgcaatcaaccccagccatggaggtggctgtaccccaggtgtctccacttagtgcccccccccccgacatgccccacgctgcccagcctctcctcttcccaccatccgtctggtcaggggtcattcttgtggtgcctgcccaaatcctctgaggagggctgcctggagtgcaggctccaggaacactcggaggtgtctggcttccttctggagtgtgacagctcggtgcagggcgcgctgcagaagcacctcgcgctatacaggatccggcggaaggtcacggtggagccgcacccggagctgcgagtgtgggcggtgttgcccagttcccctgaggcctgcggggctgcatcgctgcaggagagggcaggggctgccgccatcctcatccgcgacccgcgaacagcacgcatggggtggcggctcctcacccaggatgaaggcccagccctggtgcccgggggccggctcggggacttgtgggattatcaccagcaccgatacctgcaaggcgttcctgagggggtccgagacttgcctcctggggtggccctgcccctggagtccaacctggccttcatgaacggcgtgagcttcaccaaaggctgctacattggccaggagctgacggcccgcacccaccacatgggcgtcatccgcaagcgcctcttccctgtccggttcttggacccccttcccaccagtggcatcacccctggtgccacggtgctgactgcctcaggacagactgtgggcaagttcagggctggccagggcaacgtggggctggccctgctgtggtcagagaagatcaagggtcctctgcacatcagagcctctgagggtgcccaggtggccttagccgcatctgtgccagactggtggcctacagtctccaagtagtccgaagccttggctggcgcaggctgatggggaggctggggcctggggcctttggcctctgtccagggtcttcccgtcccatctgtctgctgcgcctactgggtgggagccctggtttccatctgggaaagtcccccttgtaggtgccctgcctggccccacccatgctcaggggccccaggcacgtgggttgttttctccctggacttcctgtggccccagaggagcccaccgtgtgagtgctgggctccagatggcgccgggtcccaatcgtggctccacacagggttgtctgggaggacgggacggtgtctctggccagcactggcagcttccgggccttgtaccccactctgcctggcatgagcctcatggggggttggtccctgtgcctggaagcggggtggtgtccagggtctgcaggctggggctcgggctttgggagttgtttcactgtgcttgcttccagcatgtctcagggtggggctatgcgtggtctagaggggtctggggcattggatcaggtggcatgtgggtgtctacacatcgagaagcacacagggatgagccactaggtatcccatgctggaggcttgtggaaggctgtgcccatctcccatgtttccccacctctgttcctcctcagagccctccaggagcgtggggtgggggccagcgcagggctcaggagccagcagggcagagttctgcctgtgtgtgctgggttttggcatagcctgtgtttgcagtgagagtgacttgctgtcagtcacggggcacagcctcctgttcacccactggcttcccccttcccactgaagtgtgagctctatgtttcagggcatctattaaagagtgagccacaggcagccccttgggagctctggtttcatttgggggagagggaggtgggggcttagtttttgtgatctggctgactggaccccgggaacagcgctcctttgagaacgcccagacctaccagatgaagcacttggcatggctgcaggccagcaggggaggcctcagaggcccaggctgggcacgtgggtgccgagtctgcaaagga

SEQ ID NO: 40314 - DNA, 2291 bp, Homo sapiens
  misc_feature (125)..(125): n is a, c, g, or t
attccccgcgcccttcccgcccggcaccccagttctgtatacataaacggccaaggtgtgtgccaaaaaaaacaaaaaaaaacccgtttgcggccgcgggggccccgcctgctgcgcgcgcgggntacgcccacttcctgaacgtgcagggccggacgctctatgacgtcatcttgtacgggctccaggaacactcggaggtgtctggcgctggcggctgcgcgcggccccaaggtgccgcctggcccacagctcctgcagtcctggtggcgacccaacggccggagcggcctgggcctgcttccggctggacgggcgcaccctgctgcgcgtgcgtggccccgacgcggcgcccttcctgctagggctgctgaccaatgaactgccgcttccgagtcctgcggccgcgggggccccgcctgctgcgcgcgcgggctacgcccacttcctgaacgtgcagggccggacgctctatgacgtcatcttgtacgggctccaggaacactcggaggtgtctggcttccttctggagtgtgacagctcggtgcagggcgcgctgcagaagcacctcgcgctatacaggatccggcggaaggtcacggtggagccgcacccggagctgcgagtgtgggcggtgttgcccagttcccctgaggcctgcggggctgcatcgctgcaggagagggcaggggctgccgccatcctcatccgcgacccgcgaacagcacgcatggggtggcggctcctcacccaggatgaaggcccagccctggtgcccgggggccggctcggggacttgtgggattatcaccagcaccgatacctgcaaggcgttcctgagggggtccgagacttgcctcctggggtggccctgcccctggagtccaacctggccttcatgaacggcgtgagcttcaccaaaggctgctacattggccaggagctgacggcccgcacccaccacatgggcgtcatccgcaagcgcctcttccctgtccggttcttggacccccttcccaccagtggcatcacccctggtgccacggtgctgactgcctcaggacagactgtgggcaagttcagggctggccagggcaacgtggggctggccctgctgtggtcagagaagatcaagggtcctctgcacatcagagcctctgagggtgcccaggtggccttagccgcatctgtgccagactggtggcctacagtctccaagtagtccgaagccttggctggcgcaggctgatggggaggctggggcctggggcctttggcctctgtccagggtcttcccgtcccatctgtctgctgcgcctactgggtgggagccctggtttccatctgggaaagtcccccttgtaggtgccctgcctggccccacccatgctcaggggccccaggcacgtgggttgttttctccctggacttcctgtggccccagaggagcccaccgtgtgagtgctgggctccagatggcgccgggtcccaatcgtggctccacacagggttgtctgggaggacgggacggtgtctctggccagcactggcagcttccgggccttgtaccccactctgcctggcatgagcctcatggggggttggtccctgtgcctggaagcggggtggtgtccagggtctgcaggctggggctcgggctttgggagttgtttcactgtgcttgcttccagcatgtctcagggtggggctatgcgtggtctagaggggtctggggcattggatcaggtggcatgtgggtgtctacacatcgagaagcacacagggatgagccactaggtatcccatgctggaggcttgtggaaggctgtgcccatctcccatgtttccccacctctgttcctcctcagagccctccaggagcgtggggtgggggccagcgcagggctcaggagccagcagggcagagttctgcctgtgtgtgctgggttttggcatagcctgtgtttgcagtgagagtgacttgctgtcagtcacggggcacagcctcctgttcacccactggcttcccccttcccactgaagtgtgagctctatgtttcagggcatctattaaagagtgagccacaggcagccccttgggagctctggtttcatttgggggagagggaggtgggggcttagtttttgtgatctggctgactggaccccgggaacagcgctcctttgagaacgcccagacctaccagatgaagcacttggcatggctgcaggccagcaggggaggcctcagaggcccaggctgggcacgtgggtgccgagtctgcaaagga

SEQ ID NO: 40315 - DNA, 2143 bp, Homo sapiens
gagatggcgaccgcggcgctgcttcgaggcgccactccggggcgcggcggcccggtctggcgctggcggctgcgcgcggccccaaggtgccgcctggcccacagctcctgcagtcctggtggcgacccaacggccggagcggcctgggcctgcttccggctggacgggcgcaccctgctgcgcgtgcgtggccccgacgcggcgcccttcctgctagggctgctgaccaatgaactgccgcttccgagtcctgcggccgcgggggccccgcctgctgcgcgcgcgggctacgcccacttcctgaacgtgcagggccggacgctctatgacgtcatcttgtacgggctccaggaacactcggaggtgtctggcttccttctggagtgtgacagctcggtgcagggcgcgctgcagaagcacctcgcgctatacaggatccggcggaaggtcacggtggagccgcacccggagctgcgagtgtgggcggtgttgcccagttcccctgaggcctgcggggctgcatcgctgcaggagagggcaggggctgccgccatcctcatccgcgacccgcgaacagcacgcatggggtggcggctcctcacccaggatgaaggcccagccctggtgcccgggggccggctcggggacttgtgggattatcaccagcaccgatacctgcaaggcgttcctgagggggtccgagacttgcctcctggggtggccctgcccctggagtccaacctggccttcatgaacggcgtgagcttcaccaaaggctgctacattggccaggagctgacggcccgcacccaccacatgggcgtcatccgcaagcgcctcttccctgtccggttcttggacccccttcccaccagtggcatcacccctggtgccacggtgctgactgcctcaggacagactgtgggcaagttcagggctggccagggcaacgtggggctggccctgctgtggtcagagaagatcaagggtcctctgcacatcagagcctctgagggtgcccaggtggccttagccgcatctgtgccagactggtggcctacagtctccaagtagtccgaagccttggctggcgcaggctgatggggaggctggggcctggggcctttggcctctgtccagggtcttcccgtcccatctgtctgctgcgcctactgggtgggagccctggtttccatctgggaaagtcccccttgtaggtgccctgcctggccccacccatgctcaggggccccaggcacgtgggttgttttctccctggacttcctgtggccccagaggagcccaccgtgtgagtgctgggctccagatggcgccgggtcccaatcgtggctccacacagggttgtctgggaggacgggacggtgtctctggccagcactggcagcttccgggccttgtaccccactctgcctggcatgagcctcatggggggttggtccctgtgcctggaagcggggtggtgtccagggtctgcaggctggggctcgggctttgggagttgtttcactgtgcttgcttccagcatgtctcagggtggggctatgcgtggtctagaggggtctggggcattggatcaggtggcatgtgggtgtctacacatcgagaagcacacagggatgagccactaggtatcccatgctggaggcttgtggaaggctgtgcccatctcccatgtttccccacctctgttcctcctcagagccctccaggagcgtggggtgggggccagcgcagggctcaggagccagcagggcagagttctgcctgtgtgtgctgggttttggcatagcctgtgtttgcagtgagagtgacttgctgtcagtcacggggcacagcctcctgttcacccactggcttcccccttcccactgaagtgtgagctctatgtttcagggcatctattaaagagtgagccacaggcagccccttgggagctctggtttcatttgggggagagggaggtgggggcttagtttttgtgatctggctgactggaccccgggaacagcgctcctttgagaacgcccagacctaccagatgaagcacttggcatggctgcaggccagcaggggaggcctcagaggcccaggctgggcacgtgggtgccgagtctgcaaagga

SEQ ID NO: 40316 - DNA, 469 bp, Homo sapiens
acccatgtaaccgccgccaggggtcggatcggcttcgctcacttaggatcgcaggaatcaggggaaagtgattttaaaggtggtttctccagcacattttaagaaaagggaccaaaagttattttagcttcctcaatagattgcatgttgcttattaggataataaattaatattaaatgcaatatatgtcttgtctttattatggcatctatttaggagttgttcaaatcactgcagtagggctctgcaaataaaataatgtaacctattatcatggatctaatgtactgtaactttatcagtgaaaggtaaaatctcaaataacaagtacaaacattgaacaattacctataaagatttgtaaaagtaaaatttttccaatagatttcattcttgtcattttgtaagacgaccctgcagtccacctgtttgtaacttttttaataaaatagacatctgtattactga

SEQ ID NO: 40317 - DNA, 604 bp, Homo sapiens
ggacttcgctggagagatggcaccggcctgaggtcaaggagaaattgaactaaactctcctttgaagactgtttccagaggcccgttcccgaagccggagtcccgacccgaaaccgtccccggccggctcgctcgctcagcagggcgcggctccagcgccacccggctcgccccgaagagcagcgctggggcagcggagagacagaggagccagcgggtggccatggccttggcgtgacagagcctccccggcggccgggcgggtgcggacggcggggccggacgacccccgcgggagccggggcccagaaacccgcccgggcagcggtaactggaacggagccctcaggcctgagccggctgggctgcgcgagcaggaagcggggtccctgggcccctttgtgtgaagggcgggggaggagtgccgggcagccccgggctgcgggctcctccgacgtccgcctcgccgcagggtcccctcgccgcagccccacccttttccctccccgggggcacgcgcctcctcgcacaacctcagccgggcttttcccaggctacgccctcctccccacgccccctgctcgggctgcagttcctataggaa

SEQ ID NO: 40318 - DNA, 4451 bp, Homo sapiens
ggacttcgctggagagatggcaccggcctgaggtcaaggagaaattgaactaaactctcctttgaagactgtaagtgacattggggaatactcagggagggacagtgggacctcacactactatgattcgcctgtgttctaatgtccaacaatttaggctgagtaataaatctctttatagagtttggccatttagggcttgtaagtaagggaatttggagtcatttttgctaggctggccactgagtctcgcaggtttctgggtacatgcttgaattgaaaagaaagtgacacacctaaaatacagcctagactcctggccctggggctctgtggatccgacacaaagtttacaaatagaaagctagcaaagggaaagatagtcggaagtaacaattttatctaaaaatagaaacttagaatctaacaccagagttactacttgcttttgaatttcaaagactacataggatggcctttaaaacaaaacttcagcatgtaagagccagccaagcaaattgttatacataatcaacgattaaaataaattagtctttaggcctaaaccgtttccaatcaaatctttcttgaatattggttaccttttctgccgtgtagtggttggaatcaaatgagaacatagctgagcagagtaccataaagtctacttctaatgctgctgttttcgagccttgtgatttttttttaagtgactttagtattcgctggtaaagtcaaggcggatctaccagacggtaaaagttctgtgtgtttgtcaggcacggctaagtaaaacgcactgcatctgaaagtctaagggtagtttgcatgcatctctcagcaaaatagcaagtggaagaaataccagcaaggagaataaactttctgggctgtttgatttcccctgcaacttctagtccagggatgtttggcgttctcccggtcgctagattattagcccgcaggttccgcaccggccagggagccgctcaagtcctagggccgggcggctggaggttgcaggtcggaggggcttctacgggtttgggggtgggacggtccgcggcagccgcgggcgggtaaggactgacgtcgcaggtttccagaggcccgttcccgaagccggagtcccgacccgaaaccgtccccggccggctcgctcgctcagcagggcgcggctccagcgccacccggctcgccccgaagagttcgcagatttccgcccaccttccgcctcgtctagccgcgccacagctagcggggtgatctttccccccctctggtaggagttggtgaaggtgagactcatgagggaatacaaggtagtggtgttagggagtggaggggttggcaaatctgcccttactgtgcagtttgtcactgggactttcattgagaaatatgaccccaccattgaagatttctaccgcaaagagatcgaagtggactcttccccctccgtgctggaaattctggacaccgcaggaactgagcagtttgcctccatgagagatctctacatcaaaaacggccaaggtttcatcctggtttatagcctggttaatcaacagtcttttcaggatatcaagccaatgagagatcaaattgtcagagtgaagagatatgaaaaagtcccactaatcctagtaggaaataaagtggatctggaaccagaaagagaggttatgtcttcagaaggcagagctctggctcaagaatggggctgtcctttcatggagacatcggcaaaaagtaaatcaatggtggatgaactttttgctgagatcgtcaggcaaatgaactattcatccctgccggagaagcaagatcagtgttgtacaacttgtgtcgtccagtaaagaagataacctcaatcatggccataccgagcagataaaactcagaggaaatttgcacagatgctgctttggagaactttacaacctgggttgcagaactgagccttggtaaacctgtctctattacagcatgttgccatacatctatttaagtgcataaggtctttggccttcaagatccatcgaccttaaacaggaatgcttagcacgtttaccatacgtttaaaatccattctttatcaatcagtccttttatagctttctaagttcttattgatggctaatatacaagggttaatttttaatattttaattgatttctttaatcagtttctcgacttgtatttattaaatactcaaactcagtattacctactcaatgccttttaaaagaaagttataatggagaaaaaattgagccttaaacaaatggttacttctgtatattacctcgtaccagtgcttcatcctatttgtaaaatctttctcctttaaaattattggttaatactttgagactttgtttacgtgtggcagtgttgtaaaaagaaactaaagatcacattttacctgtatggatggaatatcccttttcttcaagtgcagtttgtgatgtgttttgtttttttttttttttttttgtaattaacatgttctgaaggttacaattgatatttgaaattgactgtagagcatttagttgaagagttaagcattcagttccattaggttttcacatgtgttaatctcatttacagcattgaattgcggcagtaacattttcctttctgtgaagttctaaatttagttatgacctatttagcaatgcctttgaaaagggatattgtatccatggtaaattaattgtatacctaaacagagatagctcatctttgcctatcaggcttgtaattgacatctagtagacttctgcacatgtaaaattgaattcaaataaaatcatacacactttctagttcttaatatttgtctttctgaataatagtttaaagcaatatttgttaaagttttcttgcactatcacaattgctttttagttatttctcaagaagcatgttcgtattagagacaaaatctgtgtaacaggagggagaatagcgccaagtctctgggctattttttatttttgcaaatgtgctttctaatagccattgccttccatgttgtttacctaatcagcatatttttgtctgaatacttgaacattttaacagtaacgcaggtgtagaatcagaaaggaaacttatgcagagtaatattttggttcagttttaacatcgtgacaatgagggctttttctagcaatgatttttaaattgtgtaagtttgacagtattttattgttgggtttttatttgattttagttgtgtgcttttcatttgcagaagttagtaactgcagctcacctactgcaccaaagttctcgattttaggagcccagctttagtcatttgaacatgcttctaaataaaataaaacaaaaccaaaactatacttttgatctataataagagctcaataactttgtcaaggaaagctctaatatatgcagtgatggtttatgaaagggtgtggcaattttaaatttatattgtgtgtgatgttcaaataaagtggtatctacattcatgtgatttatgggtcagcatgaccattaattactgagtagaaattgactaaactttgatttcctttttttaaatcgtgttgcatttgattcctgagcaaattccctcaaagtgaactcttgttcttaaattttgaattttatggtgagattgtaaagatagaggcaattgaaacattgttccttatttatgaactgcttgaagtgaatacttaatttaagtttgcactttaataccaaacttaaaaccaaacactcatttaaaagtaggttaagtgatcatggatcattgttattagctttgtggctttgtgaaattctaaaggaatcaaataattcatcatgatttaaattttctagagattttgatttttttataatgtttctttcctgtagattgtgttcttgtttctctctctctctctctctctctctctctctctctctctctctctctctcaaaattacagtgttcattgtcattgacctcaggcagcaaatttgacttgaattcacttaggatcgcaggaatcaggggaaagtgattttaaaggtggtttctccagcacattttaagaaaagggaccaaaagttattttagcttcctcaatagattgcatgttgcttattaggataataaattaatattaaatgcaatatatgtcttgtctttattatggcatctatttaggagttgttcaaatcactgcagtagggctctgcaaataaaataatgtaacctattatcatggatctaatgtactgtaactttatcagtgaaaggtaaaatctcaaataacaagtacaaacattgaacaattacctataaagatttgtaaaagtaaaatttttccaatagatttcattcttgtcattttgtaagacgaccctgcagtccacctgtttgtaacttttttaataaaatagacatctgtattactga

SEQ ID NO: 40319 - DNA, 4330 bp, Homo sapiens
ggacttcgctggagagatggcaccggcctgaggtcaaggagaaattgaactaaactctcctttgaagactgtaagtgacattggggaatactcagggagggacagtgggacctcacactactatgattcgcctgtgttctaatgtccaacaatttaggctgagtaataaatctctttatagagtttggccatttagggcttgtaagtaagggaatttggagtcatttttgctaggctggccactgagtctcgcaggtttctgggtacatgcttgaattgaaaagaaagtgacacacctaaaatacagcctagactcctggccctggggctctgtggatccgacacaaagtttacaaatagaaagctagcaaagggaaagatagtcggaagtaacaattttatctaaaaatagaaacttagaatctaacaccagagttactacttgcttttgaatttcaaagactacataggatggcctttaaaacaaaacttcagcatgtaagagccagccaagcaaattgttatacataatcaacgattaaaataaattagtctttaggcctaaaccgtttccaatcaaatctttcttgaatattggttaccttttctgccgtgtagtggttggaatcaaatgagaacatagctgagcagagtaccataaagtctacttctaatgctgctgttttcgagccttgtgatttttttttaagtgactttagtattcgctggtaaagtcaaggcggatctaccagacggtaaaagttctgtgtgtttgtcaggcacggctaagtaaaacgcactgcatctgaaagtctaagggtagtttgcatgcatctctcagcaaaatagcaagtggaagaaataccagcaaggagaataaactttctgggctgtttgatttcccctgcaacttctagtccagggatgtttggcgttctcccggtcgctagattattagcccgcaggttccgcaccggccagggagccgctcaagtcctagggccgggcggctggaggttgcaggtcggaggggcttctacgggtttgggggtgggacggtccgcggcagccgcgggcgggtaaggactgacgtcgcaggtttccagaggcccgttcccgaagccggagtcccgacccgaaaccgtccccggccggctcgctcgctcagcagggcgcggctccagcgccacccggctcgccccgaagagttcgcagatttccgcccaccttccgcctcgtctagccgcgccacagctagcggggtgatctttccccccctctggtaggagttggtgaagatttctaccgcaaagagatcgaagtggactcttccccctccgtgctggaaattctggacaccgcaggaactgagcagtttgcctccatgagagatctctacatcaaaaacggccaaggtttcatcctggtttatagcctggttaatcaacagtcttttcaggatatcaagccaatgagagatcaaattgtcagagtgaagagatatgaaaaagtcccactaatcctagtaggaaataaagtggatctggaaccagaaagagaggttatgtcttcagaaggcagagctctggctcaagaatggggctgtcctttcatggagacatcggcaaaaagtaaatcaatggtggatgaactttttgctgagatcgtcaggcaaatgaactattcatccctgccggagaagcaagatcagtgttgtacaacttgtgtcgtccagtaaagaagataacctcaatcatggccataccgagcagataaaactcagaggaaatttgcacagatgctgctttggagaactttacaacctgggttgcagaactgagccttggtaaacctgtctctattacagcatgttgccatacatctatttaagtgcataaggtctttggccttcaagatccatcgaccttaaacaggaatgcttagcacgtttaccatacgtttaaaatccattctttatcaatcagtccttttatagctttctaagttcttattgatggctaatatacaagggttaatttttaatattttaattgatttctttaatcagtttctcgacttgtatttattaaatactcaaactcagtattacctactcaatgccttttaaaagaaagttataatggagaaaaaattgagccttaaacaaatggttacttctgtatattacctcgtaccagtgcttcatcctatttgtaaaatctttctcctttaaaattattggttaatactttgagactttgtttacgtgtggcagtgttgtaaaaagaaactaaagatcacattttacctgtatggatggaatatcccttttcttcaagtgcagtttgtgatgtgttttgtttttttttttttttttttgtaattaacatgttctgaaggttacaattgatatttgaaattgactgtagagcatttagttgaagagttaagcattcagttccattaggttttcacatgtgttaatctcatttacagcattgaattgcggcagtaacattttcctttctgtgaagttctaaatttagttatgacctatttagcaatgcctttgaaaagggatattgtatccatggtaaattaattgtatacctaaacagagatagctcatctttgcctatcaggcttgtaattgacatctagtagacttctgcacatgtaaaattgaattcaaataaaatcatacacactttctagttcttaatatttgtctttctgaataatagtttaaagcaatatttgttaaagttttcttgcactatcacaattgctttttagttatttctcaagaagcatgttcgtattagagacaaaatctgtgtaacaggagggagaatagcgccaagtctctgggctattttttatttttgcaaatgtgctttctaatagccattgccttccatgttgtttacctaatcagcatatttttgtctgaatacttgaacattttaacagtaacgcaggtgtagaatcagaaaggaaacttatgcagagtaatattttggttcagttttaacatcgtgacaatgagggctttttctagcaatgatttttaaattgtgtaagtttgacagtattttattgttgggtttttatttgattttagttgtgtgcttttcatttgcagaagttagtaactgcagctcacctactgcaccaaagttctcgattttaggagcccagctttagtcatttgaacatgcttctaaataaaataaaacaaaaccaaaactatacttttgatctataataagagctcaataactttgtcaaggaaagctctaatatatgcagtgatggtttatgaaagggtgtggcaattttaaatttatattgtgtgtgatgttcaaataaagtggtatctacattcatgtgatttatgggtcagcatgaccattaattactgagtagaaattgactaaactttgatttcctttttttaaatcgtgttgcatttgattcctgagcaaattccctcaaagtgaactcttgttcttaaattttgaattttatggtgagattgtaaagatagaggcaattgaaacattgttccttatttatgaactgcttgaagtgaatacttaatttaagtttgcactttaataccaaacttaaaaccaaacactcatttaaaagtaggttaagtgatcatggatcattgttattagctttgtggctttgtgaaattctaaaggaatcaaataattcatcatgatttaaattttctagagattttgatttttttataatgtttctttcctgtagattgtgttcttgtttctctctctctctctctctctctctctctctctctctctctctctctctcaaaattacagtgttcattgtcattgacctcaggcagcaaatttgacttgaattcacttaggatcgcaggaatcaggggaaagtgattttaaaggtggtttctccagcacattttaagaaaagggaccaaaagttattttagcttcctcaatagattgcatgttgcttattaggataataaattaatattaaatgcaatatatgtcttgtctttattatggcatctatttaggagttgttcaaatcactgcagtagggctctgcaaataaaataatgtaacctattatcatggatctaatgtactgtaactttatcagtgaaaggtaaaatctcaaataacaagtacaaacattgaacaattacctataaagatttgtaaaagtaaaatttttccaatagatttcattcttgtcattttgtaagacgaccctgcagtccacctgtttgtaacttttttaataaaatagacatctgtattactga

SEQ ID NO: 40320 - DNA, 2898 bp, Homo sapiens
acaacttttatactgtaagatcatttaaaccagtaaggacatttttaatattgcataagtataatacaagtacaaggcataataatattatagaaataagctagaatagctacacacacgcacacacacgcacacacaaagtacattatatccaatgcatcacttctgtgtttctatttttttttaatgacttatcaggacgagggaaaattaactttctactttaactgaagtttgttattcttgttaccacttctctgtgtatatagatctgttgtcagtgttctctttttaaactatgtatttctacatttttatgacatgtttatcttaattgcagataaaactcagaggaaatttgcacagatgctgctttggagaactttacaacctgggttgcagaactgagccttggtaaacctgtctctattacagcatgttgccatacatctatttaagtgcataaggtctttggccttcaagatccatcgaccttaaacaggaatgcttagcacgtttaccatacgtttaaaatccattctttatcaatcagtccttttatagctttctaagttcttattgatggctaatatacaagggttaatttttaatattttaattgatttctttaatcagtttctcgacttgtatttattaaatactcaaactcagtattacctactcaatgccttttaaaagaaagttataatggagaaaaaattgagccttaaacaaatggttacttctgtatattacctcgtaccagtgcttcatcctatttgtaaaatctttctcctttaaaattattggttaatactttgagactttgtttacgtgtggcagtgttgtaaaaagaaactaaagatcacattttacctgtatggatggaatatcccttttcttcaagtgcagtttgtgatgtgttttgtttttttttttttttttttgtaattaacatgttctgaaggttacaattgatatttgaaattgactgtagagcatttagttgaagagttaagcattcagttccattaggttttcacatgtgttaatctcatttacagcattgaattgcggcagtaacattttcctttctgtgaagttctaaatttagttatgacctatttagcaatgcctttgaaaagggatattgtatccatggtaaattaattgtatacctaaacagagatagctcatctttgcctatcaggcttgtaattgacatctagtagacttctgcacatgtaaaattgaattcaaataaaatcatacacactttctagttcttaatatttgtctttctgaataatagtttaaagcaatatttgttaaagttttcttgcactatcacaattgctttttagttatttctcaagaagcatgttcgtattagagacaaaatctgtgtaacaggagggagaatagcgccaagtctctgggctattttttatttttgcaaatgtgctttctaatagccattgccttccatgttgtttacctaatcagcatatttttgtctgaatacttgaacattttaacagtaacgcaggtgtagaatcagaaaggaaacttatgcagagtaatattttggttcagttttaacatcgtgacaatgagggctttttctagcaatgatttttaaattgtgtaagtttgacagtattttattgttgggtttttatttgattttagttgtgtgcttttcatttgcagaagttagtaactgcagctcacctactgcaccaaagttctcgattttaggagcccagctttagtcatttgaacatgcttctaaataaaataaaacaaaaccaaaactatacttttgatctataataagagctcaataactttgtcaaggaaagctctaatatatgcagtgatggtttatgaaagggtgtggcaattttaaatttatattgtgtgtgatgttcaaataaagtggtatctacattcatgtgatttatgggtcagcatgaccattaattactgagtagaaattgactaaactttgatttcctttttttaaatcgtgttgcatttgattcctgagcaaattccctcaaagtgaactcttgttcttaaattttgaattttatggtgagattgtaaagatagaggcaattgaaacattgttccttatttatgaactgcttgaagtgaatacttaatttaagtttgcactttaataccaaacttaaaaccaaacactcatttaaaagtaggttaagtgatcatggatcattgttattagctttgtggctttgtgaaattctaaaggaatcaaataattcatcatgatttaaattttctagagattttgatttttttataatgtttctttcctgtagattgtgttcttgtttctctctctctctctctctctctctctctctctctctctctctctctctcaaaattacagtgttcattgtcattgacctcaggcagcaaatttgacttgaattcacttaggatcgcaggaatcaggggaaagtgattttaaaggtggtttctccagcacattttaagaaaagggaccaaaagttattttagcttcctcaatagattgcatgttgcttattaggataataaattaatattaaatgcaatatatgtcttgtctttattatggcatctatttaggagttgttcaaatcactgcagtagggctctgcaaataaaataatgtaacctattatcatggatctaatgtactgtaactttatcagtgaaaggtaaaatctcaaataacaagtacaaacattgaacaattacctataaagatttgtaaaagtaaaatttttccaatagatttcattcttgtcattttgtaagacgaccctgcagtccacctgtttgtaacttttttaataaaatagacatctgtattactga

SEQ ID NO: 40321 - DNA, 4193 bp, Homo sapiens
ggacttcgctggagagatggcaccggcctgaggtcaaggagaaattgaactaaactctcctttgaagactgtaagtgacattggggaatactcagggagggacagtgggacctcacactactatgattcgcctgtgttctaatgtccaacaatttaggctgagtaataaatctctttatagagtttggccatttagggcttgtaagtaagggaatttggagtcatttttgctaggctggccactgagtctcgcaggtttctgggtacatgcttgaattgaaaagaaagtgacacacctaaaatacagcctagactcctggccctggggctctgtggatccgacacaaagtttacaaatagaaagctagcaaagggaaagatagtcggaagtaacaattttatctaaaaatagaaacttagaatctaacaccagagttactacttgcttttgaatttcaaagactacataggatggcctttaaaacaaaacttcagcatgtaagagccagccaagcaaattgttatacataatcaacgattaaaataaattagtctttaggcctaaaccgtttccaatcaaatctttcttgaatattggttaccttttctgccgtgtagtggttggaatcaaatgagaacatagctgagcagagtaccataaagtctacttctaatgctgctgttttcgagccttgtgatttttttttaagtgactttagtattcgctggtaaagtcaaggcggatctaccagacggtaaaagttctgtgtgtttgtcaggcacggctaagtaaaacgcactgcatctgaaagtctaagggtagtttgcatgcatctctcagcaaaatagcaagtggaagaaataccagcaaggagaataaactttctgggctgtttgatttcccctgcaacttctagtccagggatgtttggcgttctcccggtcgctagattattagcccgcaggttccgcaccggccagggagccgctcaagtcctagggccgggcggctggaggttgcaggtcggaggggcttctacgggtttgggggtgggacggtccgcggcagccgcgggcgggtaaggactgacgtcgcaggtttccagaggcccgttcccgaagccggagtcccgacccgaaaccgtccccggccggctcgctcgctcagcagggcgcggctccagcgccacccggctcgccccgaagagttcgcagatttccgcccaccttccgcctcgtctagccgcgccacagctagcggggtgatctttccccccctctggtaggagttggtgaaggtgagactcatgagggaatacaaggtagtggtgttagggagtggaggggttggcaaatctgcccttactgtgcagtttgtcactgggactttcattgagaaatatgaccccaccattgaagatttctaccgcaaagagatcgaagtggactcttccccctccgtgctggaaattctggacaccgcaggaactgagcagtttgcctccatgagagatctctacatcaaaaacggccaaggtttcatcctggtttatagcctggttaatcaacagtcttttcaggatatcaagccaatgagagatcaaattgtcagagtgaagagatatgaaaaagtcccactaatcctagtaggaaataaagtggatctggaaccagaaagagaggttatgtcttcagaaggcagagctctggctcaagaatggggctgtcctttcatggagacatcggcaaaaagtaaatcaatggtggatgaactttttgctgagatcgtcaggcaaatgaactattcatccctgccggagaagcaagatcagtgttgtacaacttgtgtcgtccagtaaagaagataacctcaatcatggccataccgagcagataaaactcagaggaaatttgcacagatgctgctttggagaactttacaacctgggttgcagaactgagccttggtaaacctgtctctattacagcatgttgccatacatctatttaagtgcataaggtctttggccttcaagatccatcgaccttaaacaggaatgcttagcacgtttaccatacgtttaaaatccattctttatcaatcagtccttttatagctttctaagttcttattgatggctaatatacaagggttaatttttaatattttaattgatttctttaatcagtttctcgacttgtatttattaaatactcaaactcagtattacctactcaatgccttttaaaagaaagttataatggagaaaaaattgagccttaaacaaatggttacttctgtatattacctcgtaccagtgcttcatcctatttgtaaaatctttctcctttaaaattattggttaatactttgagactttgtttacgtgtggcagtgttgtaaaaagaaactaaagatcacattttacctgtatggatggaatatcccttttcttcaagtgcagtttgtgatgtgttttgtttttttttttttttttttgtaattaacatgttctgaaggttacaattgatatttgaaattgactgtagagcatttagttgaagagttaagcattcagttccattaggttttcacatgtgttaatctcatttacagcattgaattgcggcagtaacattttcctttctgtgaagttctaaatttagttatgacctatttagcaatgcctttgaaaagggatattgtatccatggtaaattaattgtatacctaaacagagatagctcatctttgcctatcaggcttgtaattgacatctagtagacttctgcacatgtaaaattgaattcaaataaaatcatacacactttctagttcttaatatttgtctttctgaataatagtttaaagcaatatttgttaaagttttcttgcactatcacaattgctttttagttatttctcaagaagcatgttcgtattagagacaaaatctgtgtaacaggagggagaatagcgccaagtctctgggctattttttatttttgcaaatgtgctttctaatagccattgccttccatgttgtttacctaatcagcatatttttgtctgaatacttgaacattttaacagtaacgcaggtgtagaatcagaaaggaaacttatgcagagtaatattttggttcagttttaacatcgtgacaatgagggctttttctagcaatgatttttaaattgtgtaagtttgacagtattttattgttgggtttttatttgattttagttgtgtgcttttcatttgcagaagttagtaactgcagctcacctactgcaccaaagttctcgattttaggagcccagctttagtcatttgaacatgcttctaaataaaataaaacaaaaccaaaactatacttttgatctataataagagctcaataactttgtcaaggaaagctctaatatatgcagtgatggtttatgaaagggtgtggcaattttaaatttatattgtgtgtgatgttcaaataaagtggtatctacattcatgtgatttatgggtcagcatgaccattaattactgagtagaaattgactaaactttgatttcctttttttaaatcgtgttgcatttgattcctgagcaaattccctcaaagtgaactcttgttcttaaattttgaattttatggtgagattgtaaagatagaggcaattgaaacattgttccttatttatgaactgcttgaagtgaatacttaatttaagtttgcactttaataccaaacttaaaaccaaacactcatttaaaagtaggttaagtgatcatggatcattgttattagctttgtggctttgtgaaattctaaaggaatcaaataattcatcatgatttaaattttctagagattttgatttttttataatgtttctttcctgtagattgtgttcttgtttctctctctctctctctctctctctctctctctctcaaaattacagtgttcattgtcattgacctcaggcagcaaatttgacttgaatgagagagagagagggggagagatatagagagagagggagagagagagagaaagggttcatgtcagcatatacatattatgaacagatgtatgcggacacctgtgcgtcgaatatctcattccagagttctgcgcatttatatgttggtccccccctttggtgctataacagcctccactcttctgga

SEQ ID NO: 40322 - DNA, 1682 bp, Homo sapiens
taaagccctcattgtcacgatgttaaaactgtaccaaaatattactctgcataggtttcctttctagttcttaatatttgtctttctgaataatagtttaaagcaatatttgttaaagttttcttgcactatcacaattgctttttagttatttctcaagaagcatgttcgtattagagacaaaatctgtgtaacaggagggagaatagcgccaagtctctgggctattttttatttttgcaaatgtgctttctaatagccattgccttccatgttgtttacctaatcagcatatttttgtctgaatacttgaacattttaacagtaacgcaggtgtagaatcagaaaggaaacttatgcagagtaatattttggttcagttttaacatcgtgacaatgagggctttttctagcaatgatttttaaattgtgtaagtttgacagtattttattgttgggtttttatttgattttagttgtgtgcttttcatttgcagaagttagtaactgcagctcacctactgcaccaaagttctcgattttaggagcccagctttagtcatttgaacatgcttctaaataaaataaaacaaaaccaaaactatacttttgatctataataagagctcaataactttgtcaaggaaagctctaatatatgcagtgatggtttatgaaagggtgtggcaattttaaatttatattgtgtgtgatgttcaaataaagtggtatctacattcatgtgatttatgggtcagcatgaccattaattactgagtagaaattgactaaactttgatttcctttttttaaatcgtgttgcatttgattcctgagcaaattccctcaaagtgaactcttgttcttaaattttgaattttatggtgagattgtaaagatagaggcaattgaaacattgttccttatttatgaactgcttgaagtgaatacttaatttaagtttgcactttaataccaaacttaaaaccaaacactcatttaaaagtaggttaagtgatcatggatcattgttattagctttgtggctttgtgaaattctaaaggaatcaaataattcatcatgatttaaattttctagagattttgatttttttataatgtttctttcctgtagattgtgttcttgtttctctctctctctctctctctctctctctctctctctctctctctctctcaaaattacagtgttcattgtcattgacctcaggcagcaaatttgacttgaattcacttaggatcgcaggaatcaggggaaagtgattttaaaggtggtttctccagcacattttaagaaaagggaccaaaagttattttagcttcctcaatagattgcatgttgcttattaggataataaattaatattaaatgcaatatatgtcttgtctttattatggcatctatttaggagttgttcaaatcactgcagtagggctctgcaaataaaataatgtaacctattatcatggatctaatgtactgtaactttatcagtgaaaggtaaaatctcaaataacaagtacaaacattgaacaattacctataaagatttgtaaaagtaaaatttttccaatagatttcattcttgtcattttgtaagacgaccctgcagtccacctgtttgtaacttttttaataaaatagacatctgtattactga

SEQ ID NO: 40323 - DNA, 2343 bp, Homo sapiens
ggacttcgctggagagatggcaccggcctgaggtcaaggagaaattgaactaaactctcctttgaagactgtaagtgacattggggaatactcagggagggacagtgggacctcacactactatgattcgcctgtgttctaatgtccaacaatttaggctgagtaataaatctctttatagagtttggccatttagggcttgtaagtaagggaatttggagtcatttttgctaggctggccactgagtctcgcaggtttctgggtacatgcttgaattgaaaagaaagtgacacacctaaaatacagcctagactcctggccctggggctctgtggatccgacacaaagtttacaaatagaaagctagcaaagggaaagatagtcggaagtaacaattttatctaaaaatagaaacttagaatctaacaccagagttactacttgcttttgaatttcaaagactacataggatggcctttaaaacaaaacttcagcatgtaagagccagccaagcaaattgttatacataatcaacgattaaaataaattagtctttaggcctaaaccgtttccaatcaaatctttcttgaatattggttaccttttctgccgtgtagtggttggaatcaaatgagaacatagctgagcagagtaccataaagtctacttctaatgctgctgttttcgagccttgtgatttttttttaagtgactttagtattcgctggtaaagtcaaggcggatctaccagacggtaaaagttctgtgtgtttgtcaggcacggctaagtaaaacgcactgcatctgaaagtctaagggtagtttgcatgcatctctcagcaaaatagcaagtggaagaaataccagcaaggagaataaactttctgggctgtttgatttcccctgcaacttctagtccagggatgtttggcgttctcccggtcgctagattattagcccgcaggttccgcaccggccagggagccgctcaagtcctagggccgggcggctggaggttgcaggtcggaggggcttctacgggtttgggggtgggacggtccgcggcagccgcgggcgggtaaggactgacgtcgcaggtttccagaggcccgttcccgaagccggagtcccgacccgaaaccgtccccggccggctcgctcgctcagcagggcgcggctccagcgccacccggctcgccccgaagagttcgcagatttccgcccaccttccgcctcgtctagccgcgccacagctagcggggtgatctttccccccctctggtaggagttggtgaaggtgagactcatgagggaatacaaggtagtggtgttagggagtggaggggttggcaaatctgcccttactgtgcagtttgtcactgggactttcattgagaaatatgaccccaccattgaagatttctaccgcaaagagatcgaagtggactcttccccctccgtgctggaaattctggacaccgcaggaactgagcagtttgcctccatgagagatctctacatcaaaaacggccaaggtttcatcctggtttatagcctggttaatcaacagtcttttcaggatatcaagccaatgagagatcaaattgtcagagtgaagagatatgaaaaagtcccactaatcctagtaggaaataaagtggatctggaaccagaaagagaggttatgtcttcagaaggcagagctctggctcaagaatggggctgtcctttcatggagacatcggcaaaaagtaaatcaatggtggatgaactttttgctgagatcgtcaggcaaatgaactattcatccctgccggagaagcaagatcagtgttgtacaacttgtgtcgtccagtaaagaagataacctcaatcatggccataccgagcaggttagtttttgatggaactgtatgaatcaggtagtgttttgttttttgatcaagtaaaacaaaaagctggttagtgttaatacatatggcactgccttaaatttctttatttttaaaataacattttccatcacacaaaatagtcaacattcaatgaagaaaatttttttaaatgcagataagcaaagcggagataagaaattgcttatattcccatcaccaggattttaagtgagttattgttcttccttctctgctttattggtaatatttctttgggttgagttaaaccataatacactttttccctgttcttctgatttagcatccagaatgcacaggagagcactgagtaataatttcagaagttttgtggtattttctgtacttttatgtttttatgtcctgagcaagcaaattgctgcaattaaaatcaccaatttactaatc

SEQ ID NO: 40324 - DNA, 579 bp, Homo sapiens
tgtcagggaaacccttccgggtgtgtgcttggtgggggtgggggtgggggtgggggtgggggtggggggtgggtgagaaaaaaaagaggtgggttcgcctggagtccctgcggccgccgccggacggcccccgcctctttccccgcggcgagcagcagcgctggggcagcggagagacagaggagccagcgggtggccatggccttggcgtgacagagcctccccggcggccgggcgggtgcggacggcggggccggacgacccccgcgggagccggggcccagaaacccgcccgggcagcggtaactggaacggagccctcaggcctgagccggctgggctgcgcgagcaggaagcggggtccctgggcccctttgtgtgaagggcgggggaggagtgccgggcagccccgggctgcgggctcctccgacgtccgcctcgccgcagggtcccctcgccgcagccccacccttttccctccccgggggcacgcgcctcctcgcacaacctcagccgggcttttcccaggctacgccctcctccccacgccccctgctcgggctgcagttcctataggaa

SEQ ID NO: 40325 - DNA, 3297 bp, Homo sapiens
acttcctcttcttccccggttgggccctctgctcctctgcactctcctccccagttcgcagatttccgcccaccttccgcctcgtctagccgcgccacagctagcggggtgatctttccccccctctggtaggagttggtgaaggtgagactcatgagggaatacaaggtagtggtgttagggagtggaggggttggcaaatctgcccttactgtgcagtttgtcactgggactttcattgagaaatatgaccccaccattgaagatttctaccgcaaagagatcgaagtggactcttccccctccgtgctggaaattctggacaccgcaggaactgagcagtttgcctccatgagagatctctacatcaaaaacggccaaggtttcatcctggtttatagcctggttaatcaacagtcttttcaggatatcaagccaatgagagatcaaattgtcagagtgaagagatatgaaaaagtcccactaatcctagtaggaaataaagtggatctggaaccagaaagagaggttatgtcttcagaaggcagagctctggctcaagaatggggctgtcctttcatggagacatcggcaaaaagtaaatcaatggtggatgaactttttgctgagatcgtcaggcaaatgaactattcatccctgccggagaagcaagatcagtgttgtacaacttgtgtcgtccagtaaagaagataacctcaatcatggccataccgagcagataaaactcagaggaaatttgcacagatgctgctttggagaactttacaacctgggttgcagaactgagccttggtaaacctgtctctattacagcatgttgccatacatctatttaagtgcataaggtctttggccttcaagatccatcgaccttaaacaggaatgcttagcacgtttaccatacgtttaaaatccattctttatcaatcagtccttttatagctttctaagttcttattgatggctaatatacaagggttaatttttaatattttaattgatttctttaatcagtttctcgacttgtatttattaaatactcaaactcagtattacctactcaatgccttttaaaagaaagttataatggagaaaaaattgagccttaaacaaatggttacttctgtatattacctcgtaccagtgcttcatcctatttgtaaaatctttctcctttaaaattattggttaatactttgagactttgtttacgtgtggcagtgttgtaaaaagaaactaaagatcacattttacctgtatggatggaatatcccttttcttcaagtgcagtttgtgatgtgttttgtttttttttttttttttttgtaattaacatgttctgaaggttacaattgatatttgaaattgactgtagagcatttagttgaagagttaagcattcagttccattaggttttcacatgtgttaatctcatttacagcattgaattgcggcagtaacattttcctttctgtgaagttctaaatttagttatgacctatttagcaatgcctttgaaaagggatattgtatccatggtaaattaattgtatacctaaacagagatagctcatctttgcctatcaggcttgtaattgacatctagtagacttctgcacatgtaaaattgaattcaaataaaatcatacacactttctagttcttaatatttgtctttctgaataatagtttaaagcaatatttgttaaagttttcttgcactatcacaattgctttttagttatttctcaagaagcatgttcgtattagagacaaaatctgtgtaacaggagggagaatagcgccaagtctctgggctattttttatttttgcaaatgtgctttctaatagccattgccttccatgttgtttacctaatcagcatatttttgtctgaatacttgaacattttaacagtaacgcaggtgtagaatcagaaaggaaacttatgcagagtaatattttggttcagttttaacatcgtgacaatgagggctttttctagcaatgatttttaaattgtgtaagtttgacagtattttattgttgggtttttatttgattttagttgtgtgcttttcatttgcagaagttagtaactgcagctcacctactgcaccaaagttctcgattttaggagcccagctttagtcatttgaacatgcttctaaataaaataaaacaaaaccaaaactatacttttgatctataataagagctcaataactttgtcaaggaaagctctaatatatgcagtgatggtttatgaaagggtgtggcaattttaaatttatattgtgtgtgatgttcaaataaagtggtatctacattcatgtgatttatgggtcagcatgaccattaattactgagtagaaattgactaaactttgatttcctttttttaaatcgtgttgcatttgattcctgagcaaattccctcaaagtgaactcttgttcttaaattttgaattttatggtgagattgtaaagatagaggcaattgaaacattgttccttatttatgaactgcttgaagtgaatacttaatttaagtttgcactttaataccaaacttaaaaccaaacactcatttaaaagtaggttaagtgatcatggatcattgttattagctttgtggctttgtgaaattctaaaggaatcaaataattcatcatgatttaaattttctagagattttgatttttttataatgtttctttcctgtagattgtgttcttgtttctctctctctctctctctctctctctctctctctctctctctctctctcaaaattacagtgttcattgtcattgacctcaggcagcaaatttgacttgaattcacttaggatcgcaggaatcaggggaaagtgattttaaaggtggtttctccagcacattttaagaaaagggaccaaaagttattttagcttcctcaatagattgcatgttgcttattaggataataaattaatattaaatgcaatatatgtcttgtctttattatggcatctatttaggagttgttcaaatcactgcagtagggctctgcaaataaaataatgtaacctattatcatggatctaatgtactgtaactttatcagtgaaaggtaaaatctcaaataacaagtacaaacattgaacaattacctataaagatttgtaaaagtaaaatttttccaatagatttcattcttgtcattttgtaagacgaccctgcagtccacctgtttgtaacttttttaataaaatagacatctgtattactga

SEQ ID NO: 40326 - DNA, 4228 bp, Homo sapiens
ggacttcgctggagagatggcaccggcctgaggtcaaggagaaattgaactaaactctcctttgaagactgtaagtgacattggggaatactcagggagggacagtgggacctcacactactatgattcgcctgtgttctaatgtccaacaatttaggctgagtaataaatctctttatagagtttggccatttagggcttgtaagtaagggaatttggagtcatttttgctaggctggccactgagtctcgcaggtttctgggtacatgcttgaattgaaaagaaagtgacacacctaaaatacagcctagactcctggccctggggctctgtggatccgacacaaagtttacaaatagaaagctagcaaagggaaagatagtcggaagtaacaattttatctaaaaatagaaacttagaatctaacaccagagttactacttgcttttgaatttcaaagactacataggatggcctttaaaacaaaacttcagcatgtaagagccagccaagcaaattgttatacataatcaacgattaaaataaattagtctttaggcctaaaccgtttccaatcaaatctttcttgaatattggttaccttttctgccgtgtagtggttggaatcaaatgagaacatagctgagcagagtaccataaagtctacttctaatgctgctgttttcgagccttgtgatttttttttaagtgactttagtattcgctggtaaagtcaaggcggatctaccagacggtaaaagttctgtgtgtttgtcaggcacggctaagtaaaacgcactgcatctgaaagtctaagggtagtttgcatgcatctctcagcaaaatagcaagtggaagaaataccagcaaggagaataaactttctgggctgtttgatttcccctgcaacttctagtccagggatgtttggcgttctcccggtcgctagattattagcccgcaggttccgcaccggccagggagccgctcaagtcctagggccgggcggctggaggttgcaggtcggaggggcttctacgggtttgggggtgggacggtccgcggcagccgcgggcgggtaaggactgacgtcgcaggtttccagaggcccgttcccgaagccggagtcccgacccgaaaccgtccccggccggctcgctcgctcagcagggcgcggctccagcgccacccggctcgccccgaagagttcgcagatttccgcccaccttccgcctcgtctagccgcgccacagctagcggggtgatctttccccccctctggtaggagttggtgaaggtgagactcatgagggaatacaaggtagtggtgttagggagtggaggggttggcaaatctgcccttactgtgcagtttgtcactgggactttcattgagaaatatgaccccaccattgaagatttctaccgcaaagagatcgaagtggactcttccccctccgtgctggaaattctggacaccgcaggaactgagcagtttgcctccatgagagatctctacatcaaaaacggccaaggtttcatcctggtttatagcctggttaatcaacagtcttttcaggatatcaagccaatgagagatcaaattgtcagagtgaagagatatgaaaaagtcccactaatcctagtaggaaataaagtggatctggaaccagaaagagaggttatgtcttcagaaggcagagctctggctcaagaatggggctgtcctttcatggagacatcggcaaaaagtaaatcaatggtggatgaactttttgctgagatcgtcaggcaaatgaactattcatccctgccggagaagcaagatcagtgttgtacaacttgtgtcgtccagtaaagaagataacctcaatcatggccataccgagcagataaaactcagaggaaatttgcacagatgctgctttggagaactttacaacctgggttgcagaactgagccttggtaaacctgtctctattacagcatgttgccatacatctatttaagtgcataaggtctttggccttcaagatccatcgaccttaaacaggatgaagcactggtacgaggtaatatacagaagtaaccatttgcttcatcctatttgtaaaatctttctcctttaaaattattggttaatactttgagactttgtttacgtgtggcagtgttgtaaaaagaaactaaagatcacattttacctgtatggatggaatatcccttttcttcaagtgcagtttgtgatgtgttttgtttttttttttttttttttgtaattaacatgttctgaaggttacaattgatatttgaaattgactgtagagcatttagttgaagagttaagcattcagttccattaggttttcacatgtgttaatctcatttacagcattgaattgcggcagtaacattttcctttctgtgaagttctaaatttagttatgacctatttagcaatgcctttgaaaagggatattgtatccatggtaaattaattgtatacctaaacagagatagctcatctttgcctatcaggcttgtaattgacatctagtagacttctgcacatgtaaaattgaattcaaataaaatcatacacactttctagttcttaatatttgtctttctgaataatagtttaaagcaatatttgttaaagttttcttgcactatcacaattgctttttagttatttctcaagaagcatgttcgtattagagacaaaatctgtgtaacaggagggagaatagcgccaagtctctgggctattttttatttttgcaaatgtgctttctaatagccattgccttccatgttgtttacctaatcagcatatttttgtctgaatacttgaacattttaacagtaacgcaggtgtagaatcagaaaggaaacttatgcagagtaatattttggttcagttttaacatcgtgacaatgagggctttttctagcaatgatttttaaattgtgtaagtttgacagtattttattgttgggtttttatttgattttagttgtgtgcttttcatttgcagaagttagtaactgcagctcacctactgcaccaaagttctcgattttaggagcccagctttagtcatttgaacatgcttctaaataaaataaaacaaaaccaaaactatacttttgatctataataagagctcaataactttgtcaaggaaagctctaatatatgcagtgatggtttatgaaagggtgtggcaattttaaatttatattgtgtgtgatgttcaaataaagtggtatctacattcatgtgatttatgggtcagcatgaccattaattactgagtagaaattgactaaactttgatttcctttttttaaatcgtgttgcatttgattcctgagcaaattccctcaaagtgaactcttgttcttaaattttgaattttatggtgagattgtaaagatagaggcaattgaaacattgttccttatttatgaactgcttgaagtgaatacttaatttaagtttgcactttaataccaaacttaaaaccaaacactcatttaaaagtaggttaagtgatcatggatcattgttattagctttgtggctttgtgaaattctaaaggaatcaaataattcatcatgatttaaattttctagagattttgatttttttataatgtttctttcctgtagattgtgttcttgtttctctctctctctctctctctctctctctctctctctctctctctctctcaaaattacagtgttcattgtcattgacctcaggcagcaaatttgacttgaattcacttaggatcgcaggaatcaggggaaagtgattttaaaggtggtttctccagcacattttaagaaaagggaccaaaagttattttagcttcctcaatagattgcatgttgcttattaggataataaattaatattaaatgcaatatatgtcttgtctttattatggcatctatttaggagttgttcaaatcactgcagtagggctctgcaaataaaataatgtaacctattatcatggatctaatgtactgtaactttatcagtgaaaggtaaaatctcaaataacaagtacaaacattgaacaattacctataaagatttgtaaaagtaaaatttttccaatagatttcattcttgtcattttgtaagacgaccctgcagtccacctgtttgtaacttttttaataaaatagacatctgtattactga

SEQ ID NO: 40327 - DNA, 4437 bp, Homo sapiens
ggacttcgctggagagatggcaccggcctgaggtcaaggagaaattgaactaaactctcctttgaagactgtaagtgacattggggaatactcagggagggacagtgggacctcacactactatgattcgcctgtgttctaatgtccaacaatttaggctgagtaataaatctctttatagagtttggccatttagggcttgtaagtaagggaatttggagtcatttttgctaggctggccactgagtctcgcaggtttctgggtacatgcttgaattgaaaagaaagtgacacacctaaaatacagcctagactcctggccctggggctctgtggatccgacacaaagtttacaaatagaaagctagcaaagggaaagatagtcggaagtaacaattttatctaaaaatagaaacttagaatctaacaccagagttactacttgcttttgaatttcaaagactacataggatggcctttaaaacaaaacttcagcatgtaagagccagccaagcaaattgttatacataatcaacgattaaaataaattagtctttaggcctaaaccgtttccaatcaaatctttcttgaatattggttaccttttctgccgtgtagtggttggaatcaaatgagaacatagctgagcagagtaccataaagtctacttctaatgctgctgttttcgagccttgtgatttttttttaagtgactttagtattcgctggtaaagtcaaggcggatctaccagacggtaaaagttctgtgtgtttgtcaggcacggctaagtaaaacgcactgcatctgaaagtctaagggtagtttgcatgcatctctcagcaaaatagcaagtggaagaaataccagcaaggagaataaactttctgggctgtttgatttcccctgcaacttctagtccagggatgtttggcgttctcccggtcgctagattattagcccgcaggttccgcaccggccagggagccgctcaagtcctagggccgggcggctggaggttgcaggtcggaggggcttctacgggtttgggggtgggacggtccgcggcagccgcgggcgggtaaggactgacgtcgcaggtttccagaggcccgttcccgaagccggagtcccgacccgaaaccgtccccggccggctcgctcgctcagcagggcgcggctccagcgccacccggctcgccccgaagagttcgcagatttccgcccaccttccgcctcgtctagccgcgccacagctagcggggtgatctttccccccctctggtaggagttggtgaaggtgagactcatgagggaatacaaggtagtggtgttagggagtggaggggttggcaaatctgcccttactgtgcagtttgtcactgggactttcattgagaaatatgaccccaccattgaagatttctaccgcaaagagatcgaagtggactcttccccctccgtgctggaaattctggacaccgcaggaactgagcagtttgcctccatgagagatctctacatcaaaaacggccaaggtttcatcctggtttatagcctggttaatcaacagtcttttcaggatatcaagccaatgagagatcaaattgtcagagtgaagagatatgaaaaagtcccactaatcctagtaggaaataaagtggatctggaaccagaaagagaggttatgtcttcagaaggcagagctctggctcaagaatggggctgtcctttcatggagacatcggcaaaaagtaaatcaatggtggatgaactttttgctgagatcgtcaggcaaatgaactattcatccctgccggagaagcaagatcagtgttgtacaacttgtgtcgtccagtaaagaagataacctcaatcatggccataccgagcagataaaactcagaggaaatttgcacagatgctgctttggagaactttacaacctgggttgcagaactgagccttggtaaacctgtctctattacagcatgttgccatacatctatttaagtgcataaggtctttggccttcaagatccatcgaccttaaacaggaatgcttagcacgtttaccatacgtttaaaatccattctttatcaatcagtccttttatagctttctaagttcttattgatggctaatatacaagggttaatttttaatattttaattgatttctttaatcagtttctcgacttgtatttattaaatactcaaactcagtattacctactcaatgccttttaaaagaaagttataatggagaaaaaattgagccttaaacaaatggttacttctgtatattacctcgtaccagtgcttcatcctatttgtaaaatctttctcctttaaaattattggttaatactttgagactttgtttacgtgtggcagtgttgtaaaaagaaactaaagatcacattttacctgtatggatggaatatcccttttcttcaagtgcagtttgtgatgtgttttgtttttttttttttttttttgtaattaacatgttctgaaggttacaattgatatttgaaattgactgtagagcatttagttgaagagttaagcattcagttccattaggttttcacatgtgttaatctcatttacagcattgaattgcggcagtaacattttcctttctgtgaagttctaaatttagttatgacctatttagcaatgcctttgaaaagggatattgtatccatggtaaattaattgtatacctaaacagagatagctcatctttgcctatcaggcttgtaattgacatctagtagacttctgcacatgtaaaattgaattcaaataaaatcatacacactttctagttcttaatatttgtctttctgaataatagtttaaagcaatatttgttaaagttttcttgcactatcacaattgctttttagttatttctcaagaagcatgttcgtattagagacaaaatctgtgtaacaggagggagaatagcgccaagtctctgggctattttttatttttgcaaatgtgctttctaatagccattgccttccatgttgtttacctaatcagcatatttttgtctgaatacttgaacattttaacagtaacgcaggtgtagaatcagaaaggaaacttatgcagagtaatattttggttcagttttaacatcgtgacaatgagggctttttctagcaatgatttttaaattgtgtaagtttgacagtattttattgttgggtttttatttgattttagttgtgtgcttttcatttgcagaagttagtaactgcagctcacctactgcaccaaagttctcgattttaggagcccagctttagtcatttgaacatgcttctaaataaaataaaacaaaaccaaaactatacttttgatctataataagagctcaataactttgtcaaggaaagctctaatatatgcagtgatggtttatgaaagggtgtggcaattttaaatttatattgtgtgtgatgttcaaataaagtggtatctacattcatgtgatttatgggtcagcatgaccattaattactgagtagaaattgactaaactttgatttcctttttttaaatcgtgttgcatttgattcctgagcaaattccctcaaagtgaactcttgttcttaaattttgaattttatggtgagattgtaaagatagaggcaattgaaacattgttccttatttatgaactgcttgaagtgaatacttaatttaagtttgcactttaataccaaacttaaaaccaaacactcatttaaaagtaggttaagtgatcatggatcattgttattagctttgtggctttgtgaaattctaaaggaatcaaataattcatcatgatttaaattttctagagattttgatttttttataatgtttctttcctgtagattgtgttcttgtttctctctctctctctctctctctctctctctctctcaaaattacagtgttcattgtcattgacctcaggcagcaaatttgacttgaattcacttaggatcgcaggaatcaggggaaagtgattttaaaggtggtttctccagcacattttaagaaaagggaccaaaagttattttagcttcctcaatagattgcatgttgcttattaggataataaattaatattaaatgcaatatatgtcttgtctttattatggcatctatttaggagttgttcaaatcactgcagtagggctctgcaaataaaataatgtaacctattatcatggatctaatgtactgtaactttatcagtgaaaggtaaaatctcaaataacaagtacaaacattgaacaattacctataaagatttgtaaaagtaaaatttttccaatagatttcattcttgtcattttgtaagacgaccctgcagtccacctgtttgtaacttttttaataaaatagacatctgtattactga

SEQ ID NO: 40328 - DNA, 488 bp, Homo sapiens
tatactaaattcatataagcacagcccatatatgctttttccaagagggccagatacttagaatcataaaatgttatagcagaaaatgaccttggaaatcatctagttcaatccctcattttacagatagggaaattaagttctatagaggttaagtgacttgtcaaaggttagcgaccaataagtcgcagaaccagggcttaaacccatttcctgatcctttttctctactgaaatcaccattaatgatagtgccagagcagggctgcaaatgaagaaaggactgtcctacaacaggcacttcaaatagaatcctgtccaatgaatatgctattccttatattttctctgtgggcattaatctctggtatatatattcaaagcagatgctaacgacttcttttttaatccttgggcaattctaaattttcaaagaattaaaagggctgcttaaagaacataaaaaaagcaaatgagggttatttata

SEQ ID NO: 40329 - DNA, 796 bp, Homo sapiens
agtgtcgctttcagttgtaacggacttcatcacatcacaaattgtactcgttctcatccttttaagaaagttcagacccaggaaaatttccatagtaccttaatgaaaaagatagaaatcagtgggacgtgtctttcctttcatctccttttcggcttggaaatcagaatgagaaggattgtttttgctggtgttatcttattccgcctcttaggtgttatcttattccgcctcttaggtgttatcttattcggccgcttaggtgacctgggaacctgccagacaaaacctggtcagtactggaaagaagaggtccacattcaagatgttggaggtttgatttgcagagcatgcaatctttcactgcccttccatggatgtcttttagacctgggaacctgccaggcagaacctggtcagtactgtaaagaagaggtccacattcaaggtggcattcaatggtattcagtcaaaggctgcacaaagaacacatcagagtgcttcaagagtactctcgtcaagagaattctgcaactgcatgaacttgtaactactcactgctgcaatcattctttgtgcaatttctgagtcagtggcccatatctaaaatgcttggcagatcaatcagtctcgaagcctgacctggctatcacaaaatgatggctattgtcaattagcccacttcagaaacctcagacccttgtaggtagaaggaattttgatctgaaattgactttggttttcaatattcccaatatctcccccaccacctccaactcatctgagaaatagccct

SEQ ID NO: 40330 - DNA, 417 bp, Homo sapiens
aggtgttgtaacccataggctgtgagttccttgaagacagatcactcctctttgaatcttcttgtccacacaatgtctaacaagtgacactcttaacttgctcatcacagaagtgtttatcaaataattacatttgatattctacttttaaggagataagtattttgccatgttacagtaatgaatgggatggttattgaggaaaatagggggtaagtgaatgcttaccccaagtctacagttgagtctctgtggggataatctcttccctgaaatggcaaaatttgtaatgtggccgggcgcgttggctcacacctgtaatcccagcactttgggaggctgaggtgggcggatcacttgagctcaggaattcgagacccagcctaggcaacatagcaagatcccatctctacagaa

SEQ ID NO: 40331 - DNA, 263 bp, Homo sapiens
ttaagaaatggttaattgacaaagaaacattgaacttaaataggactttacagacatttacagaacactctaccaaacaactgcagaagaatgaaactagacccctacctctcaccataaacaaaaatcaaatcaaaatgaattaaagacttaaatctaagatcttaaactatgaaactagtacaaggaaatgtctggcaaactctcaaagacattggtctgggcaaaaatttattgaataataccccacaagcacaggcaac

SEQ ID NO: 40332 - DNA, 461 bp, Homo sapiens
gccttccttgtgtagaacaggctcccctcactgagctaggacaggtacacagacacagggctctgagtgtggggacgttggagtctatgtaccaagtgcttagggtcatagagccccactgcctgggtgcaaattgttccaacagtggggaccctgagcaagttccttaacccctctgagcctcaatatcttcatctgtaaattggggtgctagccctatctagtaggggttttgtggagattaagatcatttgtattggttcaaaatgggccggatgcggtggctcacgcctgtaatcccaacactttgggaggccaaggcaggcggatcacctgaggtcaggagttcgagaccagcctggccaaaatggcaaaaccgcatctctaccaaaaatacaaaaattagccaggcgtggtggtggacacctgtaatcctagctacttgggaggctgaggcagga

SEQ ID NO: 40333 - DNA, 432 bp, Homo sapiens
aaaaaaaggagctcactgaggtctcttttacaagggcactaatccattccatgaggtctccaccctcatgacctaaccacttcccaaaggcctcacctcctaataccaacattgggggttaggatttcaacatatacattttgaggaaacacacacattcagtctatagcaattaatgatagaataaaagacacagaaaagcatttgggtgataaaattcaacacccttccatgatgggagaaaaagccctactcaatatactaggaatagaaaggaacatcctcaacctgataaagggcatctattaaaaatcacagttggccgggtgcagtggttcacacctgtaatcccagcactttgggaggccgaggcgggtggatcacgaggtcaggagatcgagaccatactggctaatatggtgaaaccccgtc

SEQ ID NO: 40334 - DNA, 473 bp, Homo sapiens
ccccgaaaataggaaatgccctgtctaaccatctcacataacctcaacattcagtttcttcaggcttatgagaaagttcacttagtccttcattcattctacaatactactgagcacctgcaccatgccagataatacactaggaacgagggaagcaccaagtggggaacaaacccagtgggacaaaccagatgtactgatggcctggtggaggtcatcaaaaaaaaaaaaaaagttgaaattactcacagatcccatctgtgtctcaaacctttcacagggtgtgtttagcaatgctgtccactgagcacttttgcagatgggagactgaaggtgtaaaaggaagtgacttagacagctctgctcaccaggaaaaccaagagactggatttaaggacttctgatttataggcaaggatttttttaaattaaatgtatattcttcactcaaaatggctatttttgtaaatgct

SEQ ID NO: 40335 - DNA, 248 bp, Homo sapiens
actgtacctggatcgagatcctcctattttaagatgtgtggtggtactcttctggaagaaaatcctaaatataataatagagatttatacattagtaactcttattaagtaatttgtagcattacaaaagaattagtggttttataaaaggtttcaaattttctgtaaacattgaagtctcaatacatattaagttatttgatttggctgcgtattttccagaccatttctaaggcatactttgactc

SEQ ID NO: 40336 - DNA, 511 bp, Homo sapiens
tgctcaccaaagatttgcagaaaaaattctgatctgtcggagttacttagcctaagtgacacccatgtcctctgctactgtcctgccctgaatgaagaagggcagaccctggaaccagtaggtatcacttcctttagggctgtggaacagctacgcttagcctagctctacacatttgagcttttcagctcaagttcaacttgacaatacttgttgtaccccagaaaaggcaacaggcaacagagcctggtgatccctgaccagatagtttaaatcaccactctcagtgatcttgcctagggatctcttccttgagctccaacgtgggggcagcaggaacacgagggttcaggcctggggattctacacgcacctctagcccagcaaatggtggatatgatggggcccagaggagtgcagagccctgggagttcagggcggagagtgggaggagcgaatgttggtgaagagggagtaaacagcctgacaccagggcactggggcaggaaag

SEQ ID NO: 40337 - DNA, 273 bp, Homo sapiens
atagacgaggtctcactatgttgcccagactggtctcgaactcctgggctcaagagatccactcgctttggcctctcaaagtgttgggattacaggcatgagccactgtgcctaaaaatgtctggctacacagatcatcttttggcactctggtgcacttgttagaaacgatgctgtctcattccttttttttttttttttttttgagacggagtcttgctctattgcccagactggagtgcagtggcgtgatctcggctcactgcaacctcc

SEQ ID NO: 40338 - DNA, 3627 bp, Homo sapiens
  misc_feature (2529)..(2529): n is a, c, g, or t
  misc_feature (2684)..(2684): n is a, c, g, or t
  misc_feature (2748)..(2748): n is a, c, g, or t
  misc_feature (2982)..(2982): n is a, c, g, or t
  misc_feature (3515)..(3517): n is a, c, g, or t
cagggtctcactatgttacccaggctggtcttgaactcctgtgctcaagtgattatcttgccttggccttccaaagtcttgggatttcaggcatgagccaccatgcctgggcacaagaagcttttatggactgcaatttcaaaaaaaaatatgttcccacattagtctgtgaaacatctttcataacactaattacaccaacttgaaattctcatttccactttgatttgcttgtttctattactcattagatcaaatggaataacttacaattcttagcacaatgcccagaacaaacttgtttcaacaaatgtaatagtccttctcttttattccccatatccccaacagttcttaatatcaactttagattttatctatagaatagtttattgctagaaagattaatgagttgaaaatgtttcattttataattgaatttatgtaggaaaacagtagcaggcaaaattatactatttttgagtcttttaattcaaaagatgagtagtacaatgcaaaatgccttgatttggtgtttatatattttctttcccatattttaaaaaatgctccaattcttagatctctcaaaaccttgcattacaaaagccaaatttaacccatttgtgattgtaatataatgttcaactgttgtattatctatacaactccaaagaatggattgacctcaccccctgtgctcctgcctacaaattgccatttacttttatttgggacatttgtatatagttttatctatgtttcattatatcattagcagtttatacctttagagtctaaaatctttgactcaagagtctatggaaaaatggagaaagatttatatattagattattatcaactaactcttcatagttggctgaagccttaataacaataggttagtcagcatttgaataataattctggaaaagattaggaaaacataaattgtgtttacacgattgtgctcatgcactagctagtaccgaagagctgtagtgaaaatcttttaaatgtaaattggctcagctacctgcacatgtgtgaccagtttgaaatcagtgaaatgcagtataatgagatcatccttggaattcccgtcccccacgttgaaggctggtcacaatgctctgggtctatgggcattggatctcacagaaacattgatgaaatcatttttgcttatgatgcttcattaaaaaaatggcctctttagaaaacttagacccagtttgagtgcctgaactctgtttatccttagggtaacagttttacctctgaccattcaggtagatcaggttgtcaactgcaaatactcttttcccaaagtataaagagtacatcctcatatttatctgtactcacaagaggagaaaaatttcttaagaattatatttaaacagatattctcacctgccataaacaaacaggtttaagtatgtcatattattgcaaaaagcctttttttttaatggaaaagatagagacagtcaaaaaaaataaagctaatcaagcgggcccccattttgggtggtagcccagaacagcagaggaagcaggtttagaaacacagcaggcagagacacagataatcatcatcagaacaggcaagtgcagatttaccctgaagctaatgatgcttaaactatggagccctcctatctaactgctgagagcgcagggagtttctggaaattgtggaaggttctaggtaaatagggtaaacaacattggaagcaactctgataaataaccttgaaatatcttggatgaaattaatctctatctccaaagctctagtaattgttgattctaaatacttactttggaacctcattatgagtttgtagttatatatttttttcttagaaaacctctacctcaaattatatcagtttcaggcctcacagaatgtggacccttccttaccaaacagaaaaggctaaaggagtttcattccatttccttttagttcccattactgatattttcacttgtagcttggaggtcacggtctgtgttttgggagctaccgttagatatatggtctttcttcactaatttattggtatttctgttcaagaatcaatagtaagataaaaataatctgtaaacttacttgaaatagtggaatttaatttgactggggggatcagtcctaacaatgtcattttagaaaaacataattatcttcacattttattcatataatagatgagatgtgaaatgagcttcatggatgataaacgcactgatagctgctaagttttacactgtataaacaagaattgagctgcttctatagaaaaccataaaattttagtttagatgctagatatggagacaataaaaatactctaaatgaaagaaggttattaatcctataatgagatcagagtatcatatgcatttatgtacctgtaaatagaagaagaaatgagtttgtctccacacacaattagaggtatatgccaaacttatattttaaatattaaagtcaattatcctttgggaaaaatcacttntaaaggttatcataattataaatagttttatttttgtgacatggaaataattacattttctaagtcatgaaaaataccaaatagagaatactgaacttcaatagaagatacagaggcaaacatcagttgtgattttgcacatttaaaaaagaaanaaaaagaaatgtgtttatttgaaaatagttctaaacaagaaaagatcagaaccccacaaattcnaaagcattgtattagtcattagcttcagtggaaatataaacttgaactctgcaaagacagcaacaagagactgtagaacatatttagatgtagaatacattagaaaagtgacttggtcaggctcggtggctcacgcctgcaatcccagcactttgggaggctgaggcaagtggatcacttgaggccaggagttcgagaccagcctggccaacgtggtgaaaccccgtttctacnaaaaatacaaaaattagccgggcatggtggtgggcacctgtaattccagctacttgggaggctgaggcaggagaatcacttgaaccaggggggtcggaggttgcagtgaggcaagattgtgccactgcactccagcctgggaaacagagtgagactccgtctcaaaaaaaaaaaaaaaaaaaaaaagaaaagaaaagaaaagtgacttattttgcccatttaagaaaaatgcagattagcatttatcttccttgatctcatatgaccacatgctcctcatatgttatgaaattccaggagataaaagcaaaatgcgaatatcacttcaatgttttcattgtggtagatgggtatgcctaacgtggtgttaaagagttctcagtagtgttgtagatgatctccaagcccctgtctatcactgggataaagactacctcaataataaattttaaaatgcattaacttgaatgtatgatatactattttcatattgcctaaaggatttgacttctgctgtcaattctaattaaaannnaaaaagcgggcaagatgcagatactggttttgataagccacaagatgaaagctataatcctctcatcctcattcagctatccaattaataactggattacagtttctctg

SEQ ID NO: 40339 - DNA, 398 bp, Homo sapiens
cagaacagaggaaaagacctaggcctgggaatccaggcacctctggtcttgcctctgagctcattagctatgcaaccttcattcaaatgaacaaagaggtcctgaagctgataacgttgcagaaggtataatacaaaataaagagcctctcaagctcatttacattgtgataaatctatctccgctgtacagaagcaattacaaatcagacagagaccaaggtgctcttgttgaaggggatgagagacccaagccccacatattgtctctcccagcctaccacctcccctgtccctacctgcgcagccactcctgatgcaggttacaaacccagtgtgtaaactctaggatgaatgattgctaccattttttcaagctcaacaactatgactccatca

SEQ ID NO: 40340 - DNA, 328 bp, Homo sapiens
gcaagacccccatagaggctccttctttaagagccctgggtttctcccgcctccaacctgtccacttgtgtttcccctcaggctgctggtcattccggtcaggggagcagtgctccctcaacaggtcctccatcaggaaagagggccagccaagctggagcttggaaagcccagacacagaagctgccacacccaggcccctgggcctcctactgttcacaggctcagcagggagctcagagtgacagcgaagagctcagagagaagggtgtgcctaagctttggactagcaaagctggaggggactctagagagcaagtccaacccc

SEQ ID NO: 40341 - DNA, 315 bp, Homo sapiens
ctcttcccactccggggactcagcccaggacacctcgctgattcctgcccccttcacacctgcaagcagggatgccggcatcagaagaatgtttcgtgtacgaaattgtttggggggtttgggtttatttttgttggttttttctttttttttttgcttacgtgggcatccttcagcttttaataatctgaaaaattgtatttacccattgtcaatgtgtataaattaatctcagtcaattttatacaataaaaggtgaacttttatccatcaaacaataatttaacaaaaaatgtaccggaagaagaaaatgat

SEQ ID NO: 40342 - DNA, 908 bp, Homo sapiens
gtgagaggtgaaggggcgggcacccggcggccaggagagagagggagggcgccacgcaccggactgcgggccgagagcgcgcacgccgcggctccgcccctgctgccgcccccgtcgccgccgccgccgccgccgcagcttgggaggtgctgccaccacaggtacctgcacatgttgttctttgtcagtgctgtcaagtgtgtgccagggtgatccatggtcactttccgggatggcagcaaggtgacttcggctgaggatgaccctgactgaaaggctgcgtgagaagatatctcgggccttctacaaccatgggctcctctgtgcatcctatcccatccccatcatcctcttcacagggttctgcatcttagcctgctgctacccactgctgaaactccccttgccaggaacaggacctgtggaattcaccacccctgtgaaggattactcgcccccacctgtggactctgaccgcaaacaaggagagcctactgagcagcctgagtggtatgtgggtgccccggtggcttatgtccagcagatatttgtgaagtcctcagtgtttccctggcacaagaacctcctggcagtagatgtatttcgttcacctttgtcccgggcattccaactggtggaggagatccggaaccacgtgctgagagacagctctgggatcaggagcttggaggagttgtgtctgcaagtgaccgacctgctgccaggccttaggaagctcaggaacctactccctgagcatggatgcctgctgctgtcccctgggaacttctggcagaatgactgggaacgcttccatgctgatcctgacatcattgggaccatccaccagcacgagcctaaaacccgctgcagggctcccatggggctgagtggggagcagttttccc

SEQ ID NO: 40343 - DNA, 739 bp, Homo sapiens
ggaaggggaggatgccatcttttctcgcccgtctttcccccagggctggcaggccagctgagggatgggggtgagcagagaacagatgggctgtgggctgcttctcctggaaaaacagtagtatctgcaggatagggtacagtcttgggacgttagagctgagacaaccactgtgccactatctgcactccatggtcttaccccagatcggagtagcactgtggtgatgtgctagaggtctcaacaccgacatctcagaaaattttgtctgctgacagagcttggggagcagagagctcaccctttttcagttttagagaattaatccctctctctctctcttcattgttccggggcagttgctggctgggaacctttctgagagcccctgaatcaggcctgggctctagctgggttggtgatgcatgagcagggcgggggctcagtggggaaggactttttggggagcaggctggtggggcttagaggtttccgggttggatcaggccttcagtcccctctagagggaccggaagattcagggaaggtacttccccttccctttcagccctttctgaagaaagtgtgagggtttcttctgccccctggtggagacggggtgagctgctgctggtatgtgagctgaggaccaaccagcatctctcatctctgctgtgccctgcctgctgctgccctgccggttatgaggtggctgcagtccgggcactgctcctcttgg

SEQ ID NO: 40344 - DNA, 566 bp, Homo sapiens
cggctggacgagatgccgccgtcgcgcgcgcgcgcgcagctgggaggtgctgccaccacaggtacctgcacatgttgttctttgtcagtgctgtcaagtgtgtgccagggtgatccatggtcactttccgggatggcagcaaggtgacttcggctgaggatgaccctgactgaaaggctgcgtgagaagatatctcgggccttctacaaccatgggctcctctgtgcatcctatcccatccccatcatcctcttcacagggttctgcatcttagcctgctgctacccactgctgaaactccccttgccaggaacaggacctgtggaattcaccacccctgtgaaggattactcgcccccacctgtggactctgaccgcaaacaaggagagcctactgagcagcctgagtgggtgggtactcgtcatgttcctgaggccagcacagagcgttgggtggagactggctgaggcaggggtctgccagtgagattgaggttggtcagcttctgatttgtgaattcatgtactttaacagctttatcagtgtaccatatagatacttagtt

SEQ ID NO: 40345 - DNA, 3341 bp, Homo sapiens
gtgagaggtgaaggggcgggcacccggcggccaggagagagagggagggcgccacgcaccggactgcgggccgagagcgcgcacgccgcggctccgcccctgctgccgcccccgtcgccgccgccgccgccgccgcagcttgggaggtgctgccaccacaggtacctgcacatgttgttctttgtcagtgctgtcaagtgtgtgccagggtgatccatggtcactttccgggatggcagcaaggtgacttcggctgaggatgaccctgactgaaaggctgcgtgagaagatatctcgggccttctacaaccatgggctcctctgtgcatcctatcccatccccatcatcctcttcacagggttctgcatcttagcctgctgctacccactgctgaaactccccttgccaggaacaggacctgtggaattcaccacccctgtgaaggattactcgcccccacctgtggactctgaccgcaaacaaggagagcctactgagcagcctgagtgggcctaagcagcgagagctggtccatcatgaagaacatggccacggagctgggcatcatcctcatcggctacttcaccctagtgcccgccatccaggagttctgtctctttgctgtcgtggggctggtgtctgacttcttccttcagatgctgtttttcaccactgtcctgtccattgacattcgccggatggagctagcagacctgaacaagcgactgccccctgaggcctgcctgccctcagccaagccagtggggcagccaacgcgctacgagcggcagctggctgtgaggccgtccacaccccacaccatcacgttgcagccgtcttccttccgaaacctgcggctccccaagaggctgcgtgttgtctacttcctggcccgcacccgcctggcacagcgcctcatcatggctggcaccgttgtctggattggcatcctggtatacacagacccagcagggctgcgcaactacctcgctgcccaggtgacggaacagagcccattgggtgagggagccctggctcccatgcccgtgcctagtggcatgctgccccccagccacccggaccctgccttctccatcttcccacctgatgcccctaagctacctgagaaccagacgtcgccaggcgagtcacctgagcgtggaggtccagcagaggttgtccatgacagcccagtcccagaggtaacctgggggcctgaggatgaggaactttggaggaaattgtccttccgccactggccgacgctcttcagctattacaacatcacactggccaagaggtacatcagcctgctgcccgtcatcccagtcacgctccgcctgaacccgagggaggctctggagggccggcaccctcaggacggccgcagtgcctggcccccaccggggcccatacctgctgggcactgggaagcaggacccaagggcccaggtggggtgcaggcccatggagacgtcacgctgtacaaggtggcggcgctgggcctggccaccggcatcgtcttggtgctgctgctgctctgcctctaccgcgtgctatgcccgcgcaactacgggcagctgggtggtgggcccgggcggcggaggcgcggggagctgccctgcgacgactacggctatgcgccacccgagacggagatcgtgccgcttgtgctgcgcggccacctcatggacatcgagtgcctggccagcgacggcatgctgctggtgagctgctgcctggcaggccacatctgcgtgtgggacgcgcagaccggggattgcctaacgcgcattccgcgcccagggcagcgccgggacagtggcgtgggcagcgggcttgaggctcaggagagctgggaacgactttcagatggtgggaaggctggtccagaggagcctggggacagccctcccctgagacaccgcccccggggccctccgccgccttccctcttcggggaccagcctgacctcacctgcttaattgacaccaacttttcagcgcagcctcggtcctcacagcccactcagcccgagccccggcaccgggcggtctgtggccgctctcgggactccccaggctatgacttcagctgcctggtgcagcgggtgtaccaggaggaggggctggcggccgtctgcacaccagccctgcgcccaccctcgcctgggccggtgctgtcccaggcccctgaggacgagggtggctcccccgagaaaggctccccttccctcgcctgggcccccagtgccgagggttccatctggagcttggagctgcagggcaacctcatcgtggtggggcggagcagcggccggctggaggtgtgggacgccattgaaggggtgctgtgctgcagcagcgaggaggtctcctcaggcattaccgctctggtgttcttggacaaaaggattgtggctgcacggctcaacggttcccttgatttcttctccttggagacccacactgccctcagccccctgcagtttagagggaccccagggcggggcagttcccctgcctctccagtgtacagcagcagcgacacagtggcctgtcacctgacccacacagtgccctgtgcacaccaaaaaacccatcacagccctgaaagccgctgctgggcgcttggtgactgggagccaagaccacacactgagagtgttccgtctggaggactcgtgctgcctcttcacccttcagggccactcaggggccatcacgaccgtgtacattgaccagaccatggtgctggccagtggaggacaagatggggccatctgcctgtgggatgtactgactggcagccgggtcagccatgtgtttgctcaccgtggggatgtcacctcccttacctgtaccacctcctgtgtcatcagcagtggcctggatgacctcatcagcatctgggaccgcagcacaggcatcaagttctactccattcagcaggacctgggctgtggtgcaagcttgggtgtcatctcagacaacctgctggtgactggcggccagggctgtgtctccttttgggacctaaactacggggacctgttacagacagtctacctggggaagaacagtgaggcccagcctgcccgccagatcctggtgctggacaacgctgccattgtctgcaactttggcagtgagctcagcctggtgtatgtgccctctgtgctggagaagctggactgagcgcagggcctccttgcccaggcaggaggctggggtgctgtgtgggggccaatgcactgaacctggacttgggggaaagagccgagtatcttccagccgctgcctcctgactgtaataatattaaacttttttaaaaaacca

SEQ ID NO: 40346 - DNA, 3807 bp, Homo sapiens
tcagacttacagctactcaggaggctgactataattagtctgctgtacagcagcacatggcacaggctgtacaatgtgggtggggcttgtgtttggtggtggctttctgtctggggagtttagcgcctagtattttctcttactgcctcactccagcacactaggcccaagccccgggggctggccatttcagagacgctgccttcacggctgccagaaaagctccctctggccctgctggtagaaactggggatctggggttctagggaaaatgagaaaagggagagcctggccttggaggcctggtcacttgagcctcttcttcctcgtcaccccatgtctgtgaggaatggggctgtaggcagccgtccattcatccagacctctgtgagcctctgtgataagccaggccctgtgctggatatggagttaggaagagatggggcgaaattgtccttacccagtaagagcacagagccttagacatgcgacagtgtgatagcgtgggatcagggctcactacaggaaggggcttgaggaagaacgcagccaggtcctctacccgccgagtgcttctgccatgtggttgatgggcacactgtcatgctggcccgtgcagaccagacaagaaccacatgcggaggttggatgtggttgttgtgggtggcacttggctttccttgtggattttctcatctccacactctgcttcttccctcttttgatgattatagctctcctctgcaccctccaggctgtgaacacccgttccccgtagcagctgtgtggtggtgatggccccttaaagtctgggcattagcaggaccctgagggttggggtgctttggtggaatggctccttcaaagggctggggggccttgccatgcctctgccactccgaggcccatgaggttgtgtgagtcatgtcgcagagtggccatgtgttgccctgtgccctgttgctgccctctgcaggcctaagcagcgagagctggtccatcatgaagaacatggccacggagctgggcatcatcctcatcggctacttcaccctagtgcccgccatccaggagttctgtctctttgctgtcgtggggctggtgtctgacttcttccttcagatgctgtttttcaccactgtcctgtccattgacattcgccggatggagctagcagacctgaacaagcgactgccccctgaggcctgcctgccctcagccaagccagtggggcagccaacgcgctacgagcggcagctggctgtgaggccgtccacaccccacaccatcacgttgcagccgtcttccttccgaaacctgcggctccccaagaggctgcgtgttgtctacttcctggcccgcacccgcctggcacagcgcctcatcatggctggcaccgttgtctggattggcatcctggtatacacagacccagcagggctgcgcaactacctcgctgcccaggtgacggaacagagcccattgggtgagggagccctggctcccatgcccgtgcctagtggcatgctgccccccagccacccggaccctgccttctccatcttcccacctgatgcccctaagctacctgagaaccagacgtcgccaggcgagtcacctgagcgtggaggtccagcagaggttgtccatgacagcccagtcccagaggtaacctgggggcctgaggatgaggaactttggaggaaattgtccttccgccactggccgacgctcttcagctattacaacatcacactggccaagaggtacatcagcctgctgcccgtcatcccagtcacgctccgcctgaacccgagggaggctctggagggccggcaccctcaggacggccgcagtgcctggcccccaccggggcccatacctgctgggcactgggaagcaggacccaagggcccaggtggggtgcaggcccatggagacgtcacgctgtacaaggtggcggcgctgggcctggccaccggcatcgtcttggtgctgctgctgctctgcctctaccgcgtgctatgcccgcgcaactacgggcagctgggtggtgggcccgggcggcggaggcgcggggagctgccctgcgacgactacggctatgcgccacccgagacggagatcgtgccgcttgtgctgcgcggccacctcatggacatcgagtgcctggccagcgacggcatgctgctggtgagctgctgcctggcaggccacatctgcgtgtgggacgcgcagaccggggattgcctaacgcgcattccgcgcccagggcagcgccgggacagtggcgtgggcagcgggcttgaggctcaggagagctgggaacgactttcagatggtgggaaggctggtccagaggagcctggggacagccctcccctgagacaccgcccccggggccctccgccgccttccctcttcggggaccagcctgacctcacctgcttaattgacaccaacttttcagcgcagcctcggtcctcacagcccactcagcccgagccccggcaccgggcggtctgtggccgctctcgggactccccaggctatgacttcagctgcctggtgcagcgggtgtaccaggaggaggggctggcggccgtctgcacaccagccctgcgcccaccctcgcctgggccggtgctgtcccaggcccctgaggacgagggtggctcccccgagaaaggctccccttccctcgcctgggcccccagtgccgagggttccatctggagcttggagctgcagggcaacctcatcgtggtggggcggagcagcggccggctggaggtgtgggacgccattgaaggggtgctgtgctgcagcagcgaggaggtctcctcaggcattaccgctctggtgttcttggacaaaaggattgtggctgcacggctcaacggttcccttgatttcttctccttggagacccacactgccctcagccccctgcagtttagagggaccccagggcggggcagttcccctgcctctccagtgtacagcagcagcgacacagtggcctgtcacctgacccacacagtgccctgtgcacaccaaaaaacccatcacagccctgaaagccgctgctgggcgcttggtgactgggagccaagaccacacactgagagtgttccgtctggaggactcgtgctgcctcttcacccttcagggccactcaggggccatcacgaccgtgtacattgaccagaccatggtgctggccagtggaggacaagatggggccatctgcctgtgggatgtactgactggcagccgggtcagccatgtgtttgctcaccgtggggatgtcacctcccttacctgtaccacctcctgtgtcatcagcagtggcctggatgacctcatcagcatctgggaccgcagcacaggcatcaagttctactccattcagcaggacctgggctgtggtgcaagcttgggtgtcatctcagacaacctgctggtgactggcggccagggctgtgtctccttttgggacctaaactacggggacctgttacagacagtctacctggggaagaacagtgaggcccagcctgcccgccagatcctggtgctggacaacgctgccattgtctgcaactttggcagtgagctcagcctggtgtatgtgccctctgtgctggagaagctggactgagcgcagggcctccttgcccaggcaggaggctggggtgctgtgtgggggccaatgcactgaacctggacttgggggaaagagccgagtatcttccagccgctgcctcctgactgtaataatattaaacttttttaaaaaacca

SEQ ID NO: 40347 - DNA, 4182 bp, Homo sapiens
gtgagaggtgaaggggcgggcacccggcggccaggagagagagggagggcgccacgcaccggactgcgggccgagagcgcgcacgccgcggctccgcccctgctgccgcccccgtcgccgccgccgccgccgccgcagcttgggaggtgctgccaccacaggtacctgcacatgttgttctttgtcagtgctgtcaagtgtgtgccagggtgatccatggtcactttccgggatggcagcaaggtgacttcggctgaggatgaccctgactgaaaggctgcgtgagaagatatctcgggccttctacaaccatgggctcctctgtgcatcctatcccatccccatcatcctcttcacagggttctgcatcttagcctgctgctacccactgctgaaactccccttgccaggaacaggacctgtggaattcaccacccctgtgaaggattactcgcccccacctgtggactctgaccgcaaacaaggagagcctactgagcagcctgagtggtatgtgggtgccccggtggcttatgtccagcagatatttgtgaagtcctcagtgtttccctggcacaagaacctcctggcagtagatgtatttcgttcacctttgtcccgggcattccaactggtggaggagatccggaaccacgtgctgagagacagctctgggatcaggagcttggaggagttgtgtctgcaagtgaccgacctgctgccaggccttaggaagctcaggaacctactccctgagcatggatgcctgctgctgtcccctgggaacttctggcagaatgactgggaacgcttccatgctgatcctgacatcattgggaccatccaccagcacgagcctaaaaccctgcagacttcagccacactcaaagacttgttatttggtgttcctgggaagtacagcggggtgagcctctacaccaggaagaggatggtctcctacaccatcaccctggtcttccagcactaccatgccaagttcctgggcagcctgcgtgcccgcctgatgcttctgcaccccagccccaactgcagccttcgggcggagagcctggtccacgtgcacttcaaggaggagattggtgtcgctgagctcatcccccttgtgaccacctacatcatcttgtttgcctacatctacttctccacgcggaagatcgacatggtcaagtccaagtgggggctggccctggctgccgtggtcacagtgctcagctcgctgctcatgtctgtgggactctgcacactcttcggcctgacgcccaccctcaatggcggcgagattttcccctaccttgtggtggttattgggttagagaatgtgttggtgctcaccaagtctgtggtctcaaccccggtagacctggaggtgaagctgcggatcgcccaaggcctaagcagcgagagctggtccatcatgaagaacatggccacggagctgggcatcatcctcatcggctacttcaccctagtgcccgccatccaggagttctgtctctttgctgtcgtggggctggtgtctgacttcttccttcagatgctgtttttcaccactgtcctgtccattgacattcgccggatggagctagcagacctgaacaagcgactgccccctgaggcctgcctgccctcagccaagccagtggggcagccaacgcgctacgagcggcagctggctgtgaggccgtccacaccccacaccatcacgttgcagccgtcttccttccgaaacctgcggctccccaagaggctgcgtgttgtctacttcctggcccgcacccgcctggcacagcgcctcatcatggctggcaccgttgtctggattggcatcctggtatacacagacccagcagggctgcgcaactacctcgctgcccaggtgacggaacagagcccattgggtgagggagccctggctcccatgcccgtgcctagtggcatgctgccccccagccacccggaccctgccttctccatcttcccacctgatgcccctaagctacctgagaaccagacgtcgccaggcgagtcacctgagcgtggaggtccagcagaggttgtccatgacagcccagtcccagaggtaacctgggggcctgaggatgaggaactttggaggaaattgtccttccgccactggccgacgctcttcagctattacaacatcacactggccaagaggtacatcagcctgctgcccgtcatcccagtcacgctccgcctgaacccgagggaggctctggagggccggcaccctcaggacggccgcagtgcctggcccccaccggggcccatacctgctgggcactgggaagcaggacccaagggcccaggtggggtgcaggcccatggagacgtcacgctgtacaaggtggcggcgctgggcctggccaccggcatcgtcttggtgctgctgctgctctgcctctaccgcgtgctatgcccgcgcaactacgggcagctgggtggtgggcccgggcggcggaggcgcggggagctgccctgcgacgactacggctatgcgccacccgagacggagatcgtgccgcttgtgctgcgcggccacctcatggacatcgagtgcctggccagcgacggcatgctgctggtgagctgctgcctggcaggccacatctgcgtgtgggacgcgcagaccggggattgcctaacgcgcattccgcgcccagggcagcgccgggacagtggcgtgggcagcgggcttgaggctcaggagagctgggaacgactttcagatggtgggaaggctggtccagaggagcctggggacagccctcccctgagacaccgcccccggggccctccgccgccttccctcttcggggaccagcctgacctcacctgcttaattgacaccaacttttcagcgcagcctcggtcctcacagcccactcagcccgagccccggcaccgggcggtctgtggccgctctcgggactccccaggctatgacttcagctgcctggtgcagcgggtgtaccaggaggaggggctggcggccgtctgcacaccagccctgcgcccaccctcgcctgggccggtgctgtcccaggcccctgaggacgagggtggctcccccgagaaaggctccccttccctcgcctgggcccccagtgccgagggttccatctggagcttggagctgcagggcaacctcatcgtggtggggcggagcagcggccggctggaggtgtgggacgccattgaaggggtgctgtgctgcagcagcgaggaggtctcctcaggcattaccgctctggtgttcttggacaaaaggattgtggctgcacggctcaacggttcccttgatttcttctccttggagacccacactgccctcagccccctgcagtttagagggaccccagggcggggcagttcccctgcctctccagtgtacagcagcagcgacacagtggcctgtcacctgacccacacagtgccctgtgcacaccaaaaaacccatcacagtgttccgtctggaggactcgtgctgcctcttcacccttcagggccactcaggggccatcacgaccgtgtacattgaccagaccatggtgctggccagtggaggacaagatggggccatctgcctgtgggatgtactgactggcagccgggtcagccatgtgtttgctcaccgtggggatgtcacctcccttacctgtaccacctcctgtgtcatcagcagtggcctggatgacctcatcagcatctgggaccgcagcacaggcatcaagttctactccattcagcaggacctgggctgtggtgcaagcttgggtgtcatctcagacaacctgctggtgactggcggccagggctgtgtctccttttgggacctaaactacggggacctgttacagacagtctacctggggaagaacagtgaggcccagcctgcccgccagatcctggtgctggacaacgctgccattgtctgcaactttggcagtgagctcagcctggtgtatgtgccctctgtgctggagaagctggactgagcgcagggcctccttgcccaggcaggaggctggggtgctgtgtgggggccaatgcactgaacctggacttgggggaaagagccgagtatcttccagccgctgcctcctgactgtaataatattaaacttttttaaaaaacca

SEQ ID NO: 40348 - DNA, 3922 bp, Homo sapiens
gtgagaggtgaaggggcgggcacccggcggccaggagagagagggagggcgccacgcaccggactgcgggccgagagcgcgcacgccgcggctccgcccctgctgccgcccccgtcgccgccgccgccgccgccgcagcttgggaggtgctgccaccacaggtacctgcacatgttgttctttgtcagtgctgtcaagtgtgtgccagggtgatccatggtcactttccgggatggcagcaaggtgacttcggctgaggatgaccctgactgaaaggctgcgtgagaagatatctcgggccttctacaaccatgggctcctctgtgcatcctatcccatccccatcatcctcttcacagggttctgcatcttagcctgctgctacccactgctgaaactccccttgccaggaacaggacctgtggaattcaccacccctgtgaaggattactcgcccccacctgtggactctgaccgcaaacaaggagagcctactgagcagcctgagtggtatgtgggtgccccggtggcttatgtccagcagatatttgtgaagtcctcagtgtttccctggcacaagaacctcctggcagtagatgtatttcgttcacctttgtcccgggcattccaactggtggaggagatccggaaccacgtgctgagagacagctctgggatcaggagcttggaggagttgtgtctgcaagtgaccgacctgctgccaggccttaggaagctcaggaacctactccctgagcatggatgcctgctgctgtcccctgggaacttctggcagaatgactgggaacgcttccatgctgatcctgacatcattgggaccatccaccagcacgagcctaaaaccctgcagacttcagccacactcaaagacttgttatttggtgttcctgggaagtacagcggggtgagcctctacaccaggaagaggatggtctcctacaccatcaccctggtcttccagcactaccatgccaagttcctgggcagcctgcgtgcccgcctgatgcttctgcaccccagccccaactgcagccttcgggcggagagcctggtccacgtgcacttcaaggaggagattggtgtcgctgagctcatcccccttgtgaccacctacatcatcttgtttgcctacatctacttctccacgcggaagatcgacatggtcaagtccaagtgggggctggccctggctgccgtggtcacagtgctcagctcgctgctcatgtctgtgggactctgcacactcttcggcctgacgcccaccctcaatggcggcgagattttcccctaccttgtggtggttattgggttagagaatgtgttggtgctcaccaagtctgtggtctcaaccccggtagacctggaggtgaagctgcggatcgcccaaggcctaagcagcgagagctggtccatcatgaagaacatggccacggagctgggcatcatcctcatcggctacttcaccctagtgcccgccatccaggagttctgtctctttgctgtcgtggggctggtgtctgacttcttccttcagatgctgtttttcaccactgtcctgtccattgacattcgccggatggagctagcagacctgaacaagcgactgccccctgaggcctgcctgccctcagccaagccagtggggcagccaacgcgctacgagcggcagctggctgtgaggccgtccacaccccacaccatcacgttgcagccgtcttccttccgaaacctgcggctccccaagaggctgcgtgttgtctacttcctggcccgcacccgcctggcacagcgcctcatcatggctggcaccgttgtctggattggcatcctggtatacacagacccagcagggctgcgcaactacctcgctgcccaggtgacggaacagagcccattgggtgagggagccctggctcccatgcccgtgcctagtggcatgctgccccccagccacccggaccctgccttctccatcttcccacctgatgcccctaagctacctgagaaccagacgtcgccaggcgagtcacctgagcgtggaggtccagcagaggttgtccatgacagcccagtcccagaggtaacctgggggcctgaggatgaggaactttggaggaaattgtccttccgccactggccgacgctcttcagctattacaacatcacactggccaagaggtacatcagcctgctgcccgtcatcccagtcacgctccgcctgaacccgagggaggctctggagggccggcaccctcaggacggccgcagtgcctggcccccaccggggcccatacctgctgggcactgggaagcaggacccaagggcccaggtggggtgcaggcccatggagacgtcacgctgtacaaggtggcggcgctgggcctggccaccggcatcgtcttggtgctgctgctgctctgcctctaccgcgtgctatgcccgcgcaactacgggcagctgggtggtgggcccgggcggcggaggcgcggggagctgccctgcgacgactacggctatgcgccacccgagacggagatcgtgccgcttgtgctgcgcggccacctcatggacatcgagtgcctggccagcgacggcatgctgctggtgagctgctgcctggcaggccacatctgcgtgtgggacgcgcagaccggggattgcctaacgcgcattccgcgcccagggcagcgccgggacagtggcgtgggcagcgggcttgaggctcaggagagctgggaacgactttcagatggtgggaaggctggtccagaggagcctggggacagccctcccctgagacaccgcccccagtgccgagggttccatctggagcttggagctgcagggcaacctcatcgtggtggggcggagcagcggccggctggaggtgtgggacgccattgaaggggtgctgtgctgcagcagcgaggaggtctcctcaggcattaccgctctggtgttcttggacaaaaggattgtggctgcacggctcaacggttcccttgatttcttctccttggagacccacactgccctcagccccctgcagtttagagggaccccagggcggggcagttcccctgcctctccagtgtacagcagcagcgacacagtggcctgtcacctgacccacacagtgccctgtgcacaccaaaaaacccatcacagccctgaaagccgctgctgggcgcttggtgactgggagccaagaccacacactgagagtgttccgtctggaggactcgtgctgcctcttcacccttcagggccactcaggggccatcacgaccgtgtacattgaccagaccatggtgctggccagtggaggacaagatggggccatctgcctgtgggatgtactgactggcagccgggtcagccatgtgtttgctcaccgtggggatgtcacctcccttacctgtaccacctcctgtgtcatcagcagtggcctggatgacctcatcagcatctgggaccgcagcacaggcatcaagttctactccattcagcaggacctgggctgtggtgcaagcttgggtgtcatctcagacaacctgctggtgactggcggccagggctgtgtctccttttgggacctaaactacggggacctgttacagacagtctacctggggaagaacagtgaggcccagcctgcccgccagatcctggtgctggacaacgctgccattgtctgcaactttggcagtgagctcagcctggtgtatgtgccctctgtgctggagaagctggactgagcgcagggcctccttgcccaggcaggaggctggggtgctgtgtgggggccaatgcactgaacctggacttgggggaaagagccgagtatcttccagccgctgcctcctgactgtaataatattaaacttttttaaaaaacca

SEQ ID NO: 40349 - DNA, 1490 bp, Homo sapiens
tgcaggagaggctgcgtgtaaatcggacgaggggctggtccagaggagcctggggacagccctcccctgagacaccgcccccggggccctccgccgccttccctcttcggggaccagcctgacctcacctgcttaattgacaccaacttttcagcgcagcctcggtcctcacagcccactcagcccgagccccggcaccgggcggtctgtggccgctctcgggactccccaggctatgacttcagctgcctggtgcagcgggtgtaccaggaggaggggctggcggccgtctgcacaccagccctgcgcccaccctcgcctgggccggtgctgtcccaggcccctgaggacgagggtggctcccccgagaaaggctccccttccctcgcctgggcccccagtgccgagggttccatctggagcttggagctgcagggcaacctcatcgtggtggggcggagcagcggccggctggaggtgtgggacgccattgaaggggtgctgtgctgcagcagcgaggaggtctcctcaggcattaccgctctggtgttcttggacaaaaggattgtggctgcacggctcaacggttcccttgatttcttctccttggagacccacactgccctcagccccctgcagtttagagggaccccagggcggggcagttcccctgcctctccagtgtacagcagcagcgacacagtggcctgtcacctgacccacacagtgccctgtgcacaccaaaaaacccatcacagccctgaaagccgctgctgggcgcttggtgactgggagccaagaccacacactgagagtgttccgtctggaggactcgtgctgcctcttcacccttcagggccactcaggggccatcacgaccgtgtacattgaccagaccatggtgctggccagtggaggacaagatggggccatctgcctgtgggatgtactgactggcagccgggtcagccatgtgtttgctcaccgtggggatgtcacctcccttacctgtaccacctcctgtgtcatcagcagtggcctggatgacctcatcagcatctgggaccgcagcacaggcatcaagttctactccattcagcaggacctgggctgtggtgcaagcttgggtgtcatctcagacaacctgctggtgactggcggccagggctgtgtctccttttgggacctaaactacggggacctgttacagacagtctacctggggaagaacagtgaggcccagcctgcccgccagatcctggtgctggacaacgctgccattgtctgcaactttggcagtgagctcagcctggtgtatgtgccctctgtgctggagaagctggactgagcgcagggcctccttgcccaggcaggaggctggggtgctgtgtgggggccaatgcactgaacctggacttgggggaaagagccgagtatcttccagccgctgcctcctgactgtaataatattaaacttttttaaaaaacca

SEQ ID NO: 40350 - DNA, 4131 bp, Homo sapiens
gtgagaggtgaaggggcgggcacccggcggccaggagagagagggagggcgccacgcaccggactgcgggccgagagcgcgcacgccgcggctccgcccctgctgccgcccccgtcgccgccgccgccgccgccgcagcttgggaggtgctgccaccacaggtacctgcacatgttgttctttgtcagtgctgtcaagtgtgtgccagggtgatccatggtcactttccgggatggcagcaaggtgacttcggctgaggatgaccctgactgaaaggctgcgtgagaagatatctcgggccttctacaaccatgggctcctctgtgcatcctatcccatccccatcatcctcttcacagggttctgcatcttagcctgctgctacccactgctgaaactccccttgccaggaacaggacctgtggaattcaccacccctgtgaaggattactcgcccccacctgtggactctgaccgcaaacaaggagagcctactgagcagcctgagtggtatgtgggtgccccggtggcttatgtccagcagatatttgtgaagtcctcagtgtttccctggcacaagaacctcctggcagtagatgtatttcgttcacctttgtcccgggcattccaactggtggaggagatccggaaccacgtgctgagagacagctctgggatcaggagcttggaggagttgtgtctgcaagtgaccgacctgctgccaggccttaggaagctcaggaacctactccctgagcatggatgcctgctgctgtcccctgggaacttctggcagaatgactgggaacgcttccatgctgatcctgacatcattgggaccatccaccagcacgagcctaaaaccctgcagacttcagccacactcaaagacttgttatttggtgttcctgggaagtacagcggggtgagcctctacaccaggaagaggatggtctcctacaccatcaccctggtcttccagcactaccatgccaagttcctgggcagcctgcgtgcccgcctgatgcttctgcaccccagccccaactgcagccttcgggcggagagcctggtccacgtgcacttcaaggaggagattggtgtcgctgagctcatcccccttgtgaccacctacatcatcttgtttgcctacatctacttctccacgcggaagatcgacatggtcaagtccaagtgggggctggccctggctgccgtggtcacagtgctcagctcgctgctcatgtctgtgggactctgcacactcttcggcctgacgcccaccctcaatggcggcgagattttcccctaccttgtggtggttattgggttagagaatgtgttggtgctcaccaagtctgtggtctcaaccccggtagacctggaggtgaagctgcggatcgcccaaggcctaagcagcgagagctggtccatcatgaagaacatggccacggagctgggcatcatcctcatcggctacttcaccctagtgcccgccatccaggagttctgtctctttgctgtcgtggggctggtgtctgacttcttccttcagatgctgtttttcaccactgtcctgtccattgacattcgccggatggagctagcagacctgaacaagcgactgccccctgaggcctgcctgccctcagccaagccagtggggcagccaacgcgctacgagcggcagctggctgtgaggccgtccacaccccacaccatcacgttgcagccgtcttccttccgaaacctgcggctccccaagaggctgcgtgttgtctacttcctggcccgcacccgcctggcacagcgcctcatcatggctggcaccgttgtctggattggcatcctggtatacacagacccagcagggctgcgcaactacctcgctgcccaggtgacggaacagagcccattgggtgagggagccctggctcccatgcccgtgcctagtggcatgctgccccccagccacccggaccctgccttctccatcttcccacctgatgcccctaagctacctgagaaccagacgtcgccaggcgagtcacctgagcgtggaggtccagcagaggttgtccatgacagcccagtcccagaggtaacctgggggcctgaggatgaggaactttggaggaaattgtccttccgccactggccgacgctcttcagctattacaacatcacactggccaagaggtacatcagcctgctgcccgtcatcccagtcacgctccgcctgaacccgagggaggctctggagggccggcaccctcaggacggccgcagtgcctggcccccaccggggcccatacctgctgggcactgggaagcaggacccaagggcccaggtggggtgcaggcccatggagacgtcacgctgtacaaggtggcggcgctgggcctggccaccggcatcgtcttggtgctgctgctgctctgcctctaccgcgtgctatgcccgcgcaactacgggcagctgggtggtgggcccgggcggcggaggcgcggggagctgccctgcgacgactacggctatgcgccacccgagacggagatcgtgccgcttgtgctgcgcggccacctcatggacatcgagtgcctggccagcgacggcatgctgctggtgagctgctgcctggcaggccacatctgcgtgtgggacgcgcagaccggggattgcctaacgcgcattccgcgcccagggcagcgccgggacagtggcgtgggcagcgggcttgaggctcaggagagctgggaacgactttcagatggtgggaaggctggtccagaggagcctggggacagccctcccctgagacaccgcccccggggccctccgccgccttccctcttcggggaccagcctgacctcacctgcttaattgacaccaacttttcagcgcagcctcggtcctcacagcccactcagcccgagccccggcaccgggcggtctgtggccgctctcgggactccccaggctatgacttcagctgcctggtgcagcgggtgtaccaggaggaggggctggcggccgtctgcacaccagccctgcgcccaccctcgcctgggccggtgctgtcccaggcccctgaggacgagggtggctcccccgagaaaggctccccttccctcgcctgggcccccagtgccgagggttccatctggagcttggagctgcagggcaacctcatcgtggtggggcggagcagcggccggctggaggtgtgggacgccattgaaggggtgctgtgctgcagcagcgaggaggtctcctcaggcattaccgctctggtgttcttggacaaaaggattgtggctgcacggctcaacggttcccttgatttcttctccttggagacccacactgccctcagccccctgcagtttagagggaccccagggcggggcagttcccctgcctctccagtgtacagcagcagcgacacagtggcctgtcacctgacccacacagtgccctgtgcacaccaaaaaacccatcacagccctgaaagccgctgctgggcgcttggtgactgggagccaagaccacacactgagagtgttccgtctggaggactcgtgctgcctcttcacccttcagggccactcaggggccatcacgaccgtgtacattgaccagaccatggtgctggccagtggaggacaagatggggccatctgcctgtgggatgtactgactggcagccgggtcagccatgtgtttgctcaccgtggggatgtcacctcccttacctgtaccacctcctgtgtcatcagcagtggcctggatgacctcatcagcatctgggaccgcagcacaggcatcaagttctactccattcagcagacagtctacctggggaagaacagtgaggcccagcctgcccgccagatcctggtgctggacaacgctgccattgtctgcaactttggcagtgagctcagcctggtgtatgtgccctctgtgctggagaagctggactgagcgcagggcctccttgcccaggcaggaggctggggtgctgtgtgggggccaatgcactgaacctggacttgggggaaagagccgagtatcttccagccgctgcctcctgactgtaataatattaaacttttttaaaaaacca

SEQ ID NO: 40351 - DNA, 2450 bp, Homo sapiens
gtgcttggaatagggcatggcacatggtgacctcccagggccttaagcagtgacagtggggagtgatatactcctatcctttctcgcccttctcaatgaagccagtttctctgattagcttgtcaatattgagcctttggggtatcttggttgcatttttagttacagagtgcgcttgcagaaccctctcttctccttggccgctggcagctgttctctgctctccctgcctctgtcgtgcttggcctcctcagcaagcctgttggctgtgggcgtccccagtactccgtctgcatgcacactccttggggagtctcagccacctgggttctggccccacctccaagctggtgaacctgggtctccacccagtggccaggtgccttctgccggacgcctttgcctgcctgtcccacactggctcctcctccaaggctccttgactgttggtggcagcaccatctgacctagagctggagtctttttccttggggagggggcgtcccttgcccttagtgatgttgatttctgccagtgggctgctgccgtcattcctgtcaccacaggttctgcatgggctttggctgacatcctcccctccagcctggccaatttcaccaggcccctccatgcttcttggaaattctcctttgctgcttgttttagctttaaggaaagccccgatgtctcaacctgaccatcagggttcctggtgactgtggtctctccttgtccacccacttccaatcataaaactggcttccccagctctggtgcaggcccttcaaattcatgggcagaggttgtaggcagacatgcattgcctttccctgcagtaagattttgaaccccatctgctttgaggctttggggttactgggccaatatacccatccctgcctgtcagactgtacctaggaattttggagagcaaagaaaatccttgtttctttatggaaaaaggaattgatgtgagctgtgcttgggttgaagctgcttttatgtggagaatgcaggcttccgcaacacccaacatagcccaccctgcatcctgtttcccctcagcagccctcccttcagctccaggctacatggagccctctgcttgtttttaatttacaaacttacgtgatattcaccaggtaccaccttacacgttagctcacttgattctcatgaccaccctgtgaggtgggtactcttatccccattttacggatgaagaaactgaggcacaaggtggttaatatttggagttgccctctggctccagcatctgttctggcaccatgtgctttcctcttggccatgtccctcctgtgccttcttgaactggcccttaactctcatgtccacatgctcagccccagggctggggctctaagggagaggcccctggcagctgttcttctcttccaggattgtggctgcacggctcaacggttcccttgatttcttctccttggagacccacactgccctcagccccctgcagtttagaggtcggagggcctggggtgggcaggtgttcacacttggtgggacgggcaggggccgtctacccattgctttctcagagattcttcacttggccttttgtcctcagggaccccagggcggggcagttcccctgcctctccagtgtacagcagcagcgacacagtggcctgtcacctgacccacacagtgccctgtgcacaccaaaaaacccatcacagccctgaaagccgctgctgggcgcttggtgactgggagccaagaccacacactgagagtgttccgtctggaggactcgtgctgcctcttcacccttcagggccactcaggggccatcacgaccgtgtacattgaccagaccatggtgctggccagtggaggacaagatggggccatctgcctgtgggatgtactgactggcagccgggtcagccatgtgtttgctcaccgtggggatgtcacctcccttacctgtaccacctcctgtgtcatcagcagtggcctggatgacctcatcagcatctgggaccgcagcacaggcatcaagttctactccattcagcaggacctgggctgtggtgcaagcttgggtgtcatctcagacaacctgctggtgactggcggccagggctgtgtctccttttgggacctaaactacggggacctgttacagacagtctacctggggaagaacagtgaggcccagcctgcccgccagatcctggtgctggacaacgctgccattgtctgcaactttggcagtgagctcagcctggtgtatgtgccctctgtgctggagaagctggactgagcgcagggcctccttgcccaggcaggaggctggggtgctgtgtgggggccaatgcactgaacctggacttgggggaaagagccgagtatcttccagccgctgcctcctgactgtaataatattaaacttttttaaaaaacca

SEQ ID NO: 40352 - DNA, 887 bp, Homo sapiens
gcggccgcctactactactactaaattcgcggccgcgtctatgtgggtgccccggtggcttatgtccagcagatatttgtgaagtcctcagtgtttccctggcacaagaacctcctggcagtagatgtatttcgttcacctttgtcccgggcattccaactggtggaggagatccggaaccacgtgctgagagacagctctgggatcaggagcttggaggagttgtgtctgcaagtgaccgacctgctgccagggccactcaggggccatcacgaccgtgtacattgaccagaccatggtgctggccagtggaggacaagatggggccatctgcctgtgggatgtactgactggcagccgggtcagccatgtgtttgctcaccgtggggatgtcacctcccttacctgtaccacctcctgtgtcatcagcagtggcctggatgacctcatcagcatctgggaccgcagcacaggcatcaagttctactccattcagcaggacctgggctgtggtgcaagcttgggtgtcatctcagacaacctgctggtgactggcggccagggctgtgtctccttttgggacctaaactacggggacctgttacagacagtctacctggggaagaacagtgaggcccagcctgcccgccagatcctggtgctggacaacgctgccattgtctgcaactttggcagtgagctcagcctggtgtatgtgccctctgtgctggagaagctggactgagcgcagggcctccttgcccaggcaggaggctggggtgctgtgtgggggccaatgcactgaacctggacttgggggaaagagccgagtatcttccagccgctgcctcctgactgtaataatattaaacttttttaaaaaacca

SEQ ID NO: 40353 - DNA, 1205 bp, Homo sapiens
tcagacttacagctactcaggaggctgactataattagtctgctgtacagcagcacatggcacaggctgtacaatgtgggtggggcttgtgtttggtggtggctttctgtctggggagtttagcgcctagtattttctcttactgcctcactccagcacactaggcccaagccccgggggctggccatttcagagacgctgccttcacggctgccagaaaagctccctctggccctgctggtagaaactggggatctggggttctagggaaaatgagaaaagggagagcctggccttggaggcctggtcacttgagcctcttcttcctcgtcaccccatgtctgtgaggaatggggctgtaggcagccgtccattcatccagacctctgtgagcctctgtgataagccaggccctgtgctggatatggagttaggaagagatggggcgaaattgtccttacccagtaagagcacagagccttagacatgcgacagtgtgatagcgtgggatcagggctcactacaggaaggggcttgaggaagaacgcagccaggtcctctacccgccgagtgcttctgccatgtggttgatgggcacactgtcatgctggcccgtgcagaccagacaagaaccacatgcggaggttggatgtggttgttgtgggtggcacttggctttccttgtggattttctcatctccacactctgcttcttccctcttttgatgattatagctctcctctgcaccctccaggctgtgaacacccgttccccgtagcagctgtgtggtggtgatggccccttaaagtctgggcattagcaggaccctgagggttggggtgctttggtggaatggctccttcaaagggctggggggccttgccatgcctctgccactccgaggcccatgaggttgtgtgagtcatgtcgcagagtggccatgtgttgccctgtgccctgttgctgccctctgcaggcctaagcagcgagagctggtccatcatgaagaacatggccacggagctgggcatcatcctcatcggctacttcaccctagtgcccgccatccagaggtaaggccccaaggcctgccacctggatgagcatggaagcaactgctgtgctccccagctgtgcagccatgggcagggtgctcccctcttcagcacaggcatccttgcttctgaggtgggacctctttgcc

SEQ ID NO: 40354 - DNA, 353 bp, Homo sapiens
ccctggtggagacggggtgagctgctgctggtatgtgagctgaggaccaaccagcatctctcatctctgctgtgccctgcctgctgctgccctgccggttatgaggtggctgcagtccgggcactgctcctcttgggctgggacagtgaggtcacggcacccccccatccccatgtgctctgattccaggagttctgtctctttgctgtcgtggggctggtgtctgacttcttccttcagatgctgtttttcaccactgtcctgtccattgacattcgccggatggaggtaggagtgggctgagccctgccctgcccgcctcctcagccctggctgtactgagggagtcctgg

SEQ ID NO: 40355 - DNA, 4239 bp, Homo sapiens
gtgagaggtgaaggggcgggcacccggcggccaggagagagagggagggcgccacgcaccggactgcgggccgagagcgcgcacgccgcggctccgcccctgctgccgcccccgtcgccgccgccgccgccgccgcagcttgggaggtgctgccaccacaggtacctgcacatgttgttctttgtcagtgctgtcaagtgtgtgccagggtgatccatggtcactttccgggatggcagcaaggtgacttcggctgaggatgaccctgactgaaaggctgcgtgagaagatatctcgggccttctacaaccatgggctcctctgtgcatcctatcccatccccatcatcctcttcacagggttctgcatcttagcctgctgctacccactgctgaaactccccttgccaggaacaggacctgtggaattcaccacccctgtgaaggattactcgcccccacctgtggactctgaccgcaaacaaggagagcctactgagcagcctgagtggtatgtgggtgccccggtggcttatgtccagcagatatttgtgaagtcctcagtgtttccctggcacaagaacctcctggcagtagatgtatttcgttcacctttgtcccgggcattccaactggtggaggagatccggaaccacgtgctgagagacagctctgggatcaggagcttggaggagttgtgtctgcaagtgaccgacctgctgccaggccttaggaagctcaggaacctactccctgagcatggatgcctgctgctgtcccctgggaacttctggcagaatgactgggaacgcttccatgctgatcctgacatcattgggaccatccaccagcacgagcctaaaaccctgcagacttcagccacactcaaagacttgttatttggtgttcctgggaagtacagcggggtgagcctctacaccaggaagaggatggtctcctacaccatcaccctggtcttccagcactaccatgccaagttcctgggcagcctgcgtgcccgcctgatgcttctgcaccccagccccaactgcagccttcgggcggagagcctggtccacgtgcacttcaaggaggagattggtgtcgctgagctcatcccccttgtgaccacctacatcatcttgtttgcctacatctacttctccacgcggaagatcgacatggtcaagtccaagtgggggctggccctggctgccgtggtcacagtgctcagctcgctgctcatgtctgtgggactctgcacactcttcggcctgacgcccaccctcaatggcggcgagattttcccctaccttgtggtggttattgggttagagaatgtgttggtgctcaccaagtctgtggtctcaaccccggtagacctggaggtgaagctgcggatcgcccaaggcctaagcagcgagagctggtccatcatgaagaacatggccacggagctgggcatcatcctcatcggctacttcaccctagtgcccgccatccaggagttctgtctctttgctgtcgtggggctggtgtctgacttcttccttcagatgctgtttttcaccactgtcctgtccattgacattcgccggatggagctagcagacctgaacaagcgactgccccctgaggcctgcctgccctcagccaagccagtggggcagccaacgcgctacgagcggcagctggctgtgaggccgtccacaccccacaccatcacgttgcagccgtcttccttccgaaacctgcggctccccaagaggctgcgtgttgtctacttcctggcccgcacccgcctggcacagcgcctcatcatggctggcaccgttgtctggattggcatcctggtatacacagacccagcagggctgcgcaactacctcgctgcccaggtgacggaacagagcccattgggtgagggagccctggctcccatgcccgtgcctagtggcatgctgccccccagccacccggaccctgccttctccatcttcccacctgatgcccctaagctacctgagaaccagacgtcgccaggcgagtcacctgagcgtggaggtccagcagaggttgtccatgacagcccagtcccagaggtaacctgggggcctgaggatgaggaactttggaggaaattgtccttccgccactggccgacgctcttcagctattacaacatcacactggccaagaggtacatcagcctgctgcccgtcatcccagtcacgctccgcctgaacccgagggaggctctggagggccggcaccctcaggacggccgcagtgcctggcccccaccggggcccatacctgctgggcactgggaagcaggacccaagggcccaggtggggtgcaggcccatggagacgtcacgctgtacaaggtggcggcgctgggcctggccaccggcatcgtcttggtgctgctgctgctctgcctctaccgcgtgctatgcccgcgcaactacgggcagctgggtggtgggcccgggcggcggaggcgcggggagctgccctgcgacgactacggctatgcgccacccgagacggagatcgtgccgcttgtgctgcgcggccacctcatggacatcgagtgcctggccagcgacggcatgctgctggtgagctgctgcctggcaggccacatctgcgtgtgggacgcgcagaccggggattgcctaacgcgcattccgcgcccagggcagcgccgggacagtggcgtgggcagcgggcttgaggctcaggagagctgggaacgactttcagatggtgggaaggctggtccagaggagcctggggacagccctcccctgagacaccgcccccggggccctccgccgccttccctcttcggggaccagcctgacctcacctgcttaattgacaccaacttttcagcgcagcctcggtcctcacagcccactcagcccgagccccggcaccgggcggtctgtggccgctctcgggactccccaggctatgacttcagctgcctggtgcagcgggtgtaccaggaggaggggctggcggccgtctgcacaccagccctgcgcccaccctcgcctgggccggtgctgtcccaggcccctgaggacgagggtggctcccccgagaaaggctccccttccctcgcctgggcccccagtgccgagggttccatctggagcttggagctgcagggcaacctcatcgtggtggggcggagcagcggccggctggaggtgtgggacgccattgaaggggtgctgtgctgcagcagcgaggaggtctcctcaggcattaccgctctggtgttcttggacaaaaggattgtggctgcacggctcaacggttcccttgatttcttctccttggagacccacactgccctcagccccctgcagtttagagggaccccagggcggggcagttcccctgcctctccagtgtacagcagcagcgacacagtggcctgtcacctgacccacacagtgccctgtgcacaccaaaaaacccatcacagccctgaaagccgctgctgggcgcttggtgactgggagccaagaccacacactgagagtgttccgtctggaggactcgtgctgcctcttcacccttcagggccactcaggggccatcacgaccgtgtacattgaccagaccatggtgctggccagtggaggacaagatggggccatctgcctgtgggatgtactgactggcagccgggtcagccatgtgtttgctcaccgtggggatgtcacctcccttacctgtaccacctcctgtgtcatcagcagtggcctggatgacctcatcagcatctgggaccgcagcacaggcatcaagttctactccattcagcaggacctgggctgtggtgcaagcttgggtgtcatctcagacaacctgctggtgactggcggccagggctgtgtctccttttgggacctaaactacggggacctgttacagacagtctacctggggaagaacagtgaggcccagcctgcccgccagatcctggtgctggacaacgctgccattgtctgcaactttggcagtgagctcagcctggtgtatgtgccctctgtgctggagaagctggactgagcgcagggcctccttgcccaggcaggaggctggggtgctgtgtgggggccaatgcactgaacctggacttgggggaaagagccgagtatcttccagccgctgcctcctgactgtaataatattaaacttttttaaaaaacca

SEQ ID NO: 40356 - DNA, 3754 bp, Homo sapiens
gtgagaggtgaaggggcgggcacccggcggccaggagagagagggagggcgccacgcaccggactgcgggccgagagcgcgcacgccgcggctccgcccctgctgccgcccccgtcgccgccgccgccgccgccgcagcttgggaggtgctgccaccacaggtacctgcacatgttgttctttgtcagtgctgtcaagtgtgtgccagggtgatccatggtcactttccgggatggcagcaaggtgacttcggctgaggatgaccctgactgaaaggctgcgtgagaagatatctcgggccttctacaaccatgggctcctctgtgcatcctatcccatccccatcatcctcttcacagggttctgcatcttagcctgctgctacccactgctgaaactccccttgccaggaacaggacctgtggaattcaccacccctgtgaaggattactcgcccccacctgtggactctgaccgcaaacaaggagagcctactgagcagcctgagtgggttcctgggcagcctgcgtgcccgcctgatgcttctgcaccccagccccaactgcagccttcgggcggagagcctggtccacgtgcacttcaaggaggagattggtgtcgctgagctcatcccccttgtgaccacctacatcatcttgtttgcctacatctacttctccacgcggaagatcgacatggtcaagtccaagtgggggctggccctggctgccgtggtcacagtgctcagctcgctgctcatgtctgtgggactctgcacactcttcggcctgacgcccaccctcaatggcggcgagattttcccctaccttgtggtggttattgggttagagaatgtgttggtgctcaccaagtctgtggtctcaaccccggtagacctggaggtgaagctgcggatcgcccaaggcctaagcagcgagagctggtccatcatgaagaacatggccacggagctgggcatcatcctcatcggctacttcaccctagtgcccgccatccaggagttctgtctctttgctgtcgtggggctggtgtctgacttcttccttcagatgctgtttttcaccactgtcctgtccattgacattcgccggatggagctagcagacctgaacaagcgactgccccctgaggcctgcctgccctcagccaagccagtggggcagccaacgcgctacgagcggcagctggctgtgaggccgtccacaccccacaccatcacgttgcagccgtcttccttccgaaacctgcggctccccaagaggctgcgtgttgtctacttcctggcccgcacccgcctggcacagcgcctcatcatggctggcaccgttgtctggattggcatcctggtatacacagacccagcagggctgcgcaactacctcgctgcccaggtgacggaacagagcccattgggtgagggagccctggctcccatgcccgtgcctagtggcatgctgccccccagccacccggaccctgccttctccatcttcccacctgatgcccctaagctacctgagaaccagacgtcgccaggcgagtcacctgagcgtggaggtccagcagaggttgtccatgacagcccagtcccagaggtaacctgggggcctgaggatgaggaactttggaggaaattgtccttccgccactggccgacgctcttcagctattacaacatcacactggccaagaggtacatcagcctgctgcccgtcatcccagtcacgctccgcctgaacccgagggaggctctggagggccggcaccctcaggacggccgcagtgcctggcccccaccggggcccatacctgctgggcactgggaagcaggacccaagggcccaggtggggtgcaggcccatggagacgtcacgctgtacaaggtggcggcgctgggcctggccaccggcatcgtcttggtgctgctgctgctctgcctctaccgcgtgctatgcccgcgcaactacgggcagctgggtggtgggcccgggcggcggaggcgcggggagctgccctgcgacgactacggctatgcgccacccgagacggagatcgtgccgcttgtgctgcgcggccacctcatggacatcgagtgcctggccagcgacggcatgctgctggtgagctgctgcctggcaggccacatctgcgtgtgggacgcgcagaccggggattgcctaacgcgcattccgcgcccagggcagcgccgggacagtggcgtgggcagcgggcttgaggctcaggagagctgggaacgactttcagatggtgggaaggctggtccagaggagcctggggacagccctcccctgagacaccgcccccggggccctccgccgccttccctcttcggggaccagcctgacctcacctgcttaattgacaccaacttttcagcgcagcctcggtcctcacagcccactcagcccgagccccggcaccgggcggtctgtggccgctctcgggactccccaggctatgacttcagctgcctggtgcagcgggtgtaccaggaggaggggctggcggccgtctgcacaccagccctgcgcccaccctcgcctgggccggtgctgtcccaggcccctgaggacgagggtggctcccccgagaaaggctccccttccctcgcctgggcccccagtgccgagggttccatctggagcttggagctgcagggcaacctcatcgtggtggggcggagcagcggccggctggaggtgtgggacgccattgaaggggtgctgtgctgcagcagcgaggaggtctcctcaggcattaccgctctggtgttcttggacaaaaggattgtggctgcacggctcaacggttcccttgatttcttctccttggagacccacactgccctcagccccctgcagtttagagggaccccagggcggggcagttcccctgcctctccagtgtacagcagcagcgacacagtggcctgtcacctgacccacacagtgccctgtgcacaccaaaaaacccatcacagccctgaaagccgctgctgggcgcttggtgactgggagccaagaccacacactgagagtgttccgtctggaggactcgtgctgcctcttcacccttcagggccactcaggggccatcacgaccgtgtacattgaccagaccatggtgctggccagtggaggacaagatggggccatctgcctgtgggatgtactgactggcagccgggtcagccatgtgtttgctcaccgtggggatgtcacctcccttacctgtaccacctcctgtgtcatcagcagtggcctggatgacctcatcagcatctgggaccgcagcacaggcatcaagttctactccattcagcaggacctgggctgtggtgcaagcttgggtgtcatctcagacaacctgctggtgactggcggccagggctgtgtctccttttgggacctaaactacggggacctgttacagacagtctacctggggaagaacagtgaggcccagcctgcccgccagatcctggtgctggacaacgctgccattgtctgcaactttggcagtgagctcagcctggtgtatgtgccctctgtgctggagaagctggactgagcgcagggcctccttgcccaggcaggaggctggggtgctgtgtgggggccaatgcactgaacctggacttgggggaaagagccgagtatcttccagccgctgcctcctgactgtaataatattaaacttttttaaaaaacca

SEQ ID NO: 40357 - DNA, 3127 bp, Homo sapiens
gtgtgtgtgtgtgtgtgtgtgtgtgtattttgggattgaggtcactagaccttgcatataggcattctgaaaccattccccagccacataactatcgcctccctccagcagccctagtgtgcagagccaagtactctttgttaactggcttttctcccttcttaccaggtacctgcacatgttgttctttgtcagtgctgtcaagtgtgtgccagggtgatccatggtcactttccgggatggcagcaaggtgacttcggctgaggatgaccctgactgaaaggctgcgtgagaagatatctcgggccttctacaaccatgggctcctctgtgcatcctatcccatccccatcatcctcatcggctacttcaccctagtgcccgccatccaggagttctgtctctttgctgtcgtggggctggtgtctgacttcttccttcagatgctgtttttcaccactgtcctgtccattgacattcgccggatggagctagcagacctgaacaagcgactgccccctgaggcctgcctgccctcagccaagccagtggggcagccaacgcgctacgagcggcagctggctgtgaggccgtccacaccccacaccatcacgttgcagccgtcttccttccgaaacctgcggctccccaagaggctgcgtgttgtctacttcctggcccgcacccgcctggcacagcgcctcatcatggctggcaccgttgtctggattggcatcctggtatacacagacccagcagggctgcgcaactacctcgctgcccaggtgacggaacagagcccattgggtgagggagccctggctcccatgcccgtgcctagtggcatgctgccccccagccacccggaccctgccttctccatcttcccacctgatgcccctaagctacctgagaaccagacgtcgccaggcgagtcacctgagcgtggaggtccagcagaggttgtccatgacagcccagtcccagaggtaacctgggggcctgaggatgaggaactttggaggaaattgtccttccgccactggccgacgctcttcagctattacaacatcacactggccaagaggtacatcagcctgctgcccgtcatcccagtcacgctccgcctgaacccgagggaggctctggagggccggcaccctcaggacggccgcagtgcctggcccccaccggggcccatacctgctgggcactgggaagcaggacccaagggcccaggtggggtgcaggcccatggagacgtcacgctgtacaaggtggcggcgctgggcctggccaccggcatcgtcttggtgctgctgctgctctgcctctaccgcgtgctatgcccgcgcaactacgggcagctgggtggtgggcccgggcggcggaggcgcggggagctgccctgcgacgactacggctatgcgccacccgagacggagatcgtgccgcttgtgctgcgcggccacctcatggacatcgagtgcctggccagcgacggcatgctgctggtgagctgctgcctggcaggccacatctgcgtgtgggacgcgcagaccggggattgcctaacgcgcattccgcgcccagggcagcgccgggacagtggcgtgggcagcgggcttgaggctcaggagagctgggaacgactttcagatggtgggaaggctggtccagaggagcctggggacagccctcccctgagacaccgcccccggggccctccgccgccttccctcttcggggaccagcctgacctcacctgcttaattgacaccaacttttcagcgcagcctcggtcctcacagcccactcagcccgagccccggcaccgggcggtctgtggccgctctcgggactccccaggctatgacttcagctgcctggtgcagcgggtgtaccaggaggaggggctggcggccgtctgcacaccagccctgcgcccaccctcgcctgggccggtgctgtcccaggcccctgaggacgagggtggctcccccgagaaaggctccccttccctcgcctgggcccccagtgccgagggttccatctggagcttggagctgcagggcaacctcatcgtggtggggcggagcagcggccggctggaggtgtgggacgccattgaaggggtgctgtgctgcagcagcgaggaggtctcctcaggcattaccgctctggtgttcttggacaaaaggattgtggctgcacggctcaacggttcccttgatttcttctccttggagacccacactgccctcagccccctgcagtttagagggaccccagggcggggcagttcccctgcctctccagtgtacagcagcagcgacacagtggcctgtcacctgacccacacagtgccctgtgcacaccaaaaaacccatcacagccctgaaagccgctgctgggcgcttggtgactgggagccaagaccacacactgagagtgttccgtctggaggactcgtgctgcctcttcacccttcagggccactcaggggccatcacgaccgtgtacattgaccagaccatggtgctggccagtggaggacaagatggggccatctgcctgtgggatgtactgactggcagccgggtcagccatgtgtttgctcaccgtggggatgtcacctcccttacctgtaccacctcctgtgtcatcagcagtggcctggatgacctcatcagcatctgggaccgcagcacaggcatcaagttctactccattcagcaggacctgggctgtggtgcaagcttgggtgtcatctcagacaacctgctggtgactggcggccagggctgtgtctccttttgggacctaaactacggggacctgttacagacagtctacctggggaagaacagtgaggcccagcctgcccgccagatcctggtgctggacaacgctgccattgtctgcaactttggcagtgagctcagcctggtgtatgtgccctctgtgctggagaagctggactgagcgcagggcctccttgcccaggcaggaggctggggtgctgtgtgggggccaatgcactgaacctggacttgggggaaagagccgagtatcttccagccgctgcctcctgactgtaataatattaaacttttttaaaaaacca

SEQ ID NO: 40358 - DNA, 4100 bp, Homo sapiens
gtgagaggtgaaggggcgggcacccggcggccaggagagagagggagggcgccacgcaccggactgcgggccgagagcgcgcacgccgcggctccgcccctgctgccgcccccgtcgccgccgccgccgccgccgcagcttgggaggtgctgccaccacaggtacctgcacatgttgttctttgtcagtgctgtcaagtgtgtgccagggtgatccatggtcactttccgggatggcagcaaggtgacttcggctgaggatgaccctgactgaaaggctgcgtgagaagatatctcgggccttctacaaccatgggctcctctgtgcatcctatcccatccccatcatcctcttcacagggttctgcatcttagcctgctgctacccactgctgaaactccccttgccaggaacaggacctgtggaattcaccacccctgtgaaggattactcgcccccacctgtggactctgaccgcaaacaaggagagcctactgagcagcctgagtggtatgtgggtgccccggtggcttatgtccagcagatatttgtgaagtcctcagtgtttccctggcacaagaacctcctggcagtagatgtatttcgttcacctttgtcccgggcattccaactggtggaggagatccggaaccacgtgctgagagacagctctgggatcaggagcttggaggagttgtgtctgcaagtgaccgacctgctgccaggccttaggaagctcaggaacctactccctgagcatggatgcctgctgctgtcccctgggaacttctggcagaatgactgggaacgcttccatgctgatcctgacatcattgggaccatccaccagcacgagcctaaaaccctgcagacttcagccacactcaaagacttgttatttggtgttcctgggaagtacagcggggtgagcctctacaccaggaagaggatggtctcctacaccatcaccctggtcttccagcactaccatgccaagttcctgggcagcctgcgtgcccgcctgatgcttctgcaccccagccccaactgcagccttcgggcggagagcctggtccacgtgcacttcaaggaggagattggtgtcgctgagctcatcccccttgtgaccacctacatcatcttgtttgcctacatctacttctccacgcggaagatcgacatggtcaagtccaagtgggggctggccctggctgccgtggtcacagtgctcagctcgctgctcatgtctgtgggactctgcacactcttcggcctgacgcccaccctcaatggcggcgagattttcccctaccttgtggtggttattgggttagagaatgtgttggtgctcaccaagtctgtggtctcaaccccggtagacctggaggtgaagctgcggatcgcccaaggcctaagcagcgagagctggtccatcatgaagaacatggccacggagctgggcatcatcctcatcggctacttcaccctagtgcccgccatccaggagttctgtctctttgctgtcgtggggctggtgtctgacttcttccttcagatgctgtttttcaccactgtcctgtccattgacattcgccggatggagctagcagacctgaacaagcgactgccccctgaggcctgcctgccctcagccaagccagtggggcagccaacgcgctacgagcggcagctggctgtgaggccgtccacaccccacaccatcacgttgcagccgtcttccttccgaaacctgcggctccccaagaggctgcgtgttgtctacttcctggcccgcacccgcctggcacagcgcctcatcatggctggcaccgttgtctggattggcatcctggtatacacagacccagcagggctgcgcaactacctcgctgcccaggtgacggaacagagcccattgggtgagggagccctggctcccatgcccgtgcctagtggcatgctgccccccagccacccggaccctgccttctccatcttcccacctgatgcccctaagctacctgagaaccagacgtcgccaggcgagtcacctgagcgtggaggtccagcagaggttgtccatgacagcccagtcccagaggtaacctgggggcctgaggatgaggaactttggaggaaattgtccttccgccactggccgacgctcttcagctattacaacatcacactggccaagaggtacatcagcctgctgcccgtcatcccagtcacgctccgcctgaacccgagggaggctctggagggccggcaccctcaggacggccgcagtgcctggcccccaccggggcccatacctgctgggcactgggaagcaggacccaagggcccaggtggggtgcaggcccatggagacgtcacgctgtacaagactacggctatgcgccacccgagacggagatcgtgccgcttgtgctgcgcggccacctcatggacatcgagtgcctggccagcgacggcatgctgctggtgagctgctgcctggcaggccacatctgcgtgtgggacgcgcagaccggggattgcctaacgcgcattccgcgcccagggcagcgccgggacagtggcgtgggcagcgggcttgaggctcaggagagctgggaacgactttcagatggtgggaaggctggtccagaggagcctggggacagccctcccctgagacaccgcccccggggccctccgccgccttccctcttcggggaccagcctgacctcacctgcttaattgacaccaacttttcagcgcagcctcggtcctcacagcccactcagcccgagccccggcaccgggcggtctgtggccgctctcgggactccccaggctatgacttcagctgcctggtgcagcgggtgtaccaggaggaggggctggcggccgtctgcacaccagccctgcgcccaccctcgcctgggccggtgctgtcccaggcccctgaggacgagggtggctcccccgagaaaggctccccttccctcgcctgggcccccagtgccgagggttccatctggagcttggagctgcagggcaacctcatcgtggtggggcggagcagcggccggctggaggtgtgggacgccattgaaggggtgctgtgctgcagcagcgaggaggtctcctcaggcattaccgctctggtgttcttggacaaaaggattgtggctgcacggctcaacggttcccttgatttcttctccttggagacccacactgccctcagccccctgcagtttagagggaccccagggcggggcagttcccctgcctctccagtgtacagcagcagcgacacagtggcctgtcacctgacccacacagtgccctgtgcacaccaaaaaacccatcacagccctgaaagccgctgctgggcgcttggtgactgggagccaagaccacacactgagagtgttccgtctggaggactcgtgctgcctcttcacccttcagggccactcaggggccatcacgaccgtgtacattgaccagaccatggtgctggccagtggaggacaagatggggccatctgcctgtgggatgtactgactggcagccgggtcagccatgtgtttgctcaccgtggggatgtcacctcccttacctgtaccacctcctgtgtcatcagcagtggcctggatgacctcatcagcatctgggaccgcagcacaggcatcaagttctactccattcagcaggacctgggctgtggtgcaagcttgggtgtcatctcagacaacctgctggtgactggcggccagggctgtgtctccttttgggacctaaactacggggacctgttacagacagtctacctggggaagaacagtgaggcccagcctgcccgccagatcctggtgctggacaacgctgccattgtctgcaactttggcagtgagctcagcctggtgtatgtgccctctgtgctggagaagctggactgagcgcagggcctccttgcccaggcaggaggctggggtgctgtgtgggggccaatgcactgaacctggacttgggggaaagagccgagtatcttccagccgctgcctcctgactgtaataatattaaacttttttaaaaaacca

SEQ ID NO: 40359 - DNA, 3483 bp, Homo sapiens
gtgagaggtgaaggggcgggcacccggcggccaggagagagagggagggcgccacgcaccggactgcgggccgagagcgcgcacgccgcggctccgcccctgctgccgcccccgtcgccgccgccgccgccgccgcagcttgggaggtgctgccaccacaggtacctgcacatgttgttctttgtcagtgctgtcaagtgtgtgccagggtgatccatggtcactttccgggatggcagcaaggtgacttcggctgaggatgaccctgactgaaaggctgcgtgagaagatatctcgggccttctacaaccatgggctcctctgtgcatcctatcccatccccatcatcctcttcacagggttctgcatcttagcctgctgctacccactgctgaaactccccttgccaggaacaggacctgtggaattcaccacccctgtgaaggattactcgcccccacctgtggactctgaccgcaaacaaggagagcctactgagcagcctgagtggcgagattttcccctaccttgtggtggttattgggttagagaatgtgttggtgctcaccaagtctgtggtctcaaccccggtagacctggaggtgaagctgcggatcgcccaaggcctaagcagcgagagctggtccatcatgaagaacatggccacggagctgggcatcatcctcatcggctacttcaccctagtgcccgccatccaggagttctgtctctttgctgtcgtggggctggtgtctgacttcttccttcagatgctgtttttcaccactgtcctgtccattgacattcgccggatggagctagcagacctgaacaagcgactgccccctgaggcctgcctgccctcagccaagccagtggggcagccaacgcgctacgagcggcagctggctgtgaggccgtccacaccccacaccatcacgttgcagccgtcttccttccgaaacctgcggctccccaagaggctgcgtgttgtctacttcctggcccgcacccgcctggcacagcgcctcatcatggctggcaccgttgtctggattggcatcctggtatacacagacccagcagggctgcgcaactacctcgctgcccaggtgacggaacagagcccattgggtgagggagccctggctcccatgcccgtgcctagtggcatgctgccccccagccacccggaccctgccttctccatcttcccacctgatgcccctaagctacctgagaaccagacgtcgccaggcgagtcacctgagcgtggaggtccagcagaggttgtccatgacagcccagtcccagaggtaacctgggggcctgaggatgaggaactttggaggaaattgtccttccgccactggccgacgctcttcagctattacaacatcacactggccaagaggtacatcagcctgctgcccgtcatcccagtcacgctccgcctgaacccgagggaggctctggagggccggcaccctcaggacggccgcagtgcctggcccccaccggggcccatacctgctgggcactgggaagcaggacccaagggcccaggtggggtgcaggcccatggagacgtcacgctgtacaaggtggcggcgctgggcctggccaccggcatcgtcttggtgctgctgctgctctgcctctaccgcgtgctatgcccgcgcaactacgggcagctgggtggtgggcccgggcggcggaggcgcggggagctgccctgcgacgactacggctatgcgccacccgagacggagatcgtgccgcttgtgctgcgcggccacctcatggacatcgagtgcctggccagcgacggcatgctgctggtgagctgctgcctggcaggccacatctgcgtgtgggacgcgcagaccggggattgcctaacgcgcattccgcgcccagggcagcgccgggacagtggcgtgggcagcgggcttgaggctcaggagagctgggaacgactttcagatggtgggaaggctggtccagaggagcctggggacagccctcccctgagacaccgcccccggggccctccgccgccttccctcttcggggaccagcctgacctcacctgcttaattgacaccaacttttcagcgcagcctcggtcctcacagcccactcagcccgagccccggcaccgggcggtctgtggccgctctcgggactccccaggctatgacttcagctgcctggtgcagcgggtgtaccaggaggaggggctggcggccgtctgcacaccagccctgcgcccaccctcgcctgggccggtgctgtcccaggcccctgaggacgagggtggctcccccgagaaaggctccccttccctcgcctgggcccccagtgccgagggttccatctggagcttggagctgcagggcaacctcatcgtggtggggcggagcagcggccggctggaggtgtgggacgccattgaaggggtgctgtgctgcagcagcgaggaggtctcctcaggcattaccgctctggtgttcttggacaaaaggattgtggctgcacggctcaacggttcccttgatttcttctccttggagacccacactgccctcagccccctgcagtttagagggaccccagggcggggcagttcccctgcctctccagtgtacagcagcagcgacacagtggcctgtcacctgacccacacagtgccctgtgcacaccaaaaaacccatcacagccctgaaagccgctgctgggcgcttggtgactgggagccaagaccacacactgagagtgttccgtctggaggactcgtgctgcctcttcacccttcagggccactcaggggccatcacgaccgtgtacattgaccagaccatggtgctggccagtggaggacaagatggggccatctgcctgtgggatgtactgactggcagccgggtcagccatgtgtttgctcaccgtggggatgtcacctcccttacctgtaccacctcctgtgtcatcagcagtggcctggatgacctcatcagcatctgggaccgcagcacaggcatcaagttctactccattcagcaggacctgggctgtggtgcaagcttgggtgtcatctcagacaacctgctggtgactggcggccagggctgtgtctccttttgggacctaaactacggggacctgttacagacagtctacctggggaagaacagtgaggcccagcctgcccgccagatcctggtgctggacaacgctgccattgtctgcaactttggcagtgagctcagcctggtgtatgtgccctctgtgctggagaagctggactgagcgcagggcctccttgcccaggcaggaggctggggtgctgtgtgggggccaatgcactgaacctggacttgggggaaagagccgagtatcttccagccgctgcctcctgactgtaataatattaaacttttttaaaaaaccacatatcatcatctgtcaggcactttggga

SEQ ID NO: 40360 - DNA, 4380 bp, Homo sapiens
gtgagaggtgaaggggcgggcacccggcggccaggagagagagggagggcgccacgcaccggactgcgggccgagagcgcgcacgccgcggctccgcccctgctgccgcccccgtcgccgccgccgccgccgccgcagcttgggaggtgctgccaccacaggtacctgcacatgttgttctttgtcagtgctgtcaagtgtgtgccagggtgatccatggtcactttccgggatggcagcaaggtgacttcggctgaggatgaccctgactgaaaggctgcgtgagaagatatctcgggccttctacaaccatgggctcctctgtgcatcctatcccatccccatcatcctcttcacagggttctgcatcttagcctgctgctacccactgctgaaactccccttgccaggaacaggacctgtggaattcaccacccctgtgaaggattactcgcccccacctgtggactctgaccgcaaacaaggagagcctactgagcagcctgagtggtatgtgggtgccccggtggcttatgtccagcagatatttgtgaagtcctcagtgtttccctggcacaagaacctcctggcagtagatgtatttcgttcacctttgtcccgggcattccaactggtggaggagatccggaaccacgtgctgagagacagctctgggatcaggagcttggaggagttgtgtctgcaagtgaccgacctgctgccaggccttaggaagctcaggaacctactccctgagcatggatgcctgctgctgtcccctgggaacttctggcagaatgactgggaacgcttccatgctgatcctgacatcattgggaccatccaccagcacgagcctaaaaccctgcagacttcagccacactcaaagacttgttatttggtgttcctgggaagtacagcggggtgagcctctacaccaggaagaggatggtctcctacaccatcaccctggtcttccagcactaccatgccaagttcctgggcagcctgcgtgcccgcctgatgcttctgcaccccagccccaactgcagccttcgggcggagagcctggtccacgtgcacttcaaggaggagattggtgtcgctgagctcatcccccttgtgaccacctacatcatcttgtttgcctacatctacttctccacgcggaagatcgacatggtcaagtccaagtgggggctggccctggctgccgtggtcacagtgctcagctcgctgctcatgtctgtgggactctgcacactcttcggcctgacgcccaccctcaatggcggcgagattttcccctaccttgtggtggttattgggttagagaatgtgttggtgctcaccaagtctgtggtctcaaccccggtagacctggaggtgaagctgcggatcgcccaaggcctaagcagcgagagctggtccatcatgaagaacatggccacggagctgggcatcatcctcatcggctacttcaccctagtgcccgccatccaggagttctgtctctttgctgtcgtggggctggtgtctgacttcttccttcagatgctgtttttcaccactgtcctgtccattgacattcgccggatggagctagcagacctgaacaagcgactgccccctgaggcctgcctgccctcagccaagccagtggggcagccaacgcgctacgagcggcagctggctgtgaggccgtccacaccccacaccatcacgttgcagccgtcttccttccgaaacctgcggctccccaagaggctgcgtgttgtctacttcctggcccgcacccgcctggcacagcgcctcatcatggctggcaccgttgtctggattggcatcctggtatacacagacccagcagggctgcgcaactacctcgctgcccaggtgacggaacagagcccattgggtgagggagccctggctcccatgcccgtgcctagtggcatgctgccccccagccacccggaccctgccttctccatcttcccacctgatgcccctaagctacctgagaaccagacgtcgccaggcgagtcacctgagcgtggaggtccagcagaggttgtccatgacagcccagtcccagaggtaacctgggggcctgaggatgaggaactttggaggaaattgtccttccgccactggccgacgctcttcagctattacaacatcacactggccaagaggtacatcagcctgctgcccgtcatcccagtcacgctccgcctgaacccgagggaggctctggagggccggcaccctcaggacggccgcagtgcctggcccccaccggggcccatacctgctgggcactgggaagcaggacccaagggcccaggtggggtgcaggcccatggagacgtcacgctgtacaaggtggcggcgctgggcctggccaccggcatcgtcttggtgctgctgctgctctgcctctaccgcgtgctatgcccgcgcaactacgggcagctgggtggtgggcccgggcggcggaggcgcggggagctgccctgcgacgactacggctatgcgccacccgagacggagatcgtgccgcttgtgctgcgcggccacctcatggacatcgagtgcctggccagcgacggcatgctgctggtgagctgctgcctggcaggccacatctgcgtgtgggacgcgcagaccggggattgcctaacgcgcattccgcgcccagggcagcgccgggacagtggcgtgggcagcgggcttgaggctcaggagagctgggaacgactttcagatggtgggaaggctggtccagaggagcctggggacagccctcccctgagacaccgcccccggggccctccgccgccttccctcttcggggaccagcctgacctcacctgcttaattgacaccaacttttcagcgcagcctcggtcctcacagcccactcagcccgagccccggcaccgggcggtctgtggccgctctcgggactccccaggctatgacttcagctgcctggtgcagcgggtgtaccaggaggaggggctggcggccgtctgcacaccagccctgcgcccaccctcgcctgggccggtgctgtcccaggcccctgaggacgagggtggctcccccgagaaaggctccccttccctcgcctgggcccccagtgccgagggttccatctggagcttggagctgcagggcaacctcatcgtggtggggcggagcagcggccggctggaggtgtgggacgccattgaaggggtgctgtgctgcagcagcgaggaggtctcctcaggcattaccgctctggtgttcttggacaaaaggattgtggctgcacggctcaacggttcccttgatttcttctccttggagacccacactgccctcagccccctgcagtttagagggaccccagggcggggcagttcccctgcctctccagtgtacagcagcagcgacacagtggcctgtcacctgacccacacagtgccctgtgcacaccaaaaaacccatcacagccctgaaagccgctgctgggcgcttggtgactgggagccaagaccacacactgagagtgttccgtctggaggactcgtgctgcctcttcacccttcagggccactcaggggccatcacgaccgtgtacattgaccagaccatggtgctggccagtggaggacaagatggggccatctgcctgtgggatgtactgactggcagccgggtcagccatgtgtttgctcaccgtggggatgtcacctcccttacctgtaccacctcctgtgtcatcagcagtggcctggatgacctcatcagcatctgggaccgcagcacaggcatcaagttctactccattcagcaggacctgggctgtggtgcaagcttgggtgtcatctcagacaacctgctggtgactggcggccagggctgtgtctccttttgggacctaaactacggggacctgttacagacagtctacctggggaagaacagtgaggcccagcctgcccgccagatcctggtgctggacaacgctgccattgtctgcaactttggcagtgagctcagcctggtgtatgtgccctctgtgctggagaagctggactgagcgcagggcctccttgcccaggcaggaggctggggtgctgtgtgggggccaatgcactgaacctggacttgggggaaagagccgagtatcttccagccgctgcctcctgactgtaataatattaaacttttttaaaaaaccacccgacgaacattacaagcaacaaaaaaacgaacttttggcggacctcgaccctggagaacttttaaaacacattgttgggggcggcccccgaggacattagcaaggcgcacgtggcccacaggagaccttgcaagacaag

SEQ ID NO: 40361 - DNA, 2115 bp, Homo sapiens
gtgagaggtgaaggggcgggcacccggcggccaggagagagagggagggcgccacgcaccggactgcgggccgagagcgcgcacgccgcggctccgcccctgctgccgcccccgtcgccgccgccgccgccgccgcagcttgggaggtgctgccaccacaggtacctgcacatgttgttctttgtcagtgctgtcaagtgtgtgccagggtgatccatggtcactttccgggatggcagcaaggtgacttcggctgaggatgaccctgactgaaaggctgcgtgagaagatatctcgggccttctacaaccatgggctcctctgtgcatcctatcccatccccatcatcctcttcacagggttctgcatcttagcctgctgctacccactgctgaaactccccttgccaggaacaggacctgtggaattcaccacccctgtgaaggattactcgcccccacctgtggactctgaccgcaaacaaggagagcctactgagcagcctgagtggcgagattttcccctaccttgtggtggttattgggttagagaatgtgttggtgctcaccaagtctgtggtctcaaccccggtagacctggaggtgaagctgcggatcgcccaaggcctaagcagcgagagctggtccatcatgaagaacatggccacggagctgggcatcatcctcatcggctacttcaccctagtgcccgccatccagcgccttccctcttcggggaccagcctgacctcacctgcttaattgacaccaacttttcagcgcagcctcggtcctcacagcccactcagcccgagccccggcaccgggcggtctgtggccgctctcgggactccccaggctatgacttcagctgcctggtgcagcgggtgtaccaggaggaggggctggcggccgtctgcacaccagccctgcgcccaccctcgcctgggccggtgctgtcccaggcccctgaggacgagggtggctcccccgagaaaggctccccttccctcgcctgggcccccagtgccgagggttccatctggagcttggagctgcagggcaacctcatcgtggtggggcggagcagcggccggctggaggtgtgggacgccattgaaggggtgctgtgctgcagcagcgaggaggtctcctcaggcattaccgctctggtgttcttggacaaaaggattgtggctgcacggctcaacggttcccttgatttcttctccttggagacccacactgccctcagccccctgcagtttagagggaccccagggcggggcagttcccctgcctctccagtgtacagcagcagcgacacagtggcctgtcacctgacccacacagtgccctgtgcacaccaaaaaacccatcacagccctgaaagccgctgctgggcgcttggtgactgggagccaagaccacacactgagagtgttccgtctggaggactcgtgctgcctcttcacccttcagggccactcaggggccatcacgaccgtgtacattgaccagaccatggtgctggccagtggaggacaagatggggccatctgcctgtgggatgtactgactggcagccgggtcagccatgtgtttgctcaccgtggggatgtcacctcccttacctgtaccacctcctgtgtcatcagcagtggcctggatgacctcatcagcatctgggaccgcagcacaggcatcaagttctactccattcagcaggacctgggctgtggtgcaagcttgggtgtcatctcagacaacctgctggtgactggcggccagggctgtgtctccttttgggacctaaactacggggacctgttacagacagtctacctggggaagaacagtgaggcccagcctgcccgccagatcctggtgctggacaacgctgccattgtctgcaactttggcagtgagctcagcctggtgtatgtgccctctgtgctggagaagctggactgagcgcagggcctccttgcccaggcaggaggctggggtgctgtgtgggggccaatgcactgaacctggacttgggggaaagagccgagtatcttccagccgctgcctcctgactgtaataatattaaacttttttaaaaaacca

SEQ ID NO: 40362 - DNA, 3743 bp, Homo sapiens
gtgagaggtgaaggggcgggcacccggcggccaggagagagagggagggcgccacgcaccggactgcgggccgagagcgcgcacgccgcggctccgcccctgctgccgcccccgtcgccgccgccgccgccgccgcagcttgggaggtgctgccaccacaggtacctgcacatgttgttctttgtcagtgctgtcaagtgtgtgccagggtgatccatggtcactttccgggatggcagcaaggtgacttcggctgaggatgaccctgactgaaaggctgcgtgagaagatatctcgggccttctacaaccatgggctcctctgtgcatcctatcccatccccatcatcctcttcacagggttctgcatcttagcctgctgctacccactgctgaaactccccttgccaggaacaggacctgtggaattcaccacccctgtgaaggattactcgcccccacctgtggactctgaccgcaaacaaggagagcctactgagcagcctgagtggtatgtgggtgccccggtggcttatgtccagcagatatttgtgaagtcctcagtgtttccctggcacaagaacctcctggcagtagatgtatttcgttcacctttgtcccgggcattccaactggtggaggagatccggaaccacgtgctgagagacagctctgggatcaggagcttggaggagttgtgtctgcaagtgaccgacctgctgccaggccttaggaagctcaggaacctactccctgagcatggatgcctgctgctgtcccctgggaacttctggcagaatgactgggaacgcttccatgctgatcctgacatcattgggaccatccaccagcacgagcctaaaaccctgcagacttcagccacactcaaagacttgttatttggtgttcctgggaagtacagcggggtgagcctctacaccaggaagaggatggtctcctacaccatcaccctggtcttccagcactaccatgccaagttcctgggcagcctgcgtgcccgcctgatgcttctgcaccccagccccaactgcagccttcgggcggagagcctggtccacgtgcacttcaaggaggagattggtgtcgctgagctcatcccccttgtgaccacctacatcatcttgtttgcctacatctacttctccacgcggaagatcgacatggtcaagtccaagtgggggctggccctggctgccgtggtcacagtgctcagctcgctgctcatgtctgtgggactctgcacactcttcggcctgacgcccaccctcaatggcggcgagattttcccctaccttgtggtggttattgggttagagaatgtgttggtgctcaccaagtctgtggtctcaaccccggtagacctggaggtgaagctgcggatcgcccaaggcctaagcagcgagagctggtccatcatgaagaacatggccacggagctgggcatcatcctcatcggctacttcaccctagtgcccgccatccaggagttctgtctctttgctgtcgtggggctggtgtctgacttcttccttcagatgctgtttttcaccactgtcctgtccattgacattcgccggatggagctagcagacctgaacaagcgactgccccctgaggcctgcctgccctcagccaagccagtggggcagccaacgcgctacgagcggcagctggctgtgaggccgtccacaccccacaccatcacgttgcagccgtcttccttccgaaacctgcggctccccaagaggctgcgtgttgtctacttcctggcccgcacccgcctggcacagcgcctcatcatggctggcaccgttgtctggattggcatcctggtatacacagacccagcagggctgcgcaactacctcgctgcccaggtgacggaacagagcccattgggtgagggagccctggctcccatgcccgtgcctagtggcatgctgccccccagccacccggaccctgccttctccatcttcccacctgatgcccctaagctacctgagaaccagacgtcgccaggcgagtcacctgagcgtggaggtccagcagaggttgtccatgacagcccagtcccagaggtaacctgggggcctgaggatgaggaactttggaggaaattgtccttccgccactggccgacgctcttcagctattacaacatcacactggccaagaggtacatcagcctgctgcccgtcatcccagtcacgctccgcctgaacccgagggaggctctggagggccggcaccctcaggacggccgcagtgcctggcccccaccggggcccatacctgctgggcactgggaagcaggacccaagggcccaggtggggtgcaggcccatggagacgtcacgctgtacaaggtggcggcgctgggcctggccaccggcatcgtcttggtgctgctgctgctctgcctctaccgcgtgctatgcccgcgcaactacgggcagctgggtggtgggcccgggcggcggaggcgcggggagctgccctgcgacgactacggctatgcgccacccgagacggagatcgtgccgcttgtgctgcgcggccacctcatggacatcgagtgcctggccagcgacggcatgctgctggtgagctgctgcctggcaggccacatctgcgtgtgggacgcgcagaccggggattgcctaacgcgcattccgcgcccagggcagcgccgggacagtggcgtgggcagcgggcttgaggctcaggagagctgggaacgactttcagatggtgggaaggctggtccagaggagcctggggacagccctcccctgagacaccgcccccggggccctccgccgccttccctcttcggggaccagcctgacctcacctgcttaattgacaccaacttttcagcgcagcctcggtcctcacagcccactcagcccgagccccggcaccgggcggtctgtggccgctctcgggactccccaggctatgacttcagctgcctggtgcagcgggtgtaccaggaggaggggctggcggccgtctgcacaccagccctgcgcccaccctcgcctgggccggtgctgtcccaggcccctgaggacgagggtggctcccccgagaaaggctccccttccctcgcctgggcccccagtgccgagggttccatctggagcttggagctgcagggcaacctcatcgtggtggggcggagcagcggccggctggaggtgtgggacgccattgaaggggtgctgtgctgcagcagcgaggaggtctcctcaggcattaccgctctggtgttcttggacaaaaggattgtggctgcacggctcaacggttcccttgatttcttctccttggagacccacactgccctcagccccctgcagtttagagggaccccagggcggggcagttcccctgcctctccagtgtacagcagcagcgacacagtggcctgtcacctgacccacacagtgccctgtgcacaccaaaaaacccatcacagtgttccgtctggaggactcgtgctgcctcttcacccttcagggccactcaggggccatcacgaccgtgtacattgaccagaccatggtgctggccagtggaggacaagatggggccatctgcctgtgggatgtactgactggcagccgggtcagccatgtgtttgagcacacaggtggggatgagcacacaggtggggatgagcacacaggtggggatgagcacacaggtggggat

SEQ ID NO: 40363 - DNA, 587 bp, Homo sapiens
gtgagaggtgaaggggcgggcacccggcggccaggagagagagggagggcgccacgcaccggactgcgggccgagagcgcgcacgccgcggctccgcccctgctgccgcccccgtcgccgccgccgccgccgccgcagcttgggaggtgctgccaccacaggtacctgcacatgttgttctttgtcagtgctgtcaagtgtgtgccagggtgatccatggtcactttccgggatggcagcaaggtgacttcggctgaggatgaccctgactgaaaggctgcgtgagaagatatctcgggccttctacaaccatgggctcctctgtgcatcctatcccatccccatcatcctcttcacagggttctgcatcttagcctgctgctacccactgctgaaactccccttgccaggaacaggacctgtggaattcaccacccctgtgaaggattactcgcccccacctgtggactctgaccgcaaacaaggagagcctactgagcagcctgagtggtatgtgggtgccccggtggcttatgtccagcagatatttgtgaagtcctcaccaagacctgcagaagcaggaggta

SEQ ID NO: 40364 - DNA, 172 bp, Homo sapiens
tagactacttttcacttccagagcatgttttatgtccatctgagatatatagaaatgggagagaggtgtagggcaagtgaaatagttaccattttacagatgactgactgcagaacaagcgttagcaccagcgtcttccacatttgaccagagtgaccacggttgcactaca

SEQ ID NO: 40365 - DNA, 393 bp, Homo sapiens
atcttactgctcctctatctctctctcctccctcccataggaatgtcagctctatgagcgcgggcttcctgcctgtgtgttcagtgtcggatcctaaacaaggcctgacccctccacaggcacacacataatttttaaatgactgaataaatctaaaaatcatcactttattttcctctttgtataaaatctttgtgagggatggaaactccctccagcctcacaacgggagacatttaatgctgtaaaggctatacgatcgttagcaacgaatcattcctttacataacattcacacagcttcctacaatagacgtatttatgttgttgtctaacatacatgttttaattttcaagcgtttggttctggatccacacgttctctccaggagg

SEQ ID NO: 40366 - DNA, 337 bp, Homo sapiens
tactatacttcacttctacaaacctagatgaaacatgaaaacgaagccacacagtataaattgcaacttcaggaaaagctcctgctttattattccacataatttttcccatgtaaaatcaacgtccaatagttcctggtatgtgggaagataatatttgttaaagtcacaatgaagccttattgatggaagcttggatatataaacagcacaagttaggccgggcgcggtggctcacgcctgtaatcccagcactttgggaggccgaggcgggcggatcacgaggtcaggagatcaagaccatcctggctaacacggtgaaaccccatgtctacta

SEQ ID NO: 40367 - DNA, 1655 bp, Homo sapiens
tgttagcgtgcacagttctgcatacttgcttcccctcacctgccaggaacaggttagtgttccccattctgcacactttcttcctctcacctgccgggatcatgttagcgtacaccattctgcacactttcttcctctgtgtacgtgtgtgtggttttcctttcagaaatgggtcatactctgtggacatctttttccacttaaagtgatggcacagccattttcccagtcaagtaacatgaatgtacaagtttagcaaacttcctcctgagagatggagagatcaaggcttctgctccgtggcagccatccgtgcacatgcatcactgtgcgtgagttggtcccagtggcttgctgagacatgctctgcacaggggagatttcttataccagcagtgtgggaggcagtggggcaggtagagccacaagtggggatgagggagcagagtctagggcaggctcctggatggacaccagctacactgtctattggatgtgggacttccctcactgatgaaatgaataagagaatcttcctcatcctgctgttgttggcgttaaaacgggttaatgcatgaaagcaacaaagcccggcctgcagacagcacttggtaagtctcctcttcccagcatgttcaacaggaagccctcattccctctagaatgtaggagtcttgccagcagtggcctgtttgttctctgcctgttgccgacctgatgagaacataaaattggtgtcttctgtatagatttccttcttattgcccctactgtggctgaacataccttcccccgtgcttgaagtctgttcatatatgttctgctgtgataactgcccattcttgttctctatctaagaaggcatttagttttgaaaatattttgttggcttgtaagatatttgtacatattaagcacagcaaacctgtaacatattcactgtaaatcattattcctcatgcatcatttgccatttaactgtatttttttcctttttgatgtaacctgctatagtttacatttttaaatcagaaatgcctgcacattttaaaacgaagactcttatgctctagcctttgaggtcatgcttggaaagtcctttctcacacaaagattatttacactttcatctctttttctctgagtacgtttcagtgtttaattgaccaggaatgtatttcgaggtgtgatatgagacaaggatctgaaatgcttcgcccactgaatcatcatgcactgaccgaaatgccacctgtatgagtgctaaaatcattgtcgctggacctgtgtctgcactgtttaattttagtgttgtttctcacatcagcttctgttgttttcatggttgtggttctcatacttttaatatctgttggagcaaataaagcctcgtttctcatcttttccaaaaatgtcttatgtatgtgaactttggtgttatttgtcaagtctgggcattctcccacccccatattaaagaatgctctctggagtttgtctggaggttttgtttaacttttagattcacatcaggagaatctttgtcttcatggtaagtggtcttcccatctaagactatttcttcaagctgtttgtaataaaaagctgtgtgatttttgtatgtttattttggtcaccttattgaaaccttattt

SEQ ID NO: 40368 - DNA, 342 bp, Homo sapiens
cctttacaatcttcccagcatgtttcagcagttccaccatgtttctcagggcctaggatgttttatactagtctgtcattcttggtgtgagtgccttttatggtcaggctttctgcttcagtgtcacaagaccactgttaatattccagatatctcattctttctctacaatatccaaagctggaagagtgaaaaggagcaagacaaagctctttctccaatgctatgtctttcattaggaaattaaaaatttcccggaaacaaaccatgggagttaccctggcatatctaattcgtgagaagtaggtcatactggtcctcttagaccaaaaactggcaaaa

SEQ ID NO: 40369 - DNA, 557 bp, Homo sapiens
tgaaaattgcaagactagatatttcctaagggcctttcctctgattttgggaaaagtatctcacaaaataaaacatttttctggataaaaatatcagtttattagaaagcaggtttttttttttttttttttttttaagaaacttagaatgtttggtatatttggtcatcccacttaagctgttggctccttcattcattcattcattcattcattcattcagtgattcaatgtttatgacactgctttgtgccagacataggagctttgcactgagggtcaaagggtgacaagggcagcctgttgtttcaactggtgacctgcttagcctagtttccctttgagtttggcttatcatgttactgatgcagaaaaacattttatgtatttttcagtagaccaatagtgataatattgttttaatgaagaaagcttttaggtttctggagagagggaagaaaaataatgtgtaaaaaataggcatccatctgatgtgatacctttgaaataagaatatttggaaggtctttactgagtttctcatggaattctggtgg

SEQ ID NO: 40370 - DNA, 386 bp, Homo sapiens
cgcagcaggcttccggcagtccaaagggctttgagagctgcagttggcagaaacagagggcacggtccgcggactgaggggcaggggtgagtgcccgcttggtctgggccactcccggaggccgccgcgtgggaaaggacttgggtcattggtaaaagtctagtcccaggatacaatgagctgaagtggtaaccagtgcacagtggacctgctttgcagcttgggcatgccacgcaaatgaacaggacttatcatttgttcccttgattgctctgagactgagtaaagttactcagtttcctgatgccaaggttgcaactgaaatatcctgtaggagcgaaagaggtccgtcatgctttccacagcacatcaggcaatccatccaa

SEQ ID NO: 40371 - DNA, 324 bp, Homo sapiens
attggatgttaaattgttcaggagtacctaattggccgttaaaaagtaaaattcctatcctgcaatttaacactaatatcaaaatggtttaaagatttaaatgcttaaaaatgaaatagtatcagaggaaagtacaggttgcgttgaaataaatgcatagataatatttaaataatattgaggtgaggaaggaattttccctagcgtaaaactactgagagttcattaagattttattgtggagattcaaaaagaaaggtttattatactaaacgggaaaatgaataaactaagggggaatatttgaaatatgaccatagtaca

SEQ ID NO: 40372 - DNA, 371 bp, Homo sapiens
gctcgactttttttttttgagacagagtcttgctctgttacccaggctagaatacggtggcacgatttcagctcactacaacctccgcctcctgggttcaagagattctcctgtctcagcctccccagtagctgggatcataggtatgtgccaccacgcccagctaatttttgtatttttttagtagagacagggtttcgccatgttggtcaggctggtcttgaactcctgacctcaaggtgatctgcccacctcggcctcccaaagtgctgggattacaggagtgagccactgtgcccggcctttttataatttctaactctttgctgagattttctattttctccaaggtttcaagaaagtttgtcgat

SEQ ID NO: 40373 - DNA, 409 bp, Homo sapiens
gacaaaattctatacctcatagaaactgctatagaatacgtagaaactgggaaaaatttccatctgacataagacttgagctctaaatggttcctgtcctttaaaacaaagtgacaaaatagaaataaaataaaagttaggtatcagcatgtgaaaaagaatccctaggccggcaatacccaatatagtagctactagccacaggtggctactattaataagtacttgaaatgtagctaatcccaaatgagatgtgctagaagtgtaaaacccatgctggacttcaaagacttaatgcaaaagaaggagaaaaaaagtaaaatatctcattaatatttttaataatgattacctgatggaatgatgatattttgggtatattgagttaaataaaatatattactgaatt

SEQ ID NO: 40374 - DNA, 1657 bp, Homo sapiens
tttttttttggcaggaatgaaggaaagcagatgaggtgtgtcccgtccctgacacctgcgtccactctgtcccttctcggcagcccccaggcaggggcagatgggctctgtcttcggggggctgcaggggcctgctttcctcacgagttccacctgcagaggcccaggcattatccacgctgcgggaagaggcagtagccacaagcagaacacagcccccctcctggagcccatggcccaggtggtaaggggtggccggtgtggggggtcccctggagcagctgggcccagtccctgtgagcgctgctgtcagcctgaaggtggtgaggggagggagccccgggagtacctggaagacgcgtgccccaggcatgaggccccctcggggccccaccggccccatgcccaggtgccccaggtgccagtgtgactgggcagtctcccttggctgccccgtgttcactcagctggtggagcagatgagtctctgagcatcttggggttggcagcggtcgcaacttgtgatcacagaacacagattccgagaagcacttgagattctgttcaggttttcaaagacgcgtgtgtgcgtgccctggcggcgcagcagatcccacttctgaccgaggcagggtgtgtgtttacacagatgagcctgggcagagggagcccagaggccctggcatggcgcccccctccttccagcacacggagaaggcctccatccctcatatgccacgctgtgacacggtttgggactggcagaagatttagggcccagtgcacaggctcctgggcaggcgggaaaccatctcccgaaagcagaaaacgttggccacacggtggcagcagtccctcaggcgtcctggtcgtttctggttgtcgcaagtggactcctcttcctttgggaggctggatctgtcttcctcctctcactgtgagcagagggagggagagctagcagagcctgagctagggccgggatctaatgaccgccctctgcctgtccttgggccctgaaaccaggggctcttcacacacatgcagctgtgatttcagagccggtctcacttcctattggcggtgccgggccaggacagagttggacagagctgtggaaaatgggtctccaatactatcttgttttgattccagcgttccatcagctgccttcatgacacttgtacagccgcattctgagctcaaccctgaccttgcagctctgtttttcctttttggttacctatctgtttttcaagaacaacattgtggatataaataaaatgctaagggaaatgaaagtggcaagaaggtgtttttttaaaaaacaaaaaaaaaccatcatcaacttttccccatctgagcagagcagggaggcccttttgtaagtccctgaattgaagcaccttacctctgcgtggctttgctgaggagagtcacagcccacagcctgattctagaagtttcctttgggaggctcttcgggcctgcactcttagttgaggccccaccctcacctgaagagatttttctagacagtatcaagcctatgtgacataagctcactttaaaaacagattccccaaagtatgtttccagggagcatttgagaataaaaacaagagtccaacttatttcaccctcttctgccctgaaa

SEQ ID NO: 40375 - DNA, 393 bp, Homo sapiens
tagatagctgtatttctcttgcaggaattaaaggccaggagcagaagggagttccccgtaaatcagacctgtggctggcttatcttttatccattacgtactgtagagaagaaactcccgagagaggctgagggcacacgaaacatttcctgcctgttaaaaaaaaaaaaaagaaaagaaagcattaacttcactgaggatatctcttctgaacaaaccattaaattaaaaaaaaaaaaaagataaaatattcttaccataagtagataataaggctcactgaaaggaacagcagaccagaaatgcagaggatctgtggcctcactgcaaatcaggtctcaccagtctcctcatttactaatgacttatgaccacccttaccgggcaaggtag

SEQ ID NO: 40376 - DNA, 513 bp, Homo sapiens
gtcctaccatatacaaagcagatcactgagtcagctccatgactagttacataggaagccctggattggcgtgaaatactggtgcccgaggttcctcctgccccttaggctcactgacagatcatcccaagcaggcttatcaggttgggtctaattttaaaacagtcattgaggagtcctggccaccccacccctgcttttgtttgatgcttcacctgtgtttgctgggttatggtgtaacacagtaaatcctgtgtgtattttaaacaccaaaaataatgggatctgttgctggtctcttttacgaatttcaggtttcactgtgagacagaattcatttcacctcagtcccatgagcacttttgtgtgttctaatttctctacgacaccataatgggagaagacaccgatgcaacctgcggaggcctttctgcagacccacctttaactggttttctctctcccaacttgggctggccaggcactagcaagaccacactctgcataggaaga

SEQ ID NO: 40377 - DNA, 361 bp, Homo sapiens
  misc_feature (31)..(31): n is a, c, g, or t
ccgcatacttcgatagcatttttatacgagntaaggcccaggccaatcggccgagctcgaattcgcaggctgccccagtcctcctgccaggccctgggcgcccacgcccgccacgggctttcagccgcgggctgctcctgctcctcgccccgggtgagcctttgatagcgcgcggccctcctcccctctgggacgtcagactgtgttgtccctgggctggttctactcggctttggtgtttggggttaggtctcctagaggaggaggcggtgctatcagccagggtttggcttcaggtcactgggctggtgatgctgaccgtagccctcaaggacgcccttcttgcccaccccgaggcgtg

SEQ ID NO: 40378 - DNA, 640 bp, Homo sapiens
  misc_feature (31)..(31): n is a, c, g, or t
ccgcatacttcgatagcatttttatacgagntaaggcccaggccaatcggccgagctcgaattcgcaggctgccccagtcctcctgccaggccctgggcgcccacgcccgccacgggctttcagccgcgggctgctcctgctcctcgccccggggctgtgactccctgacgcagatccagtgcggccagctgcagagccgcagggcccagattcaccagcagattgacaaggagctgcagatgcggacgggcgctgagaacctctacagagccaccagcaacaaccgggtgagagagacggtcgccctggagctgagctacgtcaactccaacctgcagctgctgaaggaggagctggaggagctcagcggtggcgtggaccctggccggcatgggagcgaagctgtcactgtccccatgatccccctgggcctgaaggagaccaaggagctggactggtctacaccgctgaaggagctgatctcagtgcactttggagaggacggcgcctcctacgaggcagaaatcagggagctggaggcctgcggcaggccatgcggacccccagccggaatgagtcgggcctggagctgctcacagcctattacaaccagctgtgcttcctggatgcgcgcttcct

SEQ ID NO: 40379 - DNA, 625 bp, Homo sapiens
aggagaagagttgctgcagctccttccctgctttggaggaggaggggaggcggggtaagtttggtgggaaactctgtaatttccttttttactttcacagcaatagtgcagaatccagaatggatgtcctctttgtagccatctttgctgtgccacttatcctgggacaagaatatgaggatgaagaaagactgggagaggatgaatattatcaggtggtctattattatacagtcacccccagttatgatgactttagtgcagatttcaccattgattactccatatttgagtcagaggacaggctgaacaggttggataaggacataacagaagcaatagagactaccattagtcttgaaacagcacgtgcagaccatccgaagcctgtaactgtgaaaccagtaacaacggaacctcagagtccagatctgaacgatgccgtgtccagtttgcgaagtcctattcccctcctcctgtcgtgtgcctttgttcaggtggggatgtatttcatgtagaaggtggaagaaggctgctatgactctttggatgggagtctggcaagaggaaattggaagataaaataaataataagtgaaataaaaaagtggcctcgttggcctca

SEQ ID NO: 40380 - DNA, 561 bp, Homo sapiens
ctctatagctccagacagacagaagaaagggattcttttcagtctagaaaaatgctcaccccttcctcagaacatttccactgtgacgaaaagagactgatgaagcctcagagagaaaggcaactctgggtggtgatgcaatagtgcagaatccagaatggatgtcctctttgtagccatctttgctgtgccacttatcctgggacaagaatatgaggatgaagaaagactgggagaggatgaatattatcaggtggtctattattatacagtcacccccagttatgatgactttagtgcagatttcaccattgattactccatatttgagtcagaggacaggctgaacaggttggataaggacataacagaagcaatagagactaccattagtcttgaaacagcacgtgcagaccatccgaagcctgtaactgtgaaaccagtaacaacggaacctgtggaagaaggctgctatgactctttggatgggagtctggcaagaggaaattggaagataaaataaataataagtgaaataaaaaagtggcctcgttggcctca

SEQ ID NO: 40381 - DNA, 494 bp, Homo sapiens
gcctggccacgtttcaagtcatggcgaatgccagagggcaaagtgggtgggtcttacaacctggtagagtcaagaggcaaagttcagaggcagaacggatggcggttctctgatgtatggcagggcggtgggagagaagggaagagaaagccgtattataggaaaagaatttttaaattgggatgctaaataaccattgatcatagagagattcagcaggaggtgaaaggactgtggaggagaggggtacacacacatctttcccaggagctatcacagagcaatcccagctcagaatatctggggagtttccatagagtgtggggggcatgaaggggtttctcgggtctcctgactccttttattttctttctttctctgcttttttaggtggaagaaggctgctatgactctttggatgggagtctggcaagaggaaattggaagataaaataaataataagtgaaataaaaaagtggcctcgttggcctca

SEQ ID NO: 40382 - DNA, 228 bp, Homo sapiens
ggctccccttcctactaccttgtggttcggtgggtccgaatccattcagagtccagatctgaacgatgccgtgtccagtttgcgaagtcctattcccctcctcctgtcgtgtgcctttgttcaggtggaagaaggctgctatgactctttggatgggagtctggcaagaggaaattggaagataaaataaataataagtgaaataaaaaagtggcctcgttggcctca

SEQ ID NO: 40383 - DNA, 467 bp, Homo sapiens
taacagctgaagctgattaaaaccattaaagtatacagagaggatgaatattatcaggtggtctattattatacagtcacccccagttatgatgactttagtgcagatttcaccattgattactccatatttgagtcagaggacaggctgaacaggttggataaggacataacagaagcaatagagactaccattagtcttgaaacagcacgtgcagaccatccgaagcctgtaactgtgaaaccagtaacaacggaacctcagagtccagatctgaacgatgccgtgtccagtttgcgaagtcctattcccctcctcctgtcgtgtgcctttgttcaggtggggatgtatttcatgtagaaggtggaagaaggctgctatgactctttggatgggagtctggcaagaggaaattggaagataaaataaataataagtgaaataaaaaagtggcctcgttggcctca

SEQ ID NO: 40384 - DNA, 601 bp, Homo sapiens
aggagaagagttgctgcagctccttccctgctttggaggaggaggggaggcggggtaagtttggtgggaaactctgtaatttccttttttactttcacagcaatagtgcagaatccagaatggatgtcctctttgtagccatctttgctgtgccacttatcctgggacaagaatatgaggatgaagaaagactgggagaggatgaatattatcaggtggtctattattatacagtcacccccagttatgatgactttagtgcagatttcaccattgattactccatatttgagtcagaggacaggctgaacaggttggataaggacataacagaagcaatagagactaccattagtcttgaaacagcacgtgcagaccatccgaagcctgtaactgtgaaaccagtaacaacggaacctcagagtccagatctgaacgatgccgtgtccagtttgcgaagtcctattcccctcctcctgtcgtgtgcctttgttcaggtggaagaaggctgctatgactctttggatgggagtctggcaagaggaaattggaagataaaataaataataagtgaaataaaaaagtggcctcgttggcctca

SEQ ID NO: 40385 - DNA, 663 bp, Homo sapiens
ctctatagctccagacagacagaagaaagggattcttttcagtctagaaaaatgctcaccccttcctcagaacatttccactgtgacgaaaagagactgatgaagcctcagagagaaaggcaactctgggtggtgatgcaatagtgcagaatccagaatggatgtcctctttgtagccatctttgctgtgccacttatcctgggacaagaatatgaggatgaagaaagactgggagaggatgaatattatcaggtggtctattattatacagtcacccccagttatgatgactttagtgcagatttcaccattgattactccatatttgagtcagaggacaggctgaacaggttggataaggacataacagaagcaatagagactaccattagtcttgaaacagcacgtgcagaccatccgaagcctgtaactgtgaaaccagtaacaacggaacctcagagtccagatctgaacgatgccgtgtccagtttgcgaagtcctattcccctcctcctgtcgtgtgcctttgttcaggtggggatgtatttcatgtagaaggtggaagaaggctgctatgactctttggatgggagtctggcaagaggaaattggaagataaaataaataataagtgaaataaaaaagtggcctcgttggcctca

SEQ ID NO: 40386 - DNA, 737 bp, Homo sapiens
ctctatagctccagacagacagaagaaagggattcttttcagtctagaaaaatgctcaccccttcctcagaacatttccactgtgacgaaaagagactgatgaagcctcagagagaaaggcaactctgggtggtgatgcaatagtgcagaatccagaatggatgtcctctttgtagccatctttgctgtgccacttatcctgggacaagaatatgaggatgaagaaagactgggagaggatgaatattatcaggtggtctattattatacagtcacccccagttatgatgactttagtgcagatttcaccattgattactccatatttgagtcagaggacaggctgaacaggttggataaggacataacagaagcaatagagactaccattagtcttgaaacagcacgtgcagaccatccgaagcctgtaactgtgaaaccagtaacaacggaacctgtgagttgattggggattgggggctggggggagacaggacatccctagtgacgtggaatacatagagggctggaataccaggctttggtggatgggagaaccaaataattagtacttcattgcaggtattcatctcaacttggccatgtttcactaagatttaatactaaccctgtttacagaacactgggaagatatggtacagttaaatttcagttcagtagtattcaataggtatgtaatctatgcctaaggctgctaaggtaactgatgctgataa

SEQ ID NO: 40387 - DNA, 834 bp, Homo sapiens
aggagaagagttgctgcagctccttccctgctttggaggaggaggggaggcggggtaagtttggtgggaaactctgtaatttccttttttactttcacagcaatagtgcagaatccagaatggatgtcctctttgtagccatctttgctgtgccacttatcctgggacaagaatatgaggatgaagaaagactgggagaggatgaatattatcaggtggtctattattatacagtcacccccagttatgatgactttagtgcagatttcaccattgattactccatatttgagtcagaggacaggctgaacaggttggataaggacataacagaagcaatagagactaccattagtcttgaaacagcacgtgcagaccatccgaagcctgtaactgtgaaaccagtaacaacggaacctcagagtccagatctgaacgatgccgtgtccagtttgcgaagtcctattcccctcctcctgtcgtgtgcctttgttcaggtggggatgtatttcatgtagaaggtaagagtgcagccactggctttgggggagtctgtgaaataatattttttaacttcccacactaaaccgaagtaattcttaccagtatctctagttagtgtttccagcctggtcaattatcagccactgaaggaagagatttaggctcatccctataatcccagcactttgggatgatgacgtgggaggatcgcttgagcccaggagttccagaccaggctgagcaacatagtttaagtccaggctgagcaacagaccttgtctctacaaaaaaattaaaaataaataaataagaactcctctacaagacgtt

SEQ ID NO: 40388 - DNA, 488 bp, Homo sapiens
ttaaactttagagaaaaattgaagtgattgaaactggggagttttaaaccaacaaagggaaatttttgttgactaaatgttagctcgtgcctctgagtctgctgagtgagtacaagacacattcttgcagtgtgtctggtgaatatttgtacttgagtttcttatgatgctggtcttaaactggcaggccctcacctggcagtttacaggttaaaagtttaagtctggcttccagaatatgaaaacacagggagctcagctgagcacagcagagttgcagccctcatgtaacatgaacaggaaatacatattaacacagaaattgatcctagactgccggggtccatatcccgattctgcctgtctaacctcgaggaagttacttaccatctctgagcttcagtttatcatcagcaaaatgaagataaaaggaccttcatctctttaaggtacttagcattgtgcctgtcttagaacttagtatggta

SEQ ID NO: 40389 - DNA, 808 bp, Homo sapiens
gtgagaaccagtctctataaaaaaaaaaaaaattgataaaaatagctgggattacagacgtgcaccaccatgcccggctaattctgtatttttagtagagacggggtttctctatgtggtcaggctggtcttgaactcctgacctcaggcgatccgcccgcttcggcctcccaaagtgctgggattataggtgtgaaccactgcacctggccaggacctatttttattgtagactttactgaatatacataattctgagtgcagatatgaaagctagtactattcctgcaaaaaatgccaaagccaagatgcgatgagtgaaatttcactacagatttgttgatggaagggcctaagtttttcctcgttcactatcatgttttgcctagtgatggtcctgcttttgtatggcaaagtcacatatagcaagtattcttttctacactgttcgttgtgtaaggaattccctttgcaaagaccatgtatcccaattcttgcctagattatgagcaattttgaattagtgaaagttttattttcaaatagtaaatatagccagttgccctgcctcaccttattgctgatcatgcaaattatggtgaaaatcttagagcttaaaaaatatatatgggctcagttgtagaaaaaaaaagaaaggagctgttaaaaaaattattttagtccaggcatggtggctcatgcctgtaatcacagtgctttgggaggcggaggtgggaggattgcttgaggccaggagtttgagaccaaccagggcaacatagtgagaaccagtctctataaaaaaaaa

SEQ ID NO: 40390 - DNA, 767 bp, Homo sapiens
gcaccactgcactccggactgggcagcaagagcgaaactctgtctccaaaaaaaaaaagaaggagcgacatatttattaagattaatcttgatggccaggtgtggtggctcatgcctgtaatcccagcactttgggaggccaaggggggcagatcacttgaggccaagagttcaagaccagcctggccaatatggcaaaaccctgtctctactaaaaatacaaaaattagctgggtgtggtggtgcatgcctataatcccagctactcgggaggctgaggcagggggattccttgagcccaggaagtcaaagttgcagtgagccatcattgtaccactgcactccagcctgggtgacagaacagtaagactgtctcaaaaaaaacctgaaatgaagtttcatatctttatgaaagtaaaggaagatacttctgtctgaaggacatcagtgaatctaaattgccatttaagagagaactcgggctgggcgcggtggctcaggcctataatgtccagcactttgggaggccgaggtgggtgaatcatgaggtcaggagatagagaccatcctggctaacacggtgaaactccatctctactaaaaatacaaaaaaattagttgggtgtggtggcgcatgcctgtaatcccagctactcgggagactgaggcaggagaatcgcttgaacccaggaggtggaggttgcagtgagccgagatcgcgccattgcactccagcctgggcaacaagagcagaactccgtctcaaa

SEQ ID NO: 40391 - DNA, 317 bp, Homo sapiens
gttgaactgcttgcttgaactcaggaggcagaggctgcagtgagccaagattgtgccactgcactccagccctgggtgacacagtgagactgtctcaaacaaaacaaaacaccagcctgggcaagacccccatctctacaaaacattttaaaaaatcagctgagtgtggtgttatgcactggtagtcccagatactcagaaggccaaggcagggggattccttgagcccaggaagtcaaagttgcagtgagccatcattgtaccactgcactccagcctgggtgacagaacagtaagactgtctcaaaaaaaacctg

SEQ ID NO: 40392 - DNA, 360 bp, Homo sapiens
attaatatgatgtgcttattcaaaatctgatatatcagttaccaatatttttcaccttcaccgattttattcttatgtgattgttatgtttccttttggagtcaatggctgttgtgtgaggaggtcttgaaaaatattacaggaagaggacagtaccacaaaaacctacatgactatgcagaactaccgatcaattgtcccaaaacgagtgtcgaatattctttgtcttaaagttctgcatggaattcttacacatggaaaaataaatttgtggcaaaatgaaactcatcaaccaattgtcagctaatataaaatgttgagcagaatgcagtgatttgctgtttctgggaaggtaaacat

SEQ ID NO: 40393 - DNA, 231 bp, Homo sapiens
atggcaaatagaagttaagtggagctgttaatgaaaagggctcctctaagtgggagatggaaccagggttctgtcccaggcattctcactatcctggaaagtgattacaatcagccgttcatttatttcctcattccttctttcatcagatacagattggatgcccactgggtgctggtctttgttacagacgtctctgctttgtctaggagggctgttctgccacctggc

SEQ ID NO: 40394 - DNA, 389 bp, Homo sapiens
tagagaaattgttttcatgatatttcctatctccttttgtcactttgcttttgtcggtaaattttacaactaaataaggattaccaggcataaaaagcagcagacaatcatgatgcaaactgaaaataatcaatcaaaactgacccagaacttaaatagatgttaaaattagcagaggaggacattaaaactgtttttatacatgtatctcatataatcaaaacattaaatagagacatgggagataaacaagaaaagccaaaatcaaactttcaaagacaaaaacatttgagatgaaaattacattggatgaactaaggcagattagaaactgcagaagaaaagattagcaaacttgaagatacaagaacagacactagctaaagtac

SEQ ID NO: 40395 - DNA, 544 bp, Homo sapiens
gtgtggttgtgtcataaattatgtacctgttctctgttgaacatatagatttttttctgagtttttccttagcaaaatgctgcagtgagtacccttgtacatagatgtttgtacatttgttctagaaaaatctacagtaaagattcttagattaagagattcccaggttattagaaaatttctctattaatttagatatatacttccaaattgcctgaccaaaaagttatgtcaatttaacttctatgaacagtatacaaacatgacaattttccatcacctacaccaactctgggtaatttcatcttttttacaagttgatggattgttttaatttatatttctctggttattaataaggttggccacctcttcatgtgttattattgatgatatttgtattgaattgtttgaattttcttgatttggaaaacctttttacatgtcatagatattaaatatttgttgtaaaactctccttccagtattttgtatgtgtttggtcaagtagaataaactcttgtcctctgaaaaaaaaatcctt

SEQ ID NO: 40396 - DNA, 421 bp, Homo sapiens
gccctccccaggacagggtatgaactcctgtcccaccctcaaaacactatcagtcaaaaagattcatgccaggcactccagaaatgcatccggcagagagtgagagacgctcatttgcccaggtttgtgacaacactattttgctttttcctggctacttttccttccgatcacactggagctaaatccccagggaccattgtgtagggcgactcttggttgggaagaaagggaaaaggtgaaaaaagcagggcagcgtagggcaaagaggatgttttgaactggcctcactggaaatatacacattcttgacatttctgtttacttcctgtgaccaagactgtcaataaatacataaaagtgacaagttttacaagttgagacaatgggaaggaaagagaacttggatttactgagccat

SEQ ID NO: 40397 - DNA, 355 bp, Homo sapiens
aaatttcctctacattatcaaagctctttttattttgaataccgttttccaaatttcattttttctttgactcataaaatctagtgttttgaaaacttcttatatggagctttcttttgatttttaatatgaaataactactatgtatttgtttgagacctcctgtgtatctcgttctgtactagatgctatggtagactgaaaggaaatgtgacattttctaccggccctcaaagaattagtcatttaggtggggagaaaaggtagttgatatgatgatagaaaaccaattgtaagtattaagggatattcaatgacagttggatgtctttgatttttttccattcagtcctaa

SEQ ID NO: 40398 - DNA, 595 bp, Homo sapiens
tgtaatggaaaagtctagacatagggctggcttcaagcttagctggatccacgtgttaaaggactatcaggattatctttctgtctggctgtcaactcgtcttttctctctgttggcttcacccacaggcagcctctcctccatggagcgggctggccatgtggtcatcctgcaacccatcactgtgattttggttggccaggtctggaccataagtctagtctggagcctgtggctgggagtccatcctactaaattgtctggatggaggatgaacttcaggggaagggctgctgtaattttggatggggtggttaggaatgtgatgtggcagcagaggcttcctgaggcaggtggctcctaggttttcttcctgagcagtttgaatcctgcaaggggagtgaggactcttttccttgccctgactttttgctgtccgggagcccttcagagacctggcactagtgtttcctctgctcacccaggcagtaccccgcttcctccgaggagggaaacttgcccactccatctcatttttcttcgcttgcatctgtgtttcttggaatctgctctttcctcctacaacttaaaaaaa

SEQ ID NO: 40399 - DNA, 1030 bp, Homo sapiens
taatcacctgggtgcaggcaagctgagtccgaaaagagagtcagggaagggagatggggtggggccgttttataggatttgggtaggtagtggaaagttacaatcaaagggggttgttctctggctggcagaggtgggggtcacaaggtgctcagtgggggagtttttgagccaggatgagccaggagaaggaatttcacaaggtaatgtcatcagttaaggcagggaccagccaatttcacttcttttgtggtggaatgtcaactgataggcatttttatgggtaccgtgttgaatctaaatcacattgggttatataattatttaacaatattaatttttccaaactatcaatatgggttgtatctctatgtatgtttttaatcattttgatcaacatttatagatttcaaggtacaaacttctcagctttgtacgtttattcctaagtatttcttactttaagttctctagcaaatggaagtgtttttaaattttcttttaaaattgtttattgttaatgtgtggaaattcaagtaatttttggtgccgatattgtattgtgcaaatccactgaatttatttagtagttttgagggaagagagagaccctctcatattgttttatattgttttatactcagtacctgttttaggaaaaaaacaaggaagtgaaatcaaagacaggcagcccggcgccaggcctgaaaccaggcctgggcctgcctggcctaaacccagtagttaaaaatcaactcataacttagaaactgatgttattcatagattccagacattgtatagaagaacattgtgaaactccctgctctgttcttttccactctgaacaccggtgcatgcagcccctgtcacatacccactgcttgctcaaatcaatcacgaccgtttcatgtgaaatccttagtgttgtgagcccttaaaaaggacagaaattgtgcattaggggagctcagattttaaggcagtagcttgccgatgctcccagctgaataaagcccttccttctgca

SEQ ID NO: 40400 - DNA, 181 bp, Homo sapiens
gggaaaccaaaatatttgtgtgacttactttattgtgatagtcactttattgcaatggctggaattgaacagtatctctaaggtatgcctgtataggtgatggttcttgagatgtgaagtgcctggatgatgggtgatgtgaagtcatgggcctcaaggggttcatgacccttacagtctg

SEQ ID NO: 40401 - DNA, 439 bp, Homo sapiens
ccatctgtactatgggataaattcaattagctagatataaatgtcaaaattgataagaggtagaaaagatcacttattagatactaagtaaatgattattaaataatgaacaataggaattacagacttcagccgtaggaaagaaacattactggatgaactttttcagttcttggatatcaacatggttttggttattacagtgattatcagtaatatttaatgcatgaggctagggtattctggcattcaacgatgctctgtgcagtcctacccaattaagaactgctatgatcctacacaactttgaaagtctaactaaagctactacaaatataaattggtatgtcacttcttccagagtttatgtttatattcaatgcagtccctataaaaatcccagcataaatttttgttaaataaaaaaatgcaaaggacc

SEQ ID NO: 40402 - DNA, 2326 bp, Homo sapiens
aaaaaaaatactgcaagaacatctgccccagaactgcctgtccaacctggactgacatcatccttgttattgatctttgtagccaaatataattattttaaaacaaacaaaaaaagagaatgtaagcagtataagactttaaaacacacaaatgaaatatacatgactacatgcttcagtgaactaaaactttcatctgtaatctttattttgcaacattctgaagtaacattacagtcttttcagtgtgctgtgtcatttatatcccttactttatcctaggaatcctgtattgccattgagcatatgcagattgagacatgtgcatagcttctccccgttgagcccatcagtggggaggagctatgtaccggggacatttggcaaagattttcacgagtctcttggatgtaacagctccttaagaaaacctcagtttaccttccctattttttaccatttgtaaaactaaggctcagtgatgtaaaatataacacattctgtgctgtggcataactgcagcttaggtttttatattcaagacaagcagaggtatagctgaaaaggtatgaacacttactatgcttcaagatcccttcgttggtttagttgtggcattttagaacagctgacttgggactaaagcatctttctatctgggatcagtatttctaagttgcctttaagctgaataaacatttggtttttatatttagttgcttcgatgtgaaacactgcaatttaaaaaattacacatatgtaatatagtattttacactaaataatagtgactggcagtccattggccgaagaagtattatttttcagatattctgctctgtcatcagctatagacactgacaggtatttatctggaaaggcttgctgtcaggggttcacagtgctgcttgtgggttatctccagaccctttacatttggcactttaggacagcgtgagtcacaggttgcactagaagttgcctttgaaattagacctaaactatgtggaactggaacccttgtacacaaagctctctatcatccaaatcctgctgaactctcttaggaaagaacagttttacagattcattctttccacacacaagatttccccactgcccagttactctcacctttttattttcttgactgttatgttttacttgactctggaatcttaccttgtactctcacatttacatggaagtatagcttatttcaccaattatactatcaaaagcagaagtagttacttacacctgaaaatttgtactgagaatgtagctgtgaatatgtttaagaaagtatacttaaagcagaaatccaaggaagtatatttaaatcaaagcaagaaatcccatttccaaatggcaataaagcatgtgttacatagaatcagtgcatgaaagtgttttagtagcccagattagattgtaccctggcgaataagcaagagttctttttcattttcatcttgcaattcaactgggtatttgggttctttttctattcactcatgtcagatagagacatgcatgttgtaaattattttgtcagaatgaaagcctggcagattaaatgctttcttctcttcttgctttacttgatatcaatctcttgttcatttcttgataatatgtttggttatttttgttttcattgcttttagtgtcagagatggctttggattccccattctgtgtgctgctgtctggctcctgaacccacctgtagaggtgtgtcaatcccagctggtgaagtactgagaagaagctacacaaaaggcatcaaagtattagtaagtgtacctctgacattttaaccacctctgacttttccatggaatggacaagtagtagtctctgtcagagctacattttaaaggagaaaaagaaacgtgaagtcatgaactgtttatttatgctgttatttttgtgtttactcacctcatttatattgacttgtaaattagtaatttctgaactattacttatcaattcattgcctacatgtcagcaaacaaattttcttcttaataaagaatacagttgctgggcacaatggttcacacctgtaatctcagcacgtttggagggcaaggcaggaggattccttggggccaggagttcaagaccagcctgggcaatatagcaagatttcatctctacaaaaaaatgaaaacattggctgggcatagtggctcattcctatagttcaggctactgaggagcctgatgtaggaggatcacgtgaccccagtagtttgaggctgcagtgagctatgatcctaacactgctctccagcctgggtgacacaccaagttg

SEQ ID NO: 40403 - DNA, 1033 bp, Homo sapiens
  misc_feature (936)..(936): n is a, c, g, or t
  misc_feature (945)..(945): n is a, c, g, or t
  misc_feature (971)..(971): n is a, c, g, or t
  misc_feature (973)..(973): n is a, c, g, or t
  misc_feature (1025)..(1025): n is a, c, g, or t
agatgcacatcttctctgggaaaattcacctctagtctacacctatgaacctactgggttggtgacatttacaagacagagtcttgaagattttccagaatggaaaagatgtgaaaaacccttgacacgattgcatgtcacttacgaaggtaccatagaagaaaatggccgaggcatgctacaggtggattttgcaaatcattttgttggaggtggtgtaaccagtgcaggacttgtgcaagaagaaatccgctttttaatcaatcctgagttgattatttcacggctcttcactgaggtgctggatcacaatgaatgtctaattatcacagtgtcagagatggctttggattccccattctgtgtgctgctgtctggctcctgaacccacctgtagaggtgtgtcaatcccagctggtgaagtactgagaagaagctacacaaaaggcatcaaagtattagtatctactgtgcgtttcagtcaacaatacagcttgtgttcgacaatattccttgatgacagcacagccatccagcattatcttacaatgacaataatatctgtgaccttggagatacctcatcatatcacacaaagagatgcagatagatctttgagcatacctgatgaacagttacactcatttgcggtttccaccgtgcacattatgaagaaaagaaatggaggtgggagtttaaataactattcctcctccattccatcgactcccagcaccagccaggaggaccctcagttcagtgttcctcccactgccaacacacccacccccgtttgcaagcggtccatgcgctggtccaacctgtttacatctgagaaagggagtgacccagacaaagagaggaaagccccggagaatcatgctgacaccatcgggagcggcagagccatcccccattaaacagggcatgctcttnaaagcgaantgggaaatggctgaagacatggaaananaaatacgtcaccctgtgttccaatggcgtgctcacttattattcaagctttngtgattat

SEQ ID NO: 40404 - DNA, 373 bp, Homo sapiens
ctcaccggcatgctggagcaggagacagcctggcctgtaagtttcttgctagcaaggacctctctgccatccgctgcttggactgtctgcacagagctctggaggaattcaactctgggcgtcttggagaacttcagaaataagttaataaaaaggatacacagaggctccccagctggctcctctgcaccggtgagcatcgggaaagccatgagggctgagggctcagctgagtgcccgtggccgcagagtttttggatcctgcagagcgtgatctgttgggcatcaaactctgccagagtcaagggagcgggaggctgagggtcagggtggagtagctcagcccctgggcgggagccatcccttctgtcag

SEQ ID NO: 40405 - DNA, 205 bp, Homo sapiens
agtcctgctgctgaaagagcaaatccaaagactgagttatgtttaatgacttttggccgaatcactggaaatatctgtggtgagattgctgagtcaggtgatgtgatatcataagctttcttggaacgggggaaagaaaatgaaactttttggtgtgaatattttttatgctgatgtgaattattttgttaggtagtgtgattat

SEQ ID NO: 40406 - DNA, 497 bp, Homo sapiens
atagggtgtgtgtgtgtgcataggctcatggaatagattcatgcaattatggagactgacaagccccaaaatcctgcagggtaggcaggcagccctgcagaccccaaggagtgttgatgttgcagtgcccagtctgaaggctgtttgcccagcagaatcccctcttgcctcaggagaggtcagtctttagttctattaaggccttcagctgattggatgaggcctgcgcacattatacagagcaatctgctttactcaaagtccacaaatttaaatgttaatctcatccagaaaacaccctcacagaaacatccagaataatgtttcagccaatagtagggcttaccacttcaaaggaacaaataggaaaagataacttattttgttagcttaacgttttaaattcaagttaatcatgaaagcttttttcctctgtaaccagagtgcgctttcatgctatctggactcacttgaataggacttacagagtatgttct

SEQ ID NO: 40407 - DNA, 652 bp, Homo sapiens
ctaaatccttgggggctagttcctttttctggaagtttcagaatctaaggtccacatccctgaatcccagaataatgccttggctatcacaaacatgggagcccagtaattagtctgattagtacaaagttctctacattctctctttcatccttttctaacatgaataggtttattttctaagttctgctaggatgtgaagaagacccaaacacagcaaactggattagtttatgtattttccaaaattttactgaaaacagcattgtataacacaagaaattgccattgagttcccgagttgcccaaatcaggcttgttacctagcccaccaacatcccattcctcatgtgctgtttccacccacaaacgtgtatatgtacagcatatacaagctctgcattcctgacatgatgtgttgggagataaagatggagccttgcaccagtataatctatttgtgtctcgaaacagtaccactatgaaagcacgctggcttagtgtggagtagaagaaatggcacaggaattagagcctggagaccagaattgggtagccctggggaagtcacttaacttatttagatctccaattctttatttttttaattcagtttagaaaactttttattacataatttttagaaatatac

SEQ ID NO: 40408 - DNA, 447 bp, Homo sapiens
agcagctctgtctccctccatgcccactcccattacaggacaggagatggatttggattgtggggtgggcccaggaagactgggagtaacctcccaggggcattcttacctcctcatctgtcataacagagtagaagccaggcattcccagggggcagcaaatggaattcagagagtgccaataggaggagaaaaagagaaatttactaaagatgcccagtggacttgggcaaacctggcccaatcccttcctagtgcaagtggcccaaacaacagcagctagtatttactgagtgctcactgttgccaagcaccgtgctaagtgttttattggtaataacttgtaataatcctcacaataaccctaagagggagccattattctcagtaacagatgaggaaactgaggcttggagaggtaaaataacttacccaaggtcacagtca

SEQ ID NO: 40409 - DNA, 305 bp, Homo sapiens
catcctttgcagcttagaaaaatataactcagtacaccatacagcatatttaaattaaaatataaattatgtacatcattattcttatggggggggagccgctgggaaaggcatgctattctataaccctggacaaaatttgacttttgatgtgtgaattcttaaatgtgcacaaaccaaagacaatggcatatatactttgacacattctgaagttaaaagaggacatgaggattgtgagataagtggcgattgtgtctactattgtaataatataatgtctgcatgacaagaaaaaaagtaaa

SEQ ID NO: 40410 - DNA, 280 bp, Homo sapiens
ccaccctgccgcacagctgatacctcagagtttatcattgacttccttttcacgactccacccccaacccctgtgtatcatcattccctgagcgcctcctatgttccaggccttggggaccccgagctagtgaaaggcccacaggctagtggaggggagtggatggcgcttggttgagtgtgagcaccagtggcaagggacccctctccccatcaggagggagccctttgtaacctgatagtatcattaaataaaagtttattgtgtttttttgttttgt

SEQ ID NO: 40411 - DNA, 411 bp, Homo sapiens
acaccatgtggaggttctctcacttttccactgacaatttccaaattagcaaaatggtgataatagttgtgactacatcctaattatcttatgagaattgagtttatattaatatatataatggtgacaacaaagactgtcatataatcagtgcttagcaaatgttacctatcttattttatttatctatttatttatttttgagacgaagtctcgctctgttacccaggctggagtgcagtgatgcgatctcggctcactgcaccctccacctcctgggttcaagtgattctcgggcctcagcctcctgagtagcagggactacaggtgccctccactacgcccagctagtttttttgtatttttagtagagacggggtttcaccatgttggccaggctgttgttgaact

SEQ ID NO: 40412 - DNA, 477 bp, Homo sapiens
ctgcctcagcctcccaaagcgctgggcttacaagcctgagccaccgtgcctggcccttctttcttcatatccttattctgtatacttttttctattttaaaaaagtaatttttttactttttaaattttttttgcttaaaaacaaaaacccacacattagcctaggcctatgcaggctcagcgtcagtactccccactcttttttaaatgttgtgaaatcctcacctgcatcctaagtattgttgtccccccaactcccactccagagaaaggaagtgatttaccactggccacatggctagctcatgccagctcaaaggccagagctccagtgctcatgatctccatcgagctaccaaagagagttcatctgagcaaatccatatgcaccgcactgtctcagggccaccaggagctcagaaaagggagctggcttttgccaaagaagtaagtgatggcaaagtagaggacacatga

SEQ ID NO: 40413 - DNA, 465 bp, Homo sapiens
aaagctactaaagaaaagccagaaacagcgtaagaatgccctactcaaatatgattcagagacgagggtggggactttattccactggacttcagtcccagtgacaaggccactactattgtgaattaatatcaggctaattaaacttgatgttattaaatgttctatccataaaatttttcattcagaattcttgtttttcaaacaacattctggattattatttagctgtcaaagtagctgtgttcttagaaaatacatcagtcagggctgggtacagtgggctcatgtctgtaatcctagtgctttggggaggccaagacaggagggtcacatgaggccaggggtttgagacccaacttaagtcaacatgggtagggaccctgtctctattcccccctcttacccccccaaaaaattagttcaggacagggtaggcacatgcttgtagtcctagctacttgg

SEQ ID NO: 40414 - DNA, 323 bp, Homo sapiens
tttattatgagcaagatgttatagctagtctctaaaatagtgtgttagaataaaatatagttggatattatcaacagaaatcaaatatagagatgaatctctgaacaacacattttatttgagacagtagaattgtaatttgggcatacacacagactgcattggtctttggtatgtccaaagaacaaagaaaagattgaggtttttattagagaaatgttatgcattgttttgaaagaaaatgcattggcactagcgaagtttttgggagctggcatgctctgatttgtgagtgactgtggtaggtaaaactagtcttagag

SEQ ID NO: 40415 - DNA, 485 bp, Homo sapiens
gattatttggtgatggaatcatgtgggcagagggaaatgatctgtttgtgctcgaatctgcctccaggtagggaccacatgactggctgagccattagtcataggtatgaatgaggtcagccggttgccagaatgcaaaagaatgagaaacatctcaaaagaccaatctcatgttctacaatagtgatgttatctataggagcaattagttacaaattttgtaaactctggccaaacaacattgcagcagtcaggaattatagaaactgtgccaacattttagcagaattcagttccctcctataatcttaatctcatggtctttcactagtttgacaaaggccatccctgggcaaagtaaggttgttagtttcatggaggaagttttgtgattcttgcttcaaagtcaaaccataaattaaattcctcccaaggttagcctggcctatgcccaggaatgagtgaggatagccagccagagacta

SEQ ID NO: 40416 - DNA, 138 bp, Homo sapiens
gcacagctgcgtgagtgagcctaggccaagctagcggaggaaccacgcagccaacccgcaggatggcggaaaagaataagccgtggttgattccatcactctgtggcgggcagcttgttacacagcagtagaagatgc

SEQ ID NO: 40417 - DNA, 743 bp, Homo sapiens
actgaattttttttttttttttttgagacggcatttcgctcttgttgcccagagtggagtgcaatggcacaatctcggctcaccgcaaactctgcctcccaggttcaagcaattctcctgcctcagccacccaagtagctgggattacaggcgtgcgccaccacgccccactaattttgtattttttgtagagatggggtttctccatgttggtcaggctggtctccaactcctgacctcaggtgatccgcctgccttggcctcccaaagtgctgggattataggtatgagccactgcacctggcctcacccactgattttttttttttgcctggttctctggaattatctcctataggctgtcaatctatgatggatactgatatatcctagtgctaaaagagtgcaagcaaagtgggtaagctctgtggaactgtcctccaaatttcccttcccccagggcaaagcttctacctctgtccctcataatccagtacagaggctacagttcaaccaatcgactttaatttttttgccctatttcatcaaccagtttatctatcccacagcagtttacagagaaaacagatttcacaatacaagaataaaacactctcaagtcaaagacttgaccttaggcttttagtaatgaaattttcaatgttattcaggaaagaaaaaaatctaaaggtataaaaattactgtcaaaataagtaacttttttttttctttggagacggag

SEQ ID NO: 40418 - DNA, 822 bp, Homo sapiens
aactttaatggaacaataaggtgtttttgataaaccacatgagttattttcattgattatcttatgacagttgttatcaaaatggattattacatatttatctagtatttgctgtaaactcagcagtttggaatacatcagtaagtatttagttttattatgctactagagtttttttccgtattatagaattttcaaacatttactaaggtagataaaattttaatagtttaatgaacctggtttaccatttaatcagcttattagtaatcaatacatggccaatttcacttcatttacacctccacacacttccctcatattccttgttattgccttaattgagatataatttacatgtcctcaattatgttttggaaaatggagacatagtttcctctacaaatatttctgtatgcctctctaaatattaatgacttaaaacacaaacagaccctgacaccatatgaccttaggacaaattagcaataacttcctaatgtataaaattaaatatccagtcagttttcaaggtttccctattgtcttgtaaattattatcatcttctttattttatagttattttaactgggatccaaataaggactatacattaaaattagatgaaaatatgtcttgtttcctttgatatctttgagtatatcacctacgtgtgtcacctacatcttttttcacttgcactcttttggtttattttgttttgattgaagaaaccagattatttatcttgtagtattttgacactctgcatttttcggattgcatttcgtggtatttattaaacctgtgatataatttga

SEQ ID NO: 40419 - DNA, 287 bp, Homo sapiens
aactttaatggaacaataaggtgtttttgataaaccacatgagttattttcattgattatcttatgacagttgttatcaaaatggattattacatatttatctagtatttgctgtaaactcagcagtttggaatacatcagtaagtatttagttttattatgctactagagtttttttccgtattatagaattttcaaacatttactaaggtagataaaattttaatagtttaataagctgattaaatggtaaaccaggttcattaaactattaaaattgtcgacgc

SEQ ID NO: 40420 - DNA, 433 bp, Homo sapiens
accccttataaaaccatcagatctcgtgagacttgttcactgccacaagaacagcatggggaaaaccgcccctatgattcaattatctctcactggctccttcctacaacacatgggaattatgggagctacaattcaagatgagatttgggtggggacacagccaaccacatcaggaatctctaaaaaagtattgaatatggagaatgccaaaaagcctgatgaaggatacaatttttgtatgttagaattatttcgtatttcaagttaaactgttttccccagccatatttgttcctactctttttttttaccttcagcctgttgttgacataaagaaataaactgaggcaaaaacaggtaaatatttatatgggccaaggttgaggactgcagcctgggaaacacttccaaattaccttgggaagtgctc

SEQ ID NO: 40421 - DNA, 369 bp, Homo sapiens
cagacagtgctttgagatgggttttatgtttatttaggtgggcttggggtggggggttttgtgatagccagcctttggtgcttgtactactctcaaaccatacccgagccacatgtgcaggcatgtgtgtagagacttgaggtgtactgacccaacttgtcaccagcctgggctctcagaaggtttcagaagtttgttcttctctctgctcgatgggagttaaaaagtatagcagtggagagatccagtgtgagggcctggacttccaaccttccagggagagctgggcttgggagactaagaactcctcaggtatgcctgaacatgcccagtagtctatagcaaggactggccactgaaacacaacag

SEQ ID NO: 40422 - DNA, 437 bp, Homo sapiens
ttaaaacagtacaaaaaatgtacattgtgtacttactgtgctaggtgctggaaacacgaagatgaaaagagccagagcctttgcttttcagaagctcatggtctgttggagcaatagacttgaagaatgtgatgaggagggtattaattaaaagttgtaggccaggcgtggtggctcacacctgtaatcccagcaccctgggaggccgaggcgggcagatcacgaggtcaggagatcgagaccatcctggctaacacagtgaaaccccatctctactaaaaaatacaaaaaattaaccaggcgtagtggcgggtgcctgtagtcctagctattcgggaggctgaggcaggagaatggtgtgaacccaggaggagatcgcgccactgcactccagcactctaacctgggtgacagagccagactccatctcaaaaaaa

SEQ ID NO: 40423 - DNA, 415 bp, Homo sapiens
aaagatgaaatggtttggatgtttgtcccctccaaatctcatgtggaaatctgaccttcggtgttagaggtggggcctcgtgggaggtattgaatcaagcgggtggctctctcatgaatggcatagctccatcccttggtgatgagtgagttctcgctctgagttcacaggagatctggttgtttaaaagagagtagcccctcccctctccttgctccctcgtcatgtgacacgctggctccccgtcaccttccaccaggagtaaacgctccctgagatctcaccagaggccaagcagatgccagtgctaagtttcctgtaaagactgcagaaccatgagccaattgaacctattttctttataaattgcagtctcgggtattcctttatagagatgcacaaaacagcctaatgc

SEQ ID NO: 40424 - DNA, 351 bp, Homo sapiens
tgagacacagtctcgctctgttgtccaggcgggagtgcagtggcgtgatctcggctcggtgcaagctccgcctcccgggttcatgccattctcctgcctcagcctcctgagtagctgggactacagacacccaccaccatacctggctaatttttttttttttttgtatttttagtagagacggggtttcaccgtgttagccaggatggtctcaacctcctgacctcgtgatccacccaccttggcctcccaaagtgctgggattacaggtgtgagccaccgcgcctggccatatgctaagtattcttaaagtggtttgtaaaaaaacaatttgcttagcagaggcacaag

SEQ ID NO: 40425 - DNA, 867 bp, Homo sapiens
gatactaaatggtttttgccagcaaaaaggagtgaacctacttcttaaaacacccgagtaaccaagctgctactaagactagaaggatgctaattctggcaaaagtcaaaggttactaacaaaaattagctaagattatatgtttgcagaaagtcaattcagggtaattccgctattatcctgttgtgtttattattcctaaataactggcaattccaccttaaactacggtgcaaaaactaaatgcattaagaaactaattgggaaataaatgtgtttttttaaataaaaacaaacgtacttaggtttttgaagggaaacagctatcaatcttcaacagggctttttaaagcctctgcaccagcaaataaacctttcaggttaactaaacacacttgtgtctttgaaaatctagtttgagaaatcctaacagcagtttgggacaagtgatggagccaccgccctccaccctacaccaatttcactgtcagtacatgcagtgctaacagtaagatcagctgtgtcttttattaggaagcatgttttattgggggcaaggaggggttcagttaggtgctaagaatgtgtcctgcataccgctgtcactctcagtactcaaaaagtaaacatatcaaagccagaagcgtaaactggcatgacaagactaggaagagaaagtaggggacaaagacaaaacagaaattggctggagaaaataaatttagacaaacaatttacaactttcacttagaccctaaggcaacacattccagccgacccaacgcgctcagccggggcgaccgtgaaactactgagaacaacaaagaggagcggcggccgcggcaggagtcccgtccgagtttaact

SEQ ID NO: 40426 - DNA, 452 bp, Homo sapiens
ttcaaatccgtggacctacttgatttaaaactgaaattgggaaaggtgtcccttttcctttccaaaaccacatccctttataaagtctttctctatcttgagcatttacctgcctttcttctggcttcatcctattaacatttaaatatgcttatcctttcttcttaggagaaaaaaaaaattgctttcctctgtgtcgccttatatccattgctttttctttttgctctatctcttgaccccacctcaaacgaatttctgccccaccaaagacagtaaccccttttatgttaaaattagtggaaagaatgttaatataatgccctaactttaaagaagaacataaaggaaatttataagtacttccagggctgtcatctatgccgtgccaatcatgcagtgcacaattccaagggcaccactttacattacaaatacagtgcattacaaat

SEQ ID NO: 40427 - DNA, 190 bp, Homo sapiens
gtgagctctcccaggtcgtgttgggtggatatgctcctgggagctggtccttttggaatggaggctaaagggagatgctcaccgtgtaaccacagtgtcgtctcatttccttgccctgtcccttccccaccctgctgagtcccaggtgccatcatcaccaccaccaccctgcccatcatgagtatttcat

SEQ ID NO: 40428 - DNA, 423 bp, Homo sapiens
gccagctagtgagtcaaggaagtgttaaggttatcgtcttatgctagatagagcctgggaaaggaggtgggtcttggaaatttgcggttcataacagggttgtctgtggggctggcagaaaggtagaatatgactctgtggatagagatcagggaaaaaataaagactgcagatttggggctgtatccatgtataggaaacatgagcctgacaaaaaatagagatgcagaatgagggaaggtgtggtcacttctgtaaaaatctttcaaacactgatttttgaacaattcattgctcttctgcagttgaaagaatcccaaaggaatgacacctgaatggaaaacctccaaagatcccttctggttggaggccctgggtctccaattgacccttcaaatatattattctgttcttttgtgcatt

SEQ ID NO: 40429 - DNA, 433 bp, Homo sapiens
gggattacaggcatgagccaccgcacccgtctggcttgctaatacttaactgtcagagttgagcatatcaactcccccagtgctgaacaacccaggcctatcctgtaaaacctaaaatatggaagacctgagaaggtgcatgtgctctgcaggcagaaaagcactgaagaggggaaggggctggctacgggtactcagttcttcctcccaaactcactgatccacgcgccttcatctctggggaggtagagaagacagccatatggagaaggcaattgttttcccaccccttcaaaagaatgtacatgggtgtgtttccatctgtgatatgctaaaatttaatctactctagatagatttttatattaaggaagagtaagcacattcctttataaacagaaacttgtagaattttatgctgcttcttcatagc

SEQ ID NO: 40430 - DNA, 157 bp, Homo sapiens
gggagaatgtatgctttattcattgagctctatagaacataccagcatttctctcatagccgagctgttttaaatattaaggtaaaatatataacacaggaagctcttcaagaaaggccaattgaagtgtagctgtttagagacaactcaagatgat

SEQ ID NO: 40431 - DNA, 2518 bp, Homo sapiens
ggaggctgtcactcagagacaggcagaatcaagagctggtcctggagagaccagtggggctgtgtagactgggagctttggttgtttgctgagagcaggaagctgcaggaagaaggcagtggtccccagccagaatacggagtggcttggaggtggtcaaaggtttgaagacagccacagtaaagtggacagagacaagaaaaataggtaccaaaccgtgcatccaggtagtcacagaaaggaaatgggtttagattgaagcaatgtgggttaaagttagaccctggggaaaccttgcaggggtctgtaggcctgtgaagaactggactaggtgagaagaagaagcttttgacccatgtcactccctggcccagaactatatcctacccacaggtgggttgagttcaggactgctgcttccagcccccagcagcaaggttcaagtgagagctgactcacctagggccccttgttagagcctcagagccaggtgaaaagccacacacaggctgggcgcgatggctcacgcctgtaatcccagcactttgggaggccgaggcaggtggatcacctgaggtcaggagttcaagaccatcctggccaacatggcaaaatcccgtctctactaaaaatacaaaaattagtcctgcctggtggcacatgcctgtagtcccagctactcgggaggctgaggcaggagaatcgcttgaacccgggaggcggaggctgcagtgagccgagatcatgccactgcactccagcctgggtgacagagcgggactctgtctccaaaaaaagaaaagccacacaggtgtgtgtgtaggggcaagggagtttcctactgtcttcctagcagaaaatggggagaaactgttaaagccagaatgagggagggctgtgtgtggcctgggactggcaacagaagtgtcaagctgccaggtttcaggccagtacagagcacggttctacctgggttatgtgttgccggcactaatggttagagacatctgtcactggtgagggcagaaatgtatgcaggagtgggtgtgggaagctggcctcactggtgggtggggttggagactttgccaggcctggtcaggaaaagctgctacaaaacagcaaaactgctcctagtgcagcgatccccaacctttttggcaacagggagtattttcctggaagaccatttttccatggagagggagggcggggctggtttcgggatggaagtgttccatctcccatcatcaggcattagtcaaactctcctaaggagcacacaaaacctacactcctggtgtgcacagttcacaggagggcttctgcttctgtgagaaccaaatgtcccactgatgtgacaggatcagagcgccatcgctgctcacttcctgcatgcggccctgttcctgacaggccacggaccagtacctggggtttggggtcccccgccctaggggatgaaagaagggaaacctgggtctaatgggttactgtgattctccctgcgatgcagggaagagacaggacagaggtgggaaggaacatggtcaccaggagtcgggacagcactcttccaggtccttcccctggggctgagtaagcaccctgcgcgtagctcttcctggccgcctgtgggctctgggatctaaacggactatgcagccattctcactttcattcacagctcggacagggacagtgtgtgttgaggcggaaagacaaaacatgtatgtgagagactttgtatgagccggttcctgatgaagtcctatctttcagcctcgtatttactgcccaggcagatggggctcttttcttcaccctcccgctttttttttttgagacagaaaacttaatagaaattttgtttgcagttcttacattctcagtgtgagccaatctgtgacccaccgccccacccagaagtggcccagtcctggtgcagggtaggaagggaagggtggagtgagaagagccccatttttcctcagtgccagggggctggagacaccacccccttctcctgcctctgggctccaggaaggagtgcagatggactctcaggcctatggttcctcctccacaccactgtcccccaggttggaggggagtgagagatacagggagagaaggggacagaggcaagaaaaggtgttgatcaagaaaggcaagaaccaggggtgagggctgacagagaatcaaagataaaacactagtaggccgggcgcggtggctcatgcctgtaatcccagcactttcgggagccaaggcgggcagatcacctgaggtcgggaattcgagaccagcctgaccaacatggagaaaccctgtctctactacaaatataaaattagccgggtgtggtggcacatgcctgtaatcccagctgctcaggaggctgaggcaggagaatcgcttgaacctgggaggcagagattgcagtgagccaagatcatgccactgcactccagcctgggcaacaagagcgaaactctgttggaaaaaaacaaacagt

SEQ ID NO: 40432 - DNA, 361 bp, Homo sapiens
gggattgtgactttgagcttgtgatccccagtattctggggagatgttgtgaaaggcccaagtgttccaggcaggagagctgagagagctgagtgtccatttttccttttgggacacagtccccaaacactgtttgtttctcactgccaagaggaactacacatggtcttccaatatccctgccatggcattaaagccaactgttctgtccccctgcccacagatggaggagtaggagagaaaagaaggccacaataactacatttcagtccgaattccaaatctttcttagagcttaagttggttgttatctccttgttcctgtttggataaggttttattttctaggcttcccttcttc

SEQ ID NO: 40433 - DNA, 1561 bp, Homo sapiens
ccagacagctgaagaaaggcggcaagcaggcatctgcctcctacgactcagaggaagaggaggagggcctgcccatgagctacgatgaaaagcgccagcttagcctggacatcaaccggctgcccggggagaagctgggccgggtagtgcacatcatccaatctcgggagccctcgctcagggactccaaccccgatgagatagaaattgactttgagactctgaaacccaccactttgcgggaactggagagatatgtcaagtcttgtttacagaaaaagcaaaggaaaccgttctcagcaagcgggaagaaacaggcagccaagtcgaaagaggagctagctcaggaaaagaagaaggagctggaaaagcgtctgcaggatgtcagcgggcagctgagcagcagcaagaagcccgcccggaaagagaagcccggctcagcaccctcagggggcccgtccaggctcagcagcagcagctcctccgagtctgggagcagcagctccagcgggtccagctctgacagcagtgactcagaatgaactggcttcggacagaacaggacagatggatgtcgcacacgccgagactctgccgtacccctctgtggttcatattactacttctgttccatggtgtgcaggtctgcttcttaattcagtgttatgatatcttccagtttttgctttcataggtcagagatctatcttgtgtgtgcgttagacttgatgagaaggtgtgaactctgcagaaagtctcttcttcatcactgaattcagtcacttggagatgacaacttcaaatgctaacccgatgaccccagaaaaccgtgtgagattcgtaccgaagaaccttgtggaatccctttgcttaggcccaacctggtcgatagctcgagaaagaattttttccaaggaaatgtctcggatatgggtactgtatttgaaagctgttagctttgtcaacacgcattgtccttgtcatttgggccccgagctctgaccctcgtgtctgacgcggccacctctttctggaggggctgaggacagatgtgcctgcttgtggagaccaggctgggcctaagcgaagggtcatcgcagccccagcccggagcgtggagcccttggggggtggtcgggtgggatgtgcgttctccgctcgtggtgatgtcaggagctcctcggagggaacagagcggctgtgtatgcagcctgcaggtttccatacactgaagcttttacctcaactttaaaaaaaaaaaagaagaaaagatttaaaaaaaaaaaaaaaggagactttttttgtaaggttcggcaattttctacggaagtccagcccgctgtgagtccccgcctggctagcgctgcccctgctgctgctgccgcgccacccttgggaaccacttcccgagcttatgtgtatataaatagttatttattaacatcattggtcatttttaaaaaaaagaaaataagaaaaaaccgcagaagaaatgcattcacacagtcgcagagatgcaggccttgccagtggtgtgccgggcgcgggtcctgtctggcgg

SEQ ID NO: 40434 - DNA, 1334 bp, Homo sapiens
ccagacagctgaagaaaggcggcaagcaggcatctgcctcctacgactcagaggaagaggaggagggcctgcccatgagctacgatgaaaagcgccagcttagcctggacatcaaccggctgcccggggagaagctgggccgggtagtgcacatcatccaatctcgggagccctcgctcagggactccaaccccgatgagatagaaattgactttgagactctgaaacccaccactttgcgggaactggagagatatgtcaagtcttgtttacagaaaaagcaaaggaaaccgttctcagcaagcgggaagaaacaggcagccaagtcgaaagaggagctagctcaggaaaagaagaaggagctggaaaagcgtctgcaggatgtcagcgggcagctgagcagcagcaagaagcccgcccggaaagagaagcccggctcagcaccctcagggggcccgtccaggctcagcagcagcagctcctccgagtctgggagcagcagctccagcgggtccagctctgacagcagtgactcagaatgaactggcttcggacagaacaggacagatggatgtcgcacacgccgagactctgccgtacccctctgtggttcatattactacttctgttccatggtgtgcaggtctgcttcttaattcagtgttatgatatcttccagtttttgctttcataggtcagagatctatcttgtgtgtgcgttagacttgatgagaaggtgtgaactctgcagaaagtctcttcttcatcactgaattcagtcacttggagatgacaacttcaaatgctaacccgatgaccccagaaaaccgtgtgagattcgtaccgaagaacctaagcgaagggtcatcgcagccccagcccggagcgtggagcccttggggggtggtcgggtgggatgtgcgttctccgctcgtggtgatgtcaggagctcctcggagggaacagagcggctgtgtatgcagcctgcaggtttccatacactgaagcttttacctcaactttaaaaaaaaaaaagaagaaaagatttaaaaaaaaaaaaaaaggagactttttttgtaaggttcggcaattttctacggaagtccagcccgctgtgagtccccgcctggctagcgctgcccctgctgctgctgccgcgccacccttgggaaccacttcccgagcttatgtgtatataaatagttatttattaacatcattggtcatttttaaaaaaaagaaaataagaaaaaaccgcagaagaaatgcattcacacagtcgcagagatgcaggccttgccagtggtgtgccgggcgcgggtcctgtctggcgg

SEQ ID NO: 40435 - DNA, 411 bp, Homo sapiens
agctacacaatgtattgtgtctatcatgttaaaacatgcattagacacaaatacaaaaaccatgaaacaagccaccattcttcaacaatttgagcaaagataaaatgcctaagtaacaacatggatgacttgcaaaggatgggctctttactttaagcaccataaaaaaaaaaagcacaaatggatgagtgtgttcagttatatacactgaattgaacctttggcactaggaatcagagtattttgtcatatagcattaacatgtattataaaagtgcgtagtgtcaaaggaatagaaccaccaacattcaaaagcagctttgtcaactaggcagtaaaacactctacagcatatcctctgttgtccatcattgaatacactggtagtgactttgaaattaaaaaaaaaaa

SEQ ID NO: 40436 - DNA, 527 bp, Homo sapiens
tccctgcaatgatcctatgagataagccactgctcatcaccccattgtacaactgcagaaactgagactcagggtggtcaagggccttgcccaaggtcaccttgctggttgggcagagagttgaaccccaacatctgaccctcccagagcccctgagctttactgtcacaccatgctgcctgcagaaacaaagttgtaaatgacaggtaatgaaaattaccccaccaaggcccagcctagattaattgggttttagggcccagcttccaaacccaaccaactgaagacactctggggtgacattaggcaccagtgaccagcttgcacactgatcccagagcctagccagctggagtaggtggctaacaaaagggtgtgggccctgagtagggtgattagagagagggagggggactctaatcagggaccccacatggcaacaggcaaaccttttgtcacatcatgccttcccctccccaggcactgagctcaggaaggtagacacagggctgctgaaatgccacatc

SEQ ID NO: 40437 - DNA, 447 bp, Homo sapiens
  misc_feature (12)..(12): n is a, c, g, or t
  misc_feature (43)..(43): n is a, c, g, or t
  misc_feature (64)..(64): n is a, c, g, or t
  misc_feature (70)..(70): n is a, c, g, or t
cggggttgaagntcccgaagaaaaccgtccccctaggccaatncccctccaggtgtggaaccanccatangagagtaccttaccaccaggcccctagaagggtaataagccccactacacatctaggctatgagcctgtatagcatgttagtgtactgaatactgtaggaaattgtaacacaatgatattcatgtatctatacatatttaaacatagaaaagttagttacagagtatatggttgtatagtcttatgggaccactgttgtatatgcaggttcattcgttattgatcaaaacatcattatgtggtgcttgactgtacctacaactatctggcagcttcattgtaaaaagtagcatttgaatgagacttgttggatgaataggaatttcccagagggacaaagtacaaggaatggtatttgtttaaaaaaagaaaaaaaa

SEQ ID NO: 40438 - DNA, 828 bp, Homo sapiens
cagtaatgtcctaggccttcgcattcactcacttattcacccagagcaacttccagtcctgcaagcgccattcatgataagtgccctatacaggtgtgccatttttaatgttttatactgtatttttgctgtatattttagatacagttgcctacagtatttagtacagtaacatgctgtacaggtttgtagcccaggagcaataggctgtatcacatagcataggtgtgtagcaagccataccatttaggtttgtgtgagtacaccgatattcccacaactataaagtcatccaaagacgcatgtctaaggatgtatcctcattaagcaacccatgactgtattttgagtttgaagttccaatggtacatctaaatggatctggaatgtgggaagagaatattcctgaactaaaaagaaggaaattagaagtcattttccatggaggtgatgattaaagctttgttaataggtgagattgccaaaaaagtcctagacgaataatagagttgtaaagaaaccttcaataacaaacaaggaggaaacagagaaatagttgaagatgtaaaagaaaaccaatttaggaggctgatgcagccggattacttgagctcaggagttcaagaactgccctgggcaacataatgagatcctgtctctacaaaaaatagaaaaattagatgggtacggtggcatatgcctgtgtcccaaatactcgtgatgctgaaatgggaggattgcttgagcccagggggttgacgctacattgagccatgattgcgccgctgcactccagcctaggcaacagagcaagactttgtctcaaaa

SEQ ID NO: 40439 - DNA, 358 bp, Homo sapiens
cctcccaaagtgctgggattagaggcgtgagccaccgtgcctggccttgagctacacttgtatcaagcactttgacacttactatcttattgataagtccttgagggggttgtcaagcagggactgtagggactgttcacactcaaatttcttccttttattgttttttgtttgtttattgtcttcttttacagcctctggggatataatctgtcatgggagcaccagcttctttttcttcttcctgttcagtattcattatctggaaggttcctttcttgcggtctttcctttttaaaggctgtagtaaaatgaggtacttagcctaaaagtttttctgactctaaggaaaaaaaaa

SEQ ID NO: 40440 - DNA, 2861 bp, Homo sapiens
aagccgaacaccatggccgtctggcttgcccagtggctgggccctctgctcttggtttccctctggggactcttggctccagcctcccttcttaggcgcctgggtgagcacattcagcagtttcaggagagctctgcccagggcctgggcctgagcctggggccaggtgctgcagccctcccaaaagtggggtggctggagcaactgctggaccccttcaacgtgtccgacagacgatccttcctacagcgttactgggtgaatgaccaacattgggttggccaggatggacccatattcctgcatctagggggtgagggcagccttgggcctggctcagtgatgagaggccatcccgcagccttggccccagcctggggcgccctggtgataagcctggaacacagattttatggcctgagtatacctgctggaggcctggaaatggcccagctccgcttcttgtccagccgccttgcgctggctgatgtggtctctgcccgcctggcactttcccgcctctttaacatctcctcctccagcccctggatctgcttcggaggctcctatgccggctccttggccgcctgggcccggctgaagttcccccatctcattttcgcgtcggtcgcctcctccgccccggtgcgggccgtgctggatttctccgagtataatgacgtggtatcccgaagcctaatgagcaccgcgatcggcgggtccctggagtgccgggcggcggtgtccgtcgccttcgctgaagtggagcggcggctgcgctcgggtggggcggctcaagcagcattgcggacggagctgagcgcttgcgggcccctgggccgcgctgaaaaccaggcggagctgttgggggcgctgcaggcactggtgggaggtgtagtgcagtatgatgggcagacgggagcgccgctaagcgtgcgacagctctgcggacttctcctcgggggcgggggcaaccgcagccactccacgccctactgcgggcttcgtcgggcggtgcagattgtcttgcacagcctgggccagaagtgtttaagcttttcccgagcagagacagtggcacagctgaggagcacagaacctcaactgtctggtgtgggtgaccggcagtggttgtatcagacatgtaccgagttcggcttctatgtcacctgtgagaatcccagatgtcctttctcccagctcccagcactgccctcccagctagacctatgtgagcaggtgtttgggctctcagccttgtcagtagcccaggctgtggctcagacgaactcctactacggtggccagacccctggggctaacaaagtgctgtttgttaatggggacacagacccctggcatgtgctaagtgtaacacaggctttaggatcctcagaatcaactcttcttatccgcactggctcccactgcttggacatggcacctgagaggccctcagactcccccagcctccgcctagggcgccagaacatcttccagcagctacagacctggctcaagctggcaaaggagagccagattaagggtgaagtctgaatctcataccctttccactccctgcatggtcacctcagtcctggacatacttgttcactgaacaaaagaaagcagcttgttttgaaagaagaaactcccaggaattggaattcagcacctgttccgcacgtaattggcatgtgtctgcaaacatccttattcccaacttaaagtgctttattgcagagagttatggaaatataagtggatgattattctcattgtaaatattggtattttgaatgttaaatgtcaaacaaatgtgacttatgctggtgccctcgccctgctgatcagattctggttcaaattctgccactccagctcctgggttaggggctttgctgtaagtttctttttctggactttagatcctgaacctgtccttgcttctcagtttctctcactgtacccctttccctcagtctcttcctctctctttcccctgtcactatttgtctttctaatctccttctgtttctctgaatatcttcatttctatctctgtgtttctgtctatttctctgtttatctttctgtccttcaatctgtgtttttgtttctggctctccgtcagtgtctttttctctcctctctctcttgctctgccatggctatttccactgctctatttctgactctcatttttggtctctgtgtgtctcctagtcactttctttctcactctgtctctgtctctatttctgtctctcctctgctgtgtcctcaatctctctgtctccctgaggctctatttctgtctctcctctgctgtgtcctcaatctctctgtctccctgaggctctatttctgtctctgatgctcttcttctgtgtctctatttctcttcctgtcacttaatcttttccttctctatctctcttatttagtcttccttccacacccttcactcaccatcttttcccacaatcaaatatcactccctggtacttccagcttccaactctagggattcatgattctggtggagattccttcttccagggcctgggaggatagggctaatcccaagggtgcctgcttaggctatgttagctgtgacaggaacctgccatagatttgcactgttctttcctaaagatcaattattttcagcaataaatacttctcagctttttgtatgtctttgtatgcacagagatggtagttttagagttttatccagtttcatatttccttgtgggtaagaggcaacctcctcatgctgtcataccaaagtcaatctccactacactttagttctgcctgttcttgatctttatataaatggaaacttgcagtat

SEQ ID NO: 40441 - DNA, 1722 bp, Homo sapiens
agggaaaagaggcctcggatgccagggaagaggaggccagagaagggcgaaacctgcaacgtggcggggtctaaggaaggtcggagctcgggggaatacgcaggttttggaagaaggcgggagctgacgaagaggaggggcaccaggaaaagaggcgctccccagagagggcggggtttgggcagggacaatcctatccggaggggacacagacccctggcatgtgctaagtgtaacacaggctttaggatcctcagaatcaactcttcttatccgcactggctcccactgcttggacatggcacctgagaggccctcagactcccccagcctccgcctagggcgccagaacatcttccagcagctacagacctggctcaagctggcaaaggagagccagattaagggtgaagtctgaatctcataccctttccactccctgcatggtcacctcagtcctggacatacttgttcactgaacaaaagaaagcagcttgttttgaaagaagaaactcccaggaattggaattcagcacctgttccgcacgtaattggcatgtgtctgcaaacatccttattcccaacttaaagtgctttattgcagagagttatggaaatataagtggatgattattctcattgtaaatattggtattttgaatgttaaatgtcaaacaaatgtgacttatgctggtgccctcgccctgctgatcagattctggttcaaattctgccactccagctcctgggttaggggctttgctgtaagtttctttttctggactttagatcctgaacctgtccttgcttctcagtttctctcactgtacccctttccctcagtctcttcctctctctttcccctgtcactatttgtctttctaatctccttctgtttctctgaatatcttcatttctatctctgtgtttctgtctatttctctgtttatctttctgtccttcaatctgtgtttttgtttctggctctccgtcagtgtctttttctctcctctctctcttgctctgccatggctatttccactgctctatttctgactctcatttttggtctctgtgtgtctcctagtcactttctttctcactctgtctctgtctctatttctgtctctcctctgctgtgtcctcaatctctctgtctccctgaggctctatttctgtctctcctctgctgtgtcctcaatctctctgtctccctgaggctctatttctgtctctgatgctcttcttctgtgtctctatttctcttcctgtcacttaatcttttccttctctatctctcttatttagtcttccttccacacccttcactcaccatcttttcccacaatcaaatatcactccctggtacttccagcttccaactctagggattcatgattctggtggagattccttcttccagggcctgggaggatagggctaatcccaagggtgcctgcttaggctatgttagctgtgacaggaacctgccatagatttgcactgttctttcctaaagatcaattattttcagcaataaatacttctcagctttttgtatgtctttgtatgcacagagatggtagttttagagttttatccagtttcatatttccttgtgggtaagaggcaacctcctcatgctgtcataccaaagtcaatctccactacactttagttctgcctgttcttgatctttatataaatggaaacttgcagtat

SEQ ID NO: 40442 - DNA, 2250 bp, Homo sapiens
tgcaccctctgagtcccgctaggggaaagtggggaacccaaggaggacgcaggtcctgggtagggaaagccgaggcccagcctaagtcttggcggacatcgcctcttgcttcccacagtgccgggcggcggtgtccgtcgccttcgctgaagtggagcggcggctgcgctcgggtggggcggctcaagcagcattgcggacggagctgagcgcttgcgggcccctgggccgcgctgaaaaccaggcggagctgttgggggcgctgcaggcactggtgggaggtgtagtgcagtatgatgggcagacgggagcgccgctaagcgtgcgacagctctgcggacttctcctcgggggcgggggcaaccgcagccactccacgccctactgcgggcttcgtcgggcggtgcagattgtcttgcacagcctgggccagaagtgtttaagcttttcccgagcagagacagtggcacagctgaggagcacagaacctcaactgtctggtgtgggtgaccggcagtggttgtatcagacatgtaccgagttcggcttctatgtcacctgtgagaatcccagatgtcctttctcccagctcccagcactgccctcccagctagacctatgtgagcaggtgtttgggctctcagccttgtcagtagcccaggctgtggctcagacgaactcctactacggtggccagacccctggggctaacaaagtgctgtttgttaatggggacacagacccctggcatgtgctaagtgtaacacaggctttaggatcctcagaatcaactcttcttatccgcactggctcccactgcttggacatggcacctgagaggccctcagactcccccagcctccgcctagggcgccagaacatcttccagcagctacagacctggctcaagctggcaaaggagagccagattaagggtgaagtctgaatctcataccctttccactccctgcatggtcacctcagtcctggacatacttgttcactgaacaaaagaaagcagcttgttttgaaagaagaaactcccaggaattggaattcagcacctgttccgcacgtaattggcatgtgtctgcaaacatccttattcccaacttaaagtgctttattgcagagagttatggaaatataagtggatgattattctcattgtaaatattggtattttgaatgttaaatgtcaaacaaatgtgacttatgctggtgccctcgccctgctgatcagattctggttcaaattctgccactccagctcctgggttaggggctttgctgtaagtttctttttctggactttagatcctgaacctgtccttgcttctcagtttctctcactgtacccctttccctcagtctcttcctctctctttcccctgtcactatttgtctttctaatctccttctgtttctctgaatatcttcatttctatctctgtgtttctgtctatttctctgtttatctttctgtccttcaatctgtgtttttgtttctggctctccgtcagtgtctttttctctcctctctctcttgctctgccatggctatttccactgctctatttctgactctcatttttggtctctgtgtgtctcctagtcactttctttctcactctgtctctgtctctatttctgtctctcctctgctgtgtcctcaatctctctgtctccctgaggctctatttctgtctctcctctgctgtgtcctcaatctctctgtctccctgaggctctatttctgtctctgatgctcttcttctgtgtctctatttctcttcctgtcacttaatcttttccttctctatctctcttatttagtcttccttccacacccttcactcaccatcttttcccacaatcaaatatcactccctggtacttccagcttccaactctagggattcatgattctggtggagattccttcttccagggcctgggaggatagggctaatcccaagggtgcctgcttaggctatgttagctgtgacaggaacctgccatagatttgcactgttctttcctaaagatcaattattttcagcaataaatacttctcagctttttgtatgtctttgtatgcacagagatggtagttttagagttttatccagtttcatatttccttgtgggtaagaggcaacctcctcatgctgtcataccaaagtcaatctccactacactttagttctgcctgttcttgatctttatataaatggaaacttgcagtat

SEQ ID NO: 40443 - DNA, 2667 bp, Homo sapiens
aagccgaacaccatggccgtctggcttgcccagtggctgggccctctgctcttggtttccctctggggactcttggctccagcctcccttcttaggcgcctgggtgagcacattcagcagtttcaggagagctctgcccagggcctgggcctgagcctggggccaggtgctgcagccctcccaaaagtggggtggctggagcaactgctggaccccttcaacgtgtccgacagacgatccttcctacagcgttactgggtgaatgaccaacattgggttggccaggatggacccatattcctgcatctagggggtgagggcagccttgggcctggctcagtgatgagaggccatcccgcagccttggccccagcctggggcgccctggtgataagcctggaacacagattttatggcctgagtatacctgctggaggcctggaaatggcccagctccgcttcttgtccagccgccttgcgctggctgatgtggtctctgcccgcctggcactttcccgcctctttaacatctcctcctccagcccctggatctgcttcggaggctcctatgccggctccttggccgcctgggcccggctgaagttcccccatctcattttcgcgtcggtcgcctcctccgccccggtgcgggccgtgctggatttctccgagtataatgacgtaaggatggcgggcagcaggtgcgggacggggaggggtcccagcgggcggagtcccttgacacttccggataccttcctctgcggtccgcccacaggtggtatcccgaagcctaatgagcaccgcgatcggcgggtccctggagattgtcttgcacagcctgggccagaagtgtttaagcttttcccgagcagagacagtggcacagctgaggagcacagaacctcaactgtctggtgtgggtgaccggcagtggttgtatcagacatgtaccgagttcggcttctatgtcacctgtgagaatcccagatgtcctttctcccagctcccagcactgccctcccagctagacctatgtgagcaggtgtttgggctctcagccttgtcagtagcccaggctgtggctcagacgaactcctactacggtggccagacccctggggctaacaaagtgctgtttgttaatggggacacagacccctggcatgtgctaagtgtaacacaggctttaggatcctcagaatcaactcttcttatccgcactggctcccactgcttggacatggcacctgagaggccctcagactcccccagcctccgcctagggcgccagaacatcttccagcagctacagacctggctcaagctggcaaaggagagccagattaagggtgaagtctgaatctcataccctttccactccctgcatggtcacctcagtcctggacatacttgttcactgaacaaaagaaagcagcttgttttgaaagaagaaactcccaggaattggaattcagcacctgttccgcacgtaattggcatgtgtctgcaaacatccttattcccaacttaaagtgctttattgcagagagttatggaaatataagtggatgattattctcattgtaaatattggtattttgaatgttaaatgtcaaacaaatgtgacttatgctggtgccctcgccctgctgatcagattctggttcaaattctgccactccagctcctgggttaggggctttgctgtaagtttctttttctggactttagatcctgaacctgtccttgcttctcagtttctctcactgtacccctttccctcagtctcttcctctctctttcccctgtcactatttgtctttctaatctccttctgtttctctgaatatcttcatttctatctctgtgtttctgtctatttctctgtttatctttctgtccttcaatctgtgtttttgtttctggctctccgtcagtgtctttttctctcctctctctcttgctctgccatggctatttccactgctctatttctgactctcatttttggtctctgtgtgtctcctagtcactttctttctcactctgtctctgtctctatttctgtctctcctctgctgtgtcctcaatctctctgtctccctgaggctctatttctgtctctcctctgctgtgtcctcaatctctctgtctccctgaggctctatttctgtctctgatgctcttcttctgtgtctctatttctcttcctgtcacttaatcttttccttctctatctctcttatttagtcttccttccacacccttcactcaccatcttttcccacaatcaaatatcactccctggtacttccagcttccaactctagggattcatgattctggtggagattccttcttccagggcctgggaggatagggctaatcccaagggtgcctgcttaggctatgttagctgtgacaggaacctgccatagatttgcactgttctttcctaaagatcaattattttcagcaataaatacttctcagctttttgtatgtctttgtatgcacagagatggtagttttagagttttatccagtttcatatttccttgtgggtaagaggcaacctcctcatgctgtcataccaaagtcaatctccactacactttagttctgcctgttcttgatctttatataaatggaaacttgcagtat

SEQ ID NO: 40444 - DNA, 2763 bp, Homo sapiens
aagccgaacaccatggccgtctggcttgcccagtggctgggccctctgctcttggtttccctctggggactcttggctccagcctcccttcttaggcgcctgggtgagcacattcagcagtttcaggagagctctgcccagggcctgggcctgagcctggggccaggtgctgcagccctcccaaaagtggggtggctggagcaactgctggaccccttcaacgtgtccgacagacgatccttcctacagcgttactgggtgaatgaccaacattgggttggccaggatggacccatattcctgcatctagggggtgagggcagccttgggcctggctcagtgatgagaggccatcccgcagccttggccccagcctggggcgccctggtgataagcctggaacacagattttatggcctgagtatacctgctggaggcctggaaatggcccagctccgcttcttgtccagccgccttgcgctggctgatgtggtctctgcccgcctggcactttcccgcctctttaacatctcctcctccagcccctggatctgcttcggaggctcctatgccggctccttggccgcctgggcccggctgaagttcccccatctcattttcgcgtcggtcgcctcctccgccccggtgcgggccgtgctggatttctccgagtataatgacgtaaggatggcgggcagcaggtgcgggacggggaggggtcccagcgggcggagtcccttgacacttccggataccttcctctgcggtccgcccacaggtggtatcccgaagcctaatgagcaccgcgatcggcgggtccctggagtgccgggcggcggtgtccgtcgccttcgctgaagtggagcggcggctgcgctcgggtggggcggctcaagcagcattgcggacggagctgagcgcttgcgggcccctgggccgcgctgaaaaccaggcggagctgttgggggcgctgcaggcactggtgggaggtgtagtgcagtatgatgggcagacgggagcgccgctaagcgtgcgacagctctgcggacttctcctcgggggcgggggcaaccgcagccactccacgccctactgcgggcttcgtcgggcggtgcagattgtcttgcacagcctgggccagaagtgtttaagcttttcccgagcagagacagtggcacagctgaggagcacagaacctcaactgtctggtgtgggtgaccggcagtggttgtatcagacatgtaccgagttcggcttctgggacacagacccctggcatgtgctaagtgtaacacaggctttaggatcctcagaatcaactcttcttatccgcactggctcccactgcttggacatggcacctgagaggccctcagactcccccagcctccgcctagggcgccagaacatcttccagcagctacagacctggctcaagctggcaaagggtgaagtctgaatctcataccctttccactccctgcatggtcacctcagtcctggacatacttgttcactgaacaaaagaaagcagcttgttttgaaagaagaaactcccaggaattggaattcagcacctgttccgcacgtaattggcatgtgtctgcaaacatccttattcccaacttaaagtgctttattgcagagagttatggaaatataagtggatgattattctcattgtaaatattggtattttgaatgttaaatgtcaaacaaatgtgacttatgctggtgccctcgccctgctgatcagattctggttcaaattctgccactccagctcctgggttaggggctttgctgtaagtttctttttctggactttagatcctgaacctgtccttgcttctcagtttctctcactgtacccctttccctcagtctcttcctctctctttcccctgtcactatttgtctttctaatctccttctgtttctctgaatatcttcatttctatctctgtgtttctgtctatttctctgtttatctttctgtccttcaatctgtgtttttgtttctggctctccgtcagtgtctttttctctcctctctctcttgctctgccatggctatttccactgctctatttctgactctcatttttggtctctgtgtgtctcctagtcactttctttctcactctgtctctgtctctatttctgtctctcctctgctgtgtcctcaatctctctgtctccctgaggctctatttctgtctctcctctgctgtgtcctcaatctctctgtctccctgaggctctatttctgtctctgatgctcttcttctgtgtctctatttctcttcctgtcacttaatcttttccttctctatctctcttatttagtcttccttccacacccttcactcaccatcttttcccacaatcaaatatcactccctggtacttccagcttccaactctagggattcatgattctggtggagattccttcttccagggcctgggaggatagggctaatcccaagggtgcctgcttaggctatgttagctgtgacaggaacctgccatagatttgcactgttctttcctaaagatcaattattttcagcaataaatacttctcagctttttgtatgtctttgtatgcacagagatggtagttttagagttttatccagtttcatatttccttgtgggtaagaggcaacctcctcatgctgtcataccaaagtcaatctccactacactttagttctgcctgttcttgatctttatataaatggaaacttgcagtat

SEQ ID NO: 40445 - DNA, 2345 bp, Homo sapiens
aagccgaacaccatggccgtctggcttgcccagtggctgggccctctgctcttggtttccctctggggactcttggctccagcctcccttcttaggcgcctgggtgagcacattcagcagtttcaggagagctctgcccagggcctgggcctgagcctggggccaggtgctgcagccctcccaaaagtggggtggctggagcaactgctggaccccttcaacgtgtccgacagacgatccttcctacagcgttactgggtgaatgaccaacattgggttggccaggatggacccatattcctgcatctagggggtgagggcagccttgggcctggctcagtgatgagaggccatcccgcagccttggccccagcctggggcgccctggtgataagcctggaacacagattttatggcctgagtatacctgctggaggcctggaaatggcccagctccgcttcttgtccagccgccttgcgctggctgatgtggtctctgcccgcctggcactttcccgcctctttaacatctcctcctccagcccctggatctgcttcggaggctcctatgccggctccttggccgcctgggcccggctgaagttcccccatctcattttcgcgtcggtcgcctcctccgccccggtgcgggccgtgctggatttctccgagtataatgacgtaaggatggcgggcagcaggtgcgggacggggaggggtcccagcgggcggagtcccttgacacttccggataccttcctctgcggtccgcccacaggtggtatcccgaagcctaatgagcaccgcgatcggcgggtccctggaggggacacagacccctggcatgtgctaagtgtaacacaggctttaggatcctcagaatcaactcttcttatccgcactggctcccactgcttggacatggcacctgagaggccctcagactcccccagcctccgcctagggcgccagaacatcttccagcagctacagacctggctcaagctggcaaaggagagccagattaagggtgaagtctgaatctcataccctttccactccctgcatggtcacctcagtcctggacatacttgttcactgaacaaaagaaagcagcttgttttgaaagaagaaactcccaggaattggaattcagcacctgttccgcacgtaattggcatgtgtctgcaaacatccttattcccaacttaaagtgctttattgcagagagttatggaaatataagtggatgattattctcattgtaaatattggtattttgaatgttaaatgtcaaacaaatgtgacttatgctggtgccctcgccctgctgatcagattctggttcaaattctgccactccagctcctgggttaggggctttgctgtaagtttctttttctggactttagatcctgaacctgtccttgcttctcagtttctctcactgtacccctttccctcagtctcttcctctctctttcccctgtcactatttgtctttctaatctccttctgtttctctgaatatcttcatttctatctctgtgtttctgtctatttctctgtttatctttctgtccttcaatctgtgtttttgtttctggctctccgtcagtgtctttttctctcctctctctcttgctctgccatggctatttccactgctctatttctgactctcatttttggtctctgtgtgtctcctagtcactttctttctcactctgtctctgtctctatttctgtctctcctctgctgtgtcctcaatctctctgtctccctgaggctctatttctgtctctcctctgctgtgtcctcaatctctctgtctccctgaggctctatttctgtctctgatgctcttcttctgtgtctctatttctcttcctgtcacttaatcttttccttctctatctctcttatttagtcttccttccacacccttcactcaccatcttttcccacaatcaaatatcactccctggtacttccagcttccaactctagggattcatgattctggtggagattccttcttccagggcctgggaggatagggctaatcccaagggtgcctgcttaggctatgttagctgtgacaggaacctgccatagatttgcactgttctttcctaaagatcaattattttcagcaataaatacttctcagctttttgtatgtctttgtatgcacagagatggtagttttagagttttatccagtttcatatttccttgtgggtaagaggcaacctcctcatgctgtcataccaaagtcaatctccactacactttagttctgcctgttcttgatctttatataaatggaaacttgcagtat

SEQ ID NO: 40446 - DNA, 1547 bp, Homo sapiens
  misc_feature (64)..(64): n is a, c, g, or t
gcagaggcgaagctaagacacggatcggcggcctggagggcaaagacctggaagctaaggtaantagctttaggatcctcagaatcaactcttcttatccgcactggctcccactgcttggacatggcacctgagaggccctcagactcccccagcctccgcctagggcgccagaacatcttccagcagctacagacctggctcaagctggcaaaggagagccagattaagggtgaagtctgaatctcataccctttccactccctgcatggtcacctcagtcctggacatacttgttcactgaacaaaagaaagcagcttgttttgaaagaagaaactcccaggaattggaattcagcacctgttccgcacgtaattggcatgtgtctgcaaacatccttattcccaacttaaagtgctttattgcagagagttatggaaatataagtggatgattattctcattgtaaatattggtattttgaatgttaaatgtcaaacaaatgtgacttatgctggtgccctcgccctgctgatcagattctggttcaaattctgccactccagctcctgggttaggggctttgctgtaagtttctttttctggactttagatcctgaacctgtccttgcttctcagtttctctcactgtacccctttccctcagtctcttcctctctctttcccctgtcactatttgtctttctaatctccttctgtttctctgaatatcttcatttctatctctgtgtttctgtctatttctctgtttatctttctgtccttcaatctgtgtttttgtttctggctctccgtcagtgtctttttctctcctctctctcttgctctgccatggctatttccactgctctatttctgactctcatttttggtctctgtgtgtctcctagtcactttctttctcactctgtctctgtctctatttctgtctctcctctgctgtgtcctcaatctctctgtctccctgaggctctatttctgtctctcctctgctgtgtcctcaatctctctgtctccctgaggctctatttctgtctctgatgctcttcttctgtgtctctatttctcttcctgtcacttaatcttttccttctctatctctcttatttagtcttccttccacacccttcactcaccatcttttcccacaatcaaatatcactccctggtacttccagcttccaactctagggattcatgattctggtggagattccttcttccagggcctgggaggatagggctaatcccaagggtgcctgcttaggctatgttagctgtgacaggaacctgccatagatttgcactgttctttcctaaagatcaattattttcagcaataaatacttctcagctttttgtatgtctttgtatgcacagagatggtagttttagagttttatccagtttcatatttccttgtgggtaagaggcaacctcctcatgctgtcataccaaagtcaatctccactacactttagttctgcctgttcttgatctttatataaatggaaacttgcagtat

SEQ ID NO: 40447 - DNA, 1000 bp, Homo sapiens
tgcaccctctgagtcccgctaggggaaagtggggaacccaaggaggacgcaggtcctgggtagggaaagccgaggcccagcctaagtcttggcggacatcgcctcttgcttcccacagtgccgggcggcggtgtccgtcgccttcgctgaagtggagcggcggctgcgctcgggtggggcggctcaagcagcattgcggacggagctgagcgcttgcgggcccctgggccgcgctgaaaaccaggcggagctgttgggggcgctgcaggcactggtgggaggtgtagtgcagtatgatgggcagacgggagcgccgctaagcgtgcgacagctctgcggacttctcctcgggggcgggggcaaccgcagccactccacgccctactgcgggcttcgtcgggcggtgcagattgtcttgcacagcctgggccagaagtgtttaagcttttcccgagcagagacagtggcacagctgaggagcacagaacctcaactgtctggtgtgggtgaccggcagtggttgtatcagacatgtaccgagttcggcttctgtaagtgactggcctaaccctaactttgtcccctcaaacaacctttttactatgcccagagaagtcatcttacaggtggtctggactcatttcgacccagctctcaggcactgtgtaacctgcagatgttgggctggagaaggtggaagccatactagtgtatgcatgtgcttggccctcacatgcctcctcacgcacacactgaggtctccacttgagtgatcttcccttcagcctattctttctctgtgtccccattccagggatggccccctttccccatccaccagactagaaacttgagccttgttttagttgcttccttcccattttctagctagcctgtcaattactgagtcctcctcactctgcatggacaactctgtagtccatcccttgtgctttctatgcctacctctgctgtcctgctgggaacctccattctttct

SEQ ID NO: 40448 - DNA, 1020 bp, Homo sapiens
agggaaaagaggcctcggatgccagggaagaggaggccagagaagggcgaaacctgcaacgtggcggggtctaaggaaggtcggagctcgggggaatacgcaggttttggaagaaggcgggagctgacgaagaggaggggcaccaggaaaagaggcgctccccagagagggcggggtttgggcagggacaatcctatccggagattgtcttgcacagcctgggccagaagtgtttaagcttttcccgagcagagacagtggcacagctgaggagcacagaacctcaactgtctggtgtgggtgaccggcagtggttgtatcagacatgtaccgagttcggcttctatgtcacctgtgagaatcccagatgtcctttctcccagctcccagcactgccctcccagctagacctatgtgagcaggtgtttgggctctcagccttgtcagtagcccaggctgtggctcagacgaactcctactacggtggccagacccctggggctaacaaagtgctgtttgttaatggggacacagacccctggcatgtgctaagtgtaacacaggctttaggatcctcagaatcaactcttcttatccgcactggctcccactgcttggacatggcacctgagaggccctcagactcccccagcctccgcctagggcgccagacatctttccagaagtacagaactgggtaaagctggcaagaggaggccgataaagggggaaactgaattcaaacccttgtcaatcccggggtggggtcaccttaggtctgggacatctgggtgcacgtgtaaatagaaagaaaggttggtttgggagaaaaaaaaatcccgaggatggtggattatacatgtgtccaggaggtaatagacaggtgtgaaaaatctttttttcgagctaagggcgttgttggaaagatgtgaaatacgacgagagttgatagtgaatgtaatgtgtgagtaatggtaaagtagataattatgtcaagggggagtatattagattatagac

SEQ ID NO: 40449 - DNA, 2235 bp, Homo sapiens
tgcaccctctgagtcccgctaggggaaagtggggaacccaaggaggacgcaggtcctgggtagggaaagccgaggcccagcctaagtcttggcggacatcgcctcttgcttcccacagtgccgggcggcggtgtccgtcgccttcgctgaagtggagcggcggctgcgctcgggtggggcggctcaagcagcattgcggacggagctgagcgcttgcgggcccctgggccgcgctgaaaaccaggcggagctgttgggggcgctgcaggcactggtgggaggtgtagtgcagtatgatgggcagacgggagcgccgctaagcgtgcgacagctctgcggacttctcctcgggggcgggggcaaccgcagccactccacgccctactgcgggcttcgtcgggcggtgcagattgtcttgcacagcctgggccagaagtgtttaagcttttcccgagcagagacagtggcacagctgaggagcacagaacctcaactgtctggtgtgggtgaccggcagtggttgtatcagacatgtaccgagttcggcttctatgtcacctgtgagaatcccagatgtcctttctcccagctcccagcactgccctcccagctagacctatgtgagcaggtgtttgggctctcagccttgtcagtagcccaggctgtggctcagacgaactcctactacggtggccagacccctggggctaacaaagtgctgtttgttaatggggacacagacccctggcatgtgctaagtgtaacacaggctttaggatcctcagaatcaactcttcttatccgcactggctcccactgcttggacatggcacctgagaggccctcagactcccccagcctccgcctagggcgccagaacatcttccagcagctacagacctggctcaagctggcaaagggtgaagtctgaatctcataccctttccactccctgcatggtcacctcagtcctggacatacttgttcactgaacaaaagaaagcagcttgttttgaaagaagaaactcccaggaattggaattcagcacctgttccgcacgtaattggcatgtgtctgcaaacatccttattcccaacttaaagtgctttattgcagagagttatggaaatataagtggatgattattctcattgtaaatattggtattttgaatgttaaatgtcaaacaaatgtgacttatgctggtgccctcgccctgctgatcagattctggttcaaattctgccactccagctcctgggttaggggctttgctgtaagtttctttttctggactttagatcctgaacctgtccttgcttctcagtttctctcactgtacccctttccctcagtctcttcctctctctttcccctgtcactatttgtctttctaatctccttctgtttctctgaatatcttcatttctatctctgtgtttctgtctatttctctgtttatctttctgtccttcaatctgtgtttttgtttctggctctccgtcagtgtctttttctctcctctctctcttgctctgccatggctatttccactgctctatttctgactctcatttttggtctctgtgtgtctcctagtcactttctttctcactctgtctctgtctctatttctgtctctcctctgctgtgtcctcaatctctctgtctccctgaggctctatttctgtctctcctctgctgtgtcctcaatctctctgtctccctgaggctctatttctgtctctgatgctcttcttctgtgtctctatttctcttcctgtcacttaatcttttccttctctatctctcttatttagtcttccttccacacccttcactcaccatcttttcccacaatcaaatatcactccctggtacttccagcttccaactctagggattcatgattctggtggagattccttcttccagggcctgggaggatagggctaatcccaagggtgcctgcttaggctatgttagctgtgacaggaacctgccatagatttgcactgttctttcctaaagatcaattattttcagcaataaatacttctcagctttttgtatgtctttgtatgcacagagatggtagttttagagttttatccagtttcatatttccttgtgggtaagaggcaacctcctcatgctgtcataccaaagtcaatctccactacactttagttctgcctgttcttgatctttatataaatggaaacttgcagtat

SEQ ID NO: 40450 - DNA, 2487 bp, Homo sapiens
aagccgaacaccatggccgtctggcttgcccagtggctgggccctctgctcttggtttccctctggggactcttggctccagcctcccttcttaggcgcctgggtgagcacattcagcagtttcaggagagctctgcccagggcctgggcctgagcctggggccaggtgctgcagccctcccaaaagtggggtggctggagcaactgctggaccccttcaacgtgtccgacagacgatccttcctacagcgttactgggtgaatgaccaacattgggttggccaggatggacccatattcctgcatctagggggtgagggcagccttgggcctggctcagtgatgagaggccatcccgcagccttggccccagcctggggcgccctggtgataagcctggaacacagattttatggcctgagtatacctgctggaggcctggaaatggcccagctccgcttcttgtccagccgccttgcgctggctgatgtggtctctgcccgcctggcactttcccgcctctttaacatctcctcctccagcccctggatctgcttcggaggctcctatgccggctccttggccgcctgggcccggctgaagttcccccatctcattttcgcgtcggtcgcctcctccgccccggtgcgggccgtgctggatttctccgagtataatgacgtaaggatggcgggcagcaggtgcgggacggggaggggtcccagcgggcggagtcccttgacacttccggataccttcctctgcggtccgcccacaggtggtatcccgaagcctaatgagcaccgcgatcggcgggtccctggagattgtcttgcacagcctgggccagaagtgtttaagcttttcccgagcagagacagtggcacagctgaggagcacagaacctcaactgtctggtgtgggtgaccggcagtggttgtatcagacatgtaccgagttcggcttctgggacacagacccctggcatgtgctaagtgtaacacaggctttaggatcctcagaatcaactcttcttatccgcactggctcccactgcttggacatggcacctgagaggccctcagactcccccagcctccgcctagggcgccagaacatcttccagcagctacagacctggctcaagctggcaaaggagagccagattaagggtgaagtctgaatctcataccctttccactccctgcatggtcacctcagtcctggacatacttgttcactgaacaaaagaaagcagcttgttttgaaagaagaaactcccaggaattggaattcagcacctgttccgcacgtaattggcatgtgtctgcaaacatccttattcccaacttaaagtgctttattgcagagagttatggaaatataagtggatgattattctcattgtaaatattggtattttgaatgttaaatgtcaaacaaatgtgacttatgctggtgccctcgccctgctgatcagattctggttcaaattctgccactccagctcctgggttaggggctttgctgtaagtttctttttctggactttagatcctgaacctgtccttgcttctcagtttctctcactgtacccctttccctcagtctcttcctctctctttcccctgtcactatttgtctttctaatctccttctgtttctctgaatatcttcatttctatctctgtgtttctgtctatttctctgtttatctttctgtccttcaatctgtgtttttgtttctggctctccgtcagtgtctttttctctcctctctctcttgctctgccatggctatttccactgctctatttctgactctcatttttggtctctgtgtgtctcctagtcactttctttctcactctgtctctgtctctatttctgtctctcctctgctgtgtcctcaatctctctgtctccctgaggctctatttctgtctctcctctgctgtgtcctcaatctctctgtctccctgaggctctatttctgtctctgatgctcttcttctgtgtctctatttctcttcctgtcacttaatcttttccttctctatctctcttatttagtcttccttccacacccttcactcaccatcttttcccacaatcaaatatcactccctggtacttccagcttccaactctagggattcatgattctggtggagattccttcttccagggcctgggaggatagggctaatcccaagggtgcctgcttaggctatgttagctgtgacaggaacctgccatagatttgcactgttctttcctaaagatcaattattttcagcaataaatacttctcagctttttgtatgtctttgtatgcacagagatggtagttttagagttttatccagtttcatatttccttgtgggtaagaggcaacctcctcatgctgtcataccaaagtcaatctccactacactttagttctgcctgttcttgatctttatataaatggaaacttgcagtat

SEQ ID NO: 40451 - DNA, 386 bp, Homo sapiens
cactgcccttactagccatgtgatcttgggaaaactacttaaaacctctctgagcctgtttccccatctctaaaacgggcttaatccagagtatctaccccataggttggttgtgagaattaaataagctcttacatgtaaagcagagtgttttggcacacagtgtgcagtgttagttggtattatcatcttcagggcatctctaggggacgaactccaaaagccatgggtgcgtgtgtgtgtgtgtacatgtgtgtacacacgtgtgtttgcacacacattcacgcacgtgtatatgtgtgttcatggcatacagaagtctccttgcttctttttctctctccagagatttaattatcaccttcttttttaaagagaaaactagg

SEQ ID NO: 40452 - DNA, 509 bp, Homo sapiens
ctaagtctactctggaccatgagcaaggataatctgtcttagaggagagaaggtgaggttatgattccagagcatttggtgacccaggaagtagacctgcctcctcctatctgtccacagagcagtcctaggggcaataggccatgagaagatcatgccaggcagtccatttctatattaccatgtaaacaaaaactcagctgtgaaccctggaacgttcgtattctgcagctgccagtgtaaactggtacaggcctcttgaagaacagtggggaaaggcactctgaaagcatccacgcctccatacctgctgatccagggctctgattttccttctgggaaccaagcctaggagaatgattcaagctgcagaaaacctttctccactaagatgtttgctgtggcattcagtataatagcacaccagagaaacaatctaaagattcatcagtaggagaatatctaagtaaattatggtacatacactcaataaaatgttatatgactac

SEQ ID NO: 40453 - DNA, 480 bp, Homo sapiens
tagtctgtgatcttcctttgcagaatcacctggcatattttagactataatcataaatcataatatgccacttactataaaaaaaaagacagaggacattaaagtttgaacccagtgcttttcctatagactataaaatggacactgaaagttaatgtgctctattattattcctaccgttttataaaatagatttggctgccctgaacatttgtcaatttaaatgaatgaataataataaaagtaaaatgaaaatacagttaaatagatacaatgacccaagatcctcttgagtacaagcataactttgtattgaaaaggtaaaatggaccaatagaccaaagctttatcattggttctatttttacttgtcaacagagcccttaagaagggactgtgagtagtcatgagagataagcacaaattataactgttggctactttttaggatttgtgttccagctctgcacccagggtatt

SEQ ID NO: 40454 - DNA, 449 bp, Homo sapiens
  misc_feature (2)..(2): n is a, c, g, or t
cnactccctgacccttcagggtgatcccgccctgcccttggccctccccagagtgctggggattgccaggtgtgagccaccgtgcctggctaccattttttactttatataaatggaaggagatagcttagacatgtgcctccaaaatgcttctcattgttgctattcatagcaaagaagttaaaatcttgacctgatgttaaatcacattctgaaagggcgagataaaaagagtgttcttttctaatttggaaatacattaaggattaaggatgagaatggagaaagggattacagtaacacagaaataagttctttctccaaaaccatctgatgatctgtgaagaggccctaaggatgaactgactgcatcagacatgttccatgccatgtgtaggttgtgacagaatattcatacagtaaaataaagtgacttatattttggaaat

SEQ ID NO: 40455 - DNA, 583 bp, Homo sapiens
aactcaataaataaataaatgaaggaaagaaggaaggaaggactccagctgtttactaacaataaaaaagattaaacatcaaggaaaatgcttagcagaaaatgtacaaaatctatgtgaaaaaaaaccaaaacttttaagcatcactaaagacaacaaaaagaagacctaaataaatggaaaagcttatcatgttcaggggcaggaggactaaatatctaaaagatatcggttctccctaaaataggctaccagtttaacgtaatcccaggaaaaattccaagaggaacttttaagaaccagattcttggccaggcgtggtggctcatgcctgtaatcccagcacttcggaaggccgaagtgggcagatcacgaggtcaagagatagagaccatcctggccaacatggtgaaaccccgtctctactaaaaatacaaaaattagctgagcgtgatggcacgcatctgtagtcccagctgctcaggaggctgaggcaggagaatcgcttgaacctgggaggcagaggttgcagtgagctgagatcgcgccactgcactcccgcctggcaacagtgagactccgc

SEQ ID NO: 40456 - DNA, 428 bp, Homo sapiens
acgctgtcgaacaaatgaatattcctgcaaaagaatttagcatcctggaactcagttttcatggatgtcacaaaaatggtggtcttgaataattcctttgtctcagatataaatttctaagccaattggtgtaactttaactgggttgcacaaattaacatcagctctgtgaaattagaaattaatacagaagtgcagacaactctctaaaatagctcatgtttccattggaagtaacatctagatatccctgtctttctcctctcatttaaccagcacttactctgtgccagatatcatgctaatcattggacatatatttttctcaatgaatcctcacaatgaccttgtgagaaagagattattgtgttcattttgtaggtgaggaagaagattcaaaggatttaagcaaattcctcagaaagaga

SEQ ID NO: 40457 - DNA, 623 bp, Homo sapiens
taggtcacatattatttgatttcatttaggtgaattagccagaataggcaaatccatacagacagagagcagattagtggtttccagaggctgaaggaagagaagatggagagtgactgcttaggaatgcgatggggtctccaatgtgggtgctaaaaatgtttttgacctagatagaagaaacagttatacaatcaatactgtgaatacactaaaaaccattaaatgtacagtttaaaggggtaaatttatggcatttgaattacatctcaataaagctattttttaagccaacattaaaacttggaaaatttcacaaaaaattccagattgacttatcttgaaaaaatcctaagtaaaatctgacaccaccagccacagcattcctcataggaacatgagttggagatgaagctggtcctggaacccatctctgccaccacctaactctggacgttggcaggataattttttcatctgtacctcagttagctcctcttttctttggagggtaggccaaaaatcctgatcaatttaccaatggatcttcatctgctgcaattgtgaaagctcgttcgtcttaattctgttcagatctgggttcaaaatgagacacgatcctg

SEQ ID NO: 40458 - DNA, 609 bp, Homo sapiens
agaacacaatcctcaaaacgcaatgataacaaggaggggtgtctctagaatagggaactggctggagcagattcctaaaccatctctctccccttcaagctgccaaaggtctagtctctagaggaggtaaactgaggttccctggactgggagaaaccacgctcagttgtgaagaaaggtactgtacagaaaactgaggatttaagtgacgatatacatagtaaatgctgtgtgcacaataaatgaagctttcttccaccactcagccaccagaataccaccagcaagacctccatgcttcaagcaggacacaggaaaaggcctttccatgccatcgctcctctagagcttactctcgaggacagacctcaagatactgacaagagggatttcccccaataaaagagacaatgaaaatcatccaatggttaagtcaaaattgataaggcccacccacttgctcagagcttccaactggctacagagtaccacgatgttaatgagaagcagaaaattaagaattaataaacatctgaggaagaaataaaaaaaaaaaagaataggaagcagcaacttagaagaaacagaccatgcacagaggagaaaaaa

SEQ ID NO: 40459 - DNA, 317 bp, Homo sapiens
ctctaatcaagacaaaggtaatgatggatatatactacagtacatagggctgggcatggtggctcatgcctataatcccaacactttgggaagccaacgtgggaggattgcttaagctaggagtttgagaccatcctgagcaacatagggagaccctgtctctatacaatataaaaaaattacccaggtgtggtggctgctcaccacactagccccaacttttttaaagcaatgaacatatattaattttactacaatataagaaaacacggccgggcgcagtggctcatgcctgtaatcccagcactttgggaggc

SEQ ID NO: 40460 - DNA, 421 bp, Homo sapiens
catgtctttattttttagcatggggcttaacatttttcctactctgagttatcccagatcaataataatttctatatattataaacccttatttgccaaaaggtactagtactatgtgctagtaccttcctttccatttcattggtttttttttctcatagtctgtcatgcttgtttcctgacttttcttgctaccatagtctttatcttgcttttattcatagagttgactgctttctatttgatatgttccaactgccatttttttcttctcacccttgatccaaatttgatttctaattatataagataaacaagaatgccaaacttactgccctttgactaattagaacatggaaataatttgagttttagagaataataaagtttttttcttccatttacaaaagtaagaaaactt

SEQ ID NO: 40461 - DNA, 404 bp, Homo sapiens
gagagatttggatcttctgtcaagccaatgatttcttactaattgtgatcttgtgaaagtacttttccacacctcagtttcttctgtagaatgagcataatactcacattgcagataatctatagaataactaataaaaacaaaccttgtagtgtgcctgtcagaggtactcaataaatgttagttcccttttccctttgataaaatctgacctcatggagatgggagagaataatcttgcaatgagaataatttttacctcttgacttatgcatttttctacttaaattggatgtctgtctaatgcttattatatataaacatgtgtaatatagctgcacctggttttgtctagtgttgatctttggatttgatccagacttatactgtaacatttttatgcc

SEQ ID NO: 40462 - DNA, 375 bp, Homo sapiens
tcacaagctctctgaaggagctgactgtgaaggcaaggactgtgtctatgccttttttaaggagacgcacagtttgtcttaaccaagtggacacatgagaggcacagagaggggtgcacctcagtctacccaaggatatggagtgggggctttatggagacctgaggggcccaggcacagaaaagagacaaagtgagggaacacttgaggcagatggcagggcacatgcttagggaggaaagcttggaaaggcacaggcagagtgtttaaggatgtgcccagcatgtaatctagagaaagcagtcagaggaaatgagactggagaggcagctcgaggcagggcatatatgtgaaagtcactcgcaccccctctta

SEQ ID NO: 40463 - DNA, 323 bp, Homo sapiens
ttacatgtttcattcagttcccttatgagctcttaaactctgtatcatctactcaagaacaatgacatgttttgagcacttttatgtgtcaagtactggggaaacagattggacatgatctctactctcagaatttcacagactagaaggagacaagttcaatgagatgtgttaagttctgttgcaatattatagtattataagaatattacaagtatataatagagacagaaaagtagtagttggggagtaattagcatgaccatataatttatcacttgagaatagaaatgggtgctcttaaaaagggtgctgcaacaata

SEQ ID NO: 40464 - DNA, 593 bp, Homo sapiens
gtagcacttttttgttttccacaaacaaagatattatctttaaaatcaatgtacaattaatttatcatttctacagtaaagtcatgttttatatcattgttttgagtttaaatacatagaatttaaacaatagaacagtctatggccattgtgaggtttctctactcagcaacagaacatgctgaagagaaagcggattgaaatatccgacataaaattcaagctatggaacaacgatactaaattacctgatagaaaaatcacctcacacaaaaatcatctactaatttggggaaaaggagtggtgaaaaaagcatttaaatatctttccattagattaaaagattactgtctcctatccaatattgtaggaggaaataaaatcctagatatttaggaaaaggatctgaacatgctaaaaacaagtggtctgcatttacaagtgtgatggtgattgatctgagaggatgatctgaagatgttttaatgtagttgtgaatatgttcgcatagaagaatgctaaaaactattgaattatattgaattttgtcataatttataggctattaaatcatatttatacaaaaaagata

SEQ ID NO: 40465 - DNA, 509 bp, Homo sapiens
tcctctggctggtcgtggtggctcacacctgtaatcccagcactttaggaggccgaggcgggcggatcacctgaggtcaggagttcgagaccagcctggccaacatggtgaaaccccatctctactgaaaatacaaaaattagccaggtgtggtggcaggtacctgcaatcccagctactcaggaggctgaggcaggagagtcacttgaacgtgggaggcggaggttgcagtgagctgagatagggccattgctctccagcctgggggataagagcaagacttcgtctcaaaaaaaaaaaaggaaaaaagcaaaagaaagtgtcctctgaagcaacatagtgaaatatagtaaaacgtgctctgggcctgagaggctggaggtctagttctttgttacctttggtacactataactactctgaaccttattatctgtctttgcctaaaatgtatatagtgataactcttctgttcatctgacaggaatggtatgaagcactaaaaaaaa

SEQ ID NO: 40466 - DNA, 460 bp, Homo sapiens
  misc_feature (397)..(397): n is a, c, g, or t
aacccaggaggcagaggttgcagtgagctgagattgcaccactgcactccagcctgggtaacagagtgagactcttgtctcaaaaaaaaaaaaaaaaaaaaaatctaagatagaggtttggtcaacagtgctttaccatggaactgaaaccatgaaaagtgaaactgcaaatgggagagactgctgtatagtcactgaaaaattaatggatgagctcaacagcaaattagacacaactgaaaccttggacccatgtgtggaagatgacagcatcaccaactggagggtgcctggatccctgagtcaccacttgaagcaaaaaggtcaagagtagccacctgacccatatcaggctataatgaagagaaaatgacacgaggctttggaaccaagcaangtttccactgagtttcttctcatgttactgggtttgtaaatgaataaacacattttaactact

SEQ ID NO: 40467 - DNA, 742 bp, Homo sapiens
aggaggcgcggcagccgccagggcgaggcgacccggtgcggggggactcccatggagcgcggactcctaaggaagtcgctgggaatcccaccggctgtaccgcagggcgttagtacctagatggcttcggtgcccccaagcgatgggctcaagctacagggcgggctttgcacctggccttctcagctctgaggcaggcagtgggcagcttcgcctccaccctccgtccagcgcccttcccatggggccatccgcctctccctaaggcactaaaaaccagtggaggagtcaggccatgttggcaaaaagggctcgggcagcagccccagacctatagtcctaaatatccatgtacccagccctggggtcacgagccatctcagggacgacccgattccagcggatggagaagttccctgaaaacacctgcctgggaggagagacgagggaacgagattggacagtgctttaccatggaactgaaaccatgaaaagtgaaactgcaaatgggagagactgctgtatagtcactgaaaaattaatggatgagctcaacagcaaattagacacaactgaaaccttggacccatgtgtggaagatgacagcatcaccaactggagggtgcctggatccctgagtcaccacttgaagcaaaaaggtcaagagtagccacctgacccatatcaggctataatgaaatgagtaagaaagaaagattttgtgaggccacattttcataca

SEQ ID NO: 40468 - DNA, 912 bp, Homo sapiens
aggaggcgcggcagccgccagggcgaggcgacccggtgcggggggactcccatggagcgcggactcctaaggaagtcgctgggaatcccaccggctgtaccgcagggcgttagtacctagatggcttcggtgcccccaagcgatgggctcaagctacagggcgggctttgcacctggccttctcagctctgaggcaggcagtgggcagcttcgcctccaccctccgtccagcgcccttcccatggggccatccgcctctccctaaggcactaaaaaccagtggaggagtcaggccatgttggcaaaaagggctcgggcagcagccccagacctatagtcctaaatatccatgtacccagccctggggtcacgagccatctcagggacgacccgattccagcggatggagaagttccctgaaaacacctgcctgggaggagagacgagggaacgagattgggtaacagcttgcagcgtgataacaccatgcagtgtgagggagctgtatgcagtggagccgcaggggttagtcaggcctcgcccctaaatctgcctcttaaataagagtccgtttcagccaaacctgccttttccagttccgtggaggtcagtctgcacagccaatccctgacagtgctttaccatggaactgaaaccatgaaaagtgaaactgcaaatgggagagactgctgtatagtcactgaaaaattaatggatgagctcaacagcaaattagacacaactgaaaccttggacccatgtgtggaagatgacagcatcaccaactggagggtgcctggatccctgagtcaccacttgaagcaaaaaggtcaagagtagccacctgacccatatcaggctataatgaaatgagtaagaaagaaagattttgtgaggccacattttcataca

SEQ ID NO: 40469 - DNA, 446 bp, Homo sapiens
aggaggcgcggcagccgccagggcgaggcgacccggtgcggggggactcccatggagcgcggactcctaaggaagtcgctgggaatcccaccggctgtaccgcagggcgttagtacctagatggcttcggtgcccccaagcgatgggctcaagctacagggcgggctttgcacctggccttctcagctctgaggcaggcagtgggcagcttcgcctccaccctccgtccagcgcccttcccatggggccatccgcctctccctaaggcactaaaaaccagtggaggagtcaggccatgttggcaaaaagggctcgggcagcagccccagacctatagtcctaaatatccatgtacccaaggggattttatctgttcaatgtgcaacctgatgaagttttgtcccatgttaataatttcattaaaaatatggccttacatcctaaaa

SEQ ID NO: 40470 - DNA, 354 bp, Homo sapiens
tcccacactcaccattaataagactgctttacagaacttcacttgcttcttccacaagctactccaactctgatgttgctttttgagtccctgctctgttttaaatactgaattagacagctttgtgtacaactcaaagacagggaacaggttataatcttgtttgtatcacagtgatcccttatggtgcttatctcttggaaatccacttatgaccttcaataactggaccactgtccaaatgacattgctgagtgactgaaatgttcattttctgttatatagtctctctattcaagcctactgactgtggctatgtcatcacagttttgcttttgtgaacttttcattctt

SEQ ID NO: 40471 - DNA, 414 bp, Homo sapiens
tttttttctaagacaaggtttgcctctagcgcccaggatcgagtacactggcgcaatcttggctcacagcagcctacacctcccgggctcaggccatctttccacttcagcctcctgagtagctgggaccacagttgtgcaccaccatgtctggctactttttgtattttttgtagagagagagtttcactatgttgccccggcaggcccggaactcctgagttcaagcaatccacctgcctcgggcctcccaaagtgctgggattacagtcgtaagccaccacgcttgtccaataaatggattttaatggaggagttagaaaagttctttggtgtggtttcagattacacttcacaaccaaccttaaagaaactactactggatagtattaaagaagaatgtccacaattatc

SEQ ID NO: 40472 - DNA, 489 bp, Homo sapiens
ctccaaacagaagctttcaatggctttcctttgtaagtgcccagtggtgttacctggcatggaccctgcctaggtctaccatggttctcttcactgctaaccagcttcctgctacctggtctttcagtgccttgaagaggccaagctttttggggctccatacagctctcctccccaactgagacactcttcctcatgcttggcaagcgaattcttctcatctgccagtctcagcttccttgtagaaacattcctcgacccccaatctaaagcaggctactccctggggactaacctcaactggaaatagaattcttgtttgcctccttgctgactgctgccccctcggccagctctgggagggcacggatcatgtctcttttgttccccatcgagtccccagtgcctagcacagtgcctggctcttagcaagccctcaataaatattcatcaaacaaataagcaaatgatgaccattagaaaatatga

SEQ ID NO: 40473 - DNA, 227 bp, Homo sapiens
aaaatcttataccaagaagaaagctagaactgagctctgatcttcctggtggctgatgtaaaaaccaaaatataattaatcataggctcctcattgttcatagagaatatgtcaagacagatatgatttaatttttattatccataatgaaaaattctaataatcgtgaagagccctttttcatttagttgtttaggtataagtagactcagccttccatgttttga

SEQ ID NO: 40474 - DNA, 301 bp, Homo sapiens
gcatcaggtcagcgctcaaaaactttcagattttgaagcatttcggatttcagatgtttggattagggatgctcaacccgtattgatttaatatgcggtggaaacgtgacgacctaggttttaagtcgcggtttcctcagtggtgggtttggggtattacccctgcctggccggcctccgggcttgtttccagaagatgctaccccgagagctgcgaaccgccaagctccgcagcgcgcagggctccgacagggaccagcgaggtcagctccaagggtcaccccaggctccaaactggcca

SEQ ID NO: 40475 - DNA, 379 bp, Homo sapiens
aaatgcagactctcaggcccttccctaggcctattgtgttagagtcgcgtggtaacaagataccctgataattgtagagcactgacttttgagaaatgctaattagatggaggagagaattaggaaccaacacagaccagggctactgagatggcttcttccacaggtacctgtctccttttatctggcagctaatttgttttggccaagcttcagctaagagctatcccctgccctcactgagctcttatttaaggtgtttctgctagaaacttgagttcaggatgagctggagagagctgcctgtgttcaagagaaagatagtttttgtgtccatcttattgtgtattggtaccaaaggggtgatcagtgggatgaa

SEQ ID NO: 40476 - DNA, 570 bp, Homo sapiens
tcctactctgtcacccagctaattttttttgtatttttagtagaggcggggtttcaccatgttggccaggctgctcttgaactactgacctcaggtaatctgcccaccttggcctcccaaagtgctaggatgacaggcatgagccaccgtgcctggccaggcattatacttttaattctacttttgcaagggcctcaagtatcttaaaatacagtgcagcttgagtgcagaggaaagccctgtgctcgaccactccccgtactgctgaggaccagctgttgccagaccagttgtactggagataggcccccagggatttctgtccccactcctaaatcttccaccctgcaggatgccatcttctgtcaggcttctaaataaacggctctttcccttagagaccccggaagacaggcaccatattcagacagccaagaatcaaggtcagggaactctgtagtccaagaggcagagagacacccaagctcatggcacgtggaggccaaaagtgaaagaaactctggtccaacaaccccagaactggaatcgtccagtgagaggtgtgtacaa

SEQ ID NO: 40477 - DNA, 508 bp, Homo sapiens
gggccctatgaggagaaaggcagaatttctgcccctactaaaatcttaattaaaaataaaaaactaatataaatatgttaatattctaatatgtaaacgtaaaaatttaacattatgccaataaaagtaccaataagggccgggcacagtgactcatgcctgtaatcccagcactttgggaggctgaagtggggagatcacttgaagtcaggagttcgagaccagcctggccatcatggtgaaaccccatctatactaaaaatacaaaaattagctgggcatggtggtatgcgcctgtagtcccagctactcagcagacccaggcaagagaatggcttgaacctgggtggatggaagctgccgtgagctgagatcatgctactgcactccagcctgggtgatagaatgagactccgtctcaaaaaaaaaaatagtccagattctttcctaaggaaattatttttaaaaaccccaacaatttatgcttaaggaaattatctcagagtta

SEQ ID NO: 40478 - DNA, 592 bp, Homo sapiens
atacatgagatttgaattgctctttgccaaaacttagcatcactcatatattatctatcatatccccacagcattagaatccctagatagccaagtatggcatcacaacaggccaagcttctatctgatttctaagagaaaagtcattgttttagtgtatgtggacaagaaatggctctttgactgaactcactaatggtcttcagtcacaaaaaataaacagtggaaaattttctctgaagagaactccaggtagtagcctgttatcaaagaaaccagtgttagcttacttagaattatttgacttgatgtgtgggcagaaccacagttaaaaattgttaaggcctggtacagtagctcacaactgtaatcccagcactatgggaggctgaggcgggaagataacttaaggccaggattttgagtccaatgtgggcaacatagcaagaccctatctatctctacaaaaaaaaattaagttagctgggcacggtggcacgtggctgaagtctcagctacttgggaggctgaggcaggaagatcacttgatccctgttgagccatgattgtgccactgcactccagaatgatg

SEQ ID NO: 40479 - DNA, 462 bp, Homo sapiens
gcggccgcctactactactaaattagcggccgctgctacgccttgggcctcatactctgagttacactatgagctcctgctcccatttctcaggcctttaaactcagactgaattatagcaccagctttcctggttctccagcttgcagacatcatactgtagaacttctcatcctccgtaactgcatgagccaattctataataaatctcctaatgtatctctatatatatcctattgggtctgtttctctggagaactctaataatatactacctaatcaaattgttgcgaggattaaataaaatgatatatgtcatagtgccaaataacaagccctcaacaaatggccattatctttattactagtgggatttagatcatgtgcttcttactaaaataataaataatatttattgtttgtttcagctatgaaaagaaaacatttggaagatcactgatt

SEQ ID NO: 40480 - DNA, 474 bp, Homo sapiens
taccaccatgcccggctaatttttgtatttttagtagagatggggtttcactatgttgaccaggctagtcttgaactcctgacctcaggtgatccacccaccttggcctcccaaagtgctggaattacaggggtgagccaccgtgcccagccttattttcttgactcataggaataaatatgtctagtaggccctcgataaatacttactgaattaagattacagcaagttagagaaacttgatgtcttatttgttaaagggccaagtagaataaagactttaaaataagaaacttacataccatttttccccctacccttcccctcacataaatttggtcaacatacttcttagcctggcagagcggttcatgcctgtaatcccagcactttgggaaactgaggcaggaggactgcttgaagccaggagtttgagaccagcccagccaacatagcaagacctcatctctgcaa

SEQ ID NO: 40481 - DNA, 263 bp, Homo sapiens
actgaacaactttgttttgggtacttttatatataagagactcaaagttgtcagaaagagttctttactttaaaataagaaacttacataccatttttccccctacccttcccctcacataaatttggtcaacatacttcttagcctggcagagcggttcatgcctgtaatcccagcactttgggaaactgaggcaggaggactgcttgaagccaggagtttgagaccagcccagccaacatagcaagacctcatctctgcaa

SEQ ID NO: 40482 - DNA, 214 bp, Homo sapiens
gaagaaaaaggaagagatgacaaaagaacccggcagttcctaggagcccagccccgggcaagctctttctccatgtgttatttcatttaatcctgaaaacaacgttattaattcctatcattggtgctttacagatgagaaaaccacagctttgactgattaaatcatagcctttcttaacaccatgaattatactttgggaaatagtactcca

SEQ ID NO: 40483 - DNA, 491 bp, Homo sapiens
ctttttgaatcagatctggaaacttaagcttctcattggcatgaaatcagaagatgtgcacagcagattttcccattctgtgagatgagctggactgaggctcccaggaagtgagaatctggggcatttcacctctgctgtgtctccttcgagactacaatatcattcattcctgaggttcccattccctacatgtagtcattccttggtctgccccatttggaaaagggcactaggaatacctgtcctgccccattgtcatgagggtgttatggggatcccatacactctgaaaggtgcatgactgaattattggaatattgatgaagagtggaagtccttgtgtttgagattgtgtgtaaggagttcttcattccatgagggtgggggtttgtctggtttttcactgatatccccaaatattaggacaatgattgacgcatactgggcacttaaaaaaagtttattgaatgaatacatgtgaaaaaaaa

SEQ ID NO: 40484 - DNA, 291 bp, Homo sapiens
tgatgagctggaacagcagcaggtaggtaggtggtgggggccctctttttcacttttctttctctctttccttgtcgtgagctcaggggccataagccacccgttcaacagccaaaggatgaagcagatcttggcaatgttaccatttctgtaactactggaggcttgctgccctttgacagactggagtggagcgcttcaggggaaaagcagtacccaccaacaccgtggcatctctgctcaacgctgaccatcacgttgaatttctgtttatgtctgtagtaagataat

SEQ ID NO: 40485 - DNA, 260 bp, Homo sapiens
cccggctaatttttttgtatttttagtagagatggggtttcactgtgttagccaggatggtctcaatctcctgacctcgtgatccgcccgccttggcctcccaaagtgctgggattacaggcatgagccaccgtgcccagcccaggattctgtttctaaggaagagagcgataacagatattaggggcaactggcagacctgacctgactttttgccctgaatggttaattttccatctctgagggatgagtttcctttt

SEQ ID NO: 40486 - DNA, 531 bp, Homo sapiens
tacatcttgacaatccacaatagatggaagctatcattgattcattatctcaaaatggctccaccagccaaccccttctatccatccccagtgccacctcctaattcaggtccttgatgctttttgcttgcatggctgccagagctgttgggcaggtctctcagtgctgatgtcttcacccccactcctatctcctccatccaacattctaccaccaaggcaatcctcctaaaacacaaccacagtgttcttcatactccctatgattccctgcaacccacattattaatcattaatccaattaataaaaattaatgcactaattcccagctcctcagtgtggcccttcacaatctgcttgtccagcctcatctcttgcttccccagctttccccagcagacccctcttccacccattccaacgctgtcctcttctcccagcctagttctttcaggccctgtgcctttgcacttgcccctgtctgaaatgtccttcccacttcttcttgaagggggtgagtgcccactcac

SEQ ID NO: 40487 - DNA, 351 bp, Homo sapiens
ggctttcactggaatatcatattttaggatgatgcacataaaatcagataacatcagacagttttaaggaactgtcagaagcacttgaacaagagcaactccatcttgaataggggctgagtaaaatgaggctgagacctactgggctgcattctcagatggttaggcattctaagtcacagaatgagataggaggtcggcacaagacacaggtcataaagaccttcctgataaaaacaagttgcagtaaagaagccggccaaaactcaccaaaaccaagatggtgatgagagtggcctctgggtgtcctcactgctacactcccaccagcaccatgacagtttacagatg

SEQ ID NO: 40488 - DNA, 507 bp, Homo sapiens
ccgagccctgtgaggaaggggagcacagaacaaaggggaaaacagagccgttggttttccctctccgtctaaacatttgctaaatgggtcactgtactggtgaagtgtattcattcatctatagataatgcacatcctctttttaaaaaatttctttaattaatacactttatttttggagcagttttaggtttgccaaaaaatgagtggaaagaatgaagttcccttatgccctctcagctcacctgtcccccaccacctctgcacccccctcccgccaacagcttcctctcttattagcatcttgcatttctgtggtacatttgttatagtcgatgaaacaatgctaatacattaatattaactgaatccatagtatacattagggctcagtttttgtgctacacattctatgggttttgacaaacatataacggtattctcacccatcactactctattgtacaaaagaatttcactgtcctacaagttccctgtgctccactt

SEQ ID NO: 40489 - DNA, 394 bp, Homo sapiens
ggctctgccttcatggcctaatcaccttccaaagatgtcacctcataccatcactctgagggttagggtttcagcacatgcatttggggggccacaaacatccagtccataccagttgggtaaaataaaatatgttattaaagttaattgcatctgtttctttttaccttttaaaaatttaaatgtttgtggctcacattatatttctactgaacaatgctgctctagggtttataattaaacctgaaattgctaggcatgtacatgctgggcaaattttcagattgattattttcaacttccctcagtccctcccctttatttaacacccccacccccaaccctgccccaccctgtattccccagtacttggtgaactttcctctgtctgggc

SEQ ID NO: 40490 - DNA, 565 bp, Homo sapiens
agataaaacaagaaggcattcctgttataaaaagtgtaagcaatcctatgttttgaatattgaatgaaatgtggacatttccctcatgccgcacccaatcccactttcttacccagagggttacagctatctacttacgcagtagatgcttggcaatccctttgccccttccctccttgaggtgactaagatggtcatgcagacaagccacccctcccaacagaacccatgtgatctagggggaagctgaccccacccataatgggccaccatcagtctagggctgtgtttttttgacgtgtggaccttgaagccttcaggctcctcaagatgctttcagctggtccaagggaaaaatgttttcacagtgatactgagacatcatttgccttttcactattagatttacagtggtgatgcaaaagcaggggtaggtaaatccactagcacctcactgagagtaaggcaatgacacagaaagttacctactagtgaccatcatgttcttcatcacaatgtgatcatggcagaaaaacgcttaagaatagcctgatgtgatagcaaa

SEQ ID NO: 40491 - DNA, 355 bp, Homo sapiens
cccttgtccttctccttccatccctcatctaatagtctgttactttgtactgtttgctattataaattggggggaagccattattattatatattagcttcagaacaactagattcaagtcacaaaaacaatttcgcacaaacaactttaggaaacactgctttgaaaacagtaatctgaattatacctgaagccacagaagccaaatatttactaaaggttcttttaagaaaaacaagttggccgggcacggtggctcacgcctataatcccagcactttgggaggccagggtgggtggatcacgaggtcaggagattgagaccaccctggccaacatggtgaaaccctgtctc

SEQ ID NO: 40492 - DNA, 184 bp, Homo sapiens
ttttgttttttagtttatttgaggtcttcacatagaagagtatttatgtatgccaaaaaattcaaatctcaaaattttccctccaattcctgactgggtaggttgccaaataaaatgtaaaagcccagtcaaatttgaatttcagataaataacaaataagtttttaaaagttataagtatgtc

SEQ ID NO: 40493 - DNA, 315 bp, Homo sapiens
  misc_feature (211)..(213): n is a, c, g, or t
cccagaaacagcttttcctaggactgggcaatgtctggtgcaaaatcgaaagtctcacatggagacacaaggtcacgtgttagaaccttgagctggtctccacatgcctgcagactgagaggctggaaacaaggagtttcctaggtgttggtaattcacttgttgcctggtttagggctggggtgaccagacaacagaacgggcaaatacnnngcctgactcttggctctttctttcttttttttttcgagatggagttttgctcttgttgcccaggctaaagtgcagtggcgcgatcttggctcactgctacct

SEQ ID NO: 40494 - DNA, 1126 bp, Homo sapiens
catcaaacccacagacgccgcatcccaagcccgttctcatcacggcgctgtgtgagaggggactgatccctctgaccctctctgcgtcaagcccacaaggctcagggaatcgactttgcagaaaagtgctgtgaggcagagcaacacatttggactcagaccaacagcctgggaacctccagcggtcgcccttttccagctctgggcaaagcacttacttcagtctcctcatctgtaagatgaaaacactaggtcgggtgcggtggctcacgcctgtaaccccagtactttgggaggccgaggcaggtggatcacgaggtcaggagatggagaccatcctggctaacacggtgaaaccccgtctctactaaaaatacaaaaattagctgggcgtggtggtggtacctgtcatcccagctactcgggaggctgaggcgggagaatcacttgaacccgggaggcagaggttgcagtgagctgagatcacgccaccgcgctccagcctgcgcgacagagcgacactccatctcaaaaacaacaacaacaacaacaacaaacaaaaaacccaccctaactgtgacttgacccccacgttacgtcttttgttgtatttctctcgaggttggtctgctgtcctgtgtagcggccaccagctgcatgtggcagtttaaatgtaaatgcattcaaattaaataaaaggggacattgtgctcctcagctgcacaggccacattgcaggtgctcggcaggctgtcgcattgcacctggcagaacgttcctgttgttggagaaagttccatcggacaacgtgggccagggcagtgggcgtgtgtattttacttgactttggccttaggacctttggcagtattatagtagaaaaatgaagtgctgtgcggtgcttacagacgcatgcgcgtgatttctactctttttcccacaaagtgtagagtccaggagacttgaatatggaagccagtttggagcctctcctcactcctggccttcctatggaaggagcttattcaagggaaagagcttattcaagctgctctttccccacccccaggtgtgacccacagagtgaggagagtctccgtcgaactggggatcctcagagtcatcc

SEQ ID NO: 40495 - DNA, 1266 bp, Homo sapiens
catcaaacccacagacgccgcatcccaagcccgttctcatcacggcgctgtgtgagaggggactgatccctctgaccctctctgcgtcaagcccacaaggctcagggaatcgactttgcagaaaagtgctgtgaggcagagcaacacatttggactcagaccaacagcctgggaacctccagcggtcgcccttttccagctctgggcaaagcacttacttcagtctcctcatctgtaagatgaaaacactaggtcgggtgcggtggctcacgcctgtaaccccagtactttgggaggccgaggcaggtggatcacgaggtcaggagatggagaccatcctggctaacacggtgaaaccccgtctctactaaaaatacaaaaattagctgggcgtggtggtggtacctgtcatcccagctactcgggaggctgaggcgggagaatcacttgaacccgggaggcagaggttgcagtgagctgagatcacgccaccgcgctccagcctgcgcgacagagcgacactccatctcaaaaacaacaacaacaacaacaacaaacaaaaaacccaccctaactgtgacttgacccccacgttacgtcttttgttgtatttctctcgaggttggtctgctgtcctgtgtagcggccaccagctgcatgtggcagtttaaatgtaaatgcattcaaattaaataaaaggggacattgtgctcctcagctgcacaggccacattgcaggtgctcggcaggctgtcgcattgcacctggcagaacgttcctgttgttggagaaagttccatcggacaacgtgggccagggcagtgggcgtgtgtattttacttgactttggccttaggacctttggcagtattatagtagaaaaatgaagtgctgtgcggtgcttacagacgcatgcgcgtgatttctactctttttcccacaaagtgtagagtccaggagacttgaatatggaagccagtttggagcctctcctcactcctggccttcctatggaaggagcttattcaagggaaagagcttattcaagctgctctttccccacccccaggtgtgacccacaggcctccacctgtctgggacaggcaggactgtgagctttgggaatcaaatggaaaacacacttgtcccactgctgccagctggttgtcctagggctaatgtgtcacctctctgtgacttagctcttcacgtgtagaatggggtggaaaagtactcggtgtggctgttttcaggatgaaggggtct

SEQ ID NO: 40496 - DNA, 370 bp, Homo sapiens
gataaatggtgataagtacacaaattgctttattaacttaggcttatcagattaaattacaggcaaattttaccaatggccctctacaaaaagcatacatgaacaaagaagtcatgtaataaataaactctcagcagtgaagagccacaagtgacaaaaaagactaaaaaccacagagctacctgtctctgaattgggacatttatcaacaaaggttattcttgagaagtcagtatgagtttaaagcatcttcataaacgtatccagtgagccaagatgtagcttgacatgggtttaggcatatcactcccaatgatggaaaggaacagaaattttatcactaatattatggtgaacattggtaggatca

SEQ ID NO: 40497 - DNA, 343 bp, Homo sapiens
tgctggggagctatgcaaagcacgggtcgccgcgctggactgagcaatggaagatgtggctgccactaagagtacaggctctggagtcaaactgctagggtctgggaacccggccagtgccttctagcattgtgccctcgtttccttaacttaaaacggaaataactgcataaaggtgccaggagaattaaagagctagcacagaatcaagttacacagtgtctggcacatactagtatgattgcctcatccgtaggtggatttgacagtctgagtttctgactagatctgacttccattgtattaaatgcgtgtgcttttatgtataatgaccattatagtt

SEQ ID NO: 40498 - DNA, 493 bp, Homo sapiens
tctcgttttggaaatatattagcagctcaaaacagtttgtctaaacaattacatttctgcattttctgttaatgatccaggacaaagtaacatgacaactttggtttggtaggtaggatgggatgcactaagaaaatagattttctcagttttgctctgtcttctaagaagactgttgagtctgtcctcgtgaatactgaattccagagagccacgaagattaaccaattcattcctcctacctctttcttctccgtcctccagagattttcctaaataagatgtaataatttggcaacatttttctttccaatgtagcttcctgagagtttcttggcctatacccagctgaagtgcagggaagagtaagtgctagcacttaatgttccatccaacaaggagccatgttggagagtaacttcctgtgtcctttgttgccttacatgtggctttttccacaacaaattaaattaagaaaatactgaaaaaaaaa

SEQ ID NO: 40499 - DNA, 587 bp, Homo sapiens
tgtcttctggaatactattttttctttcacaaatcttagagaatccagggggcagaaattatttctgagttttcctctcaataccagcatctgattggctgaccagcaatgtacctctgagaaatggaagtcgggttgagtgaacacaatcttaatgcctcaaagggttagctttccaaaggaagggtataccaggagattcctctcagccccagggcatccacctgctcccttgagaggctacactccaacctcagattgtcctctgtctcccattcccagatacccagagttccattccaggccaggagctgaaatttactagagattctagcatacacagccacagttgatatcttgatttatccccagacagtactgaaacccaggaccaggagaaaaccgaaaggtggctgaggacacatcaccctgtaaagtttccaaagggaaaccttgacccaaaaacattctgataagatctctgcgcctagggaagataaaaggaaaataggcacagacttttttttacaatacagtgtcaggggattattttttgttttcttctcattggaaatattttcaaacag

SEQ ID NO: 40500 - DNA, 375 bp, Homo sapiens
gagtctacaatttaacattacattttgtcttaggttactgacttaataacccgatttttctggattcccctggcagcctgttttccccagtcatagcagaccacagggaaaagaaatgaaggggatactgagaatagacctgcagcaccaagaagacatggctgactgcaaggaaatgtgcctcacggagcagagcccaactatctgcagcagtgcggggccaatccaaagaaccccaggttcacttagagcccgagagcctcactgcatcctaataacaataaccaatgcccaccctgatgaccaagaccgcaagaaaggccaaagtcggccaggcacggtggctcatgcctgtaatcccagcactttaggagg

SEQ ID NO: 40501 - DNA, 571 bp, Homo sapiens
gggaatttcctcagtttgatagggcacttctacaaaactccagcaaacacttcctagtgaatgtctagatgcattcctcctgctaccaagtcaagtacaaggatgcccactctcattccttctgaacattttatggtagttctggccagcacagtagggcaaaaagaaaaaggcattgggaaagaagaattaaaacctgccagagacaacttgtagaaaatctgatagtatctacctaaaagctattaggattaatatgggcttggcatacaaggttaatatacaaaaatctattgtatttctatgtactagccatgtgcaaccaggaattgaaatttaaggaatacagtttataatgtccaaaattatcaaaatctaaggaataagtctgacaaaagatcaggaagacctgtgcaatacagtgagaacttcaaaaggttgctgagagaaatcaatgaagacttaagtgggatatatactgtgttcatggatcagaaactcagtgtactgaagatgtcagtttccccctaaaagatttagcccgcctgggcgacagtgagattctgtctcc

SEQ ID NO: 40502 - DNA, 341 bp, Homo sapiens
ttgtataagctttcttcttttcgagacttctcaaatttagagaacccaaatctcagtcctctgacgtcctctcaacctatactcattcctgggtgctttcattcagttctgtgattttaaacgctatctttactcataagcctccaaaaattatacttctagctctagcctcttcattatattccaggtagttatatccagttggcaagaccagctacttaatttgttctccccatcctccaccccccaggacaacgttggggggcagatttaacaattattaaaaatgttaagatgttgacagcaaagcatagggcccttctgagtatgggctctgtgag

SEQ ID NO: 40503 - DNA, 321 bp, Homo sapiens
gtaggtaatttatcatactatatgcaatagaaaatttaatgcctaaatttaaatcctgaagcaaaactgatcatgtactactgatattttgactgcactccctatctttaaataggttgaagtttacattataaatttcagacaaattctggcaaaatgaggaagctctcctcatgactgatcttctggtctctctaaatccaatcacatttcctgaagcacagctcagctcacactatgctgaccagactcttgtaactgccagctgctgtaaaaattcacagcagcttcctgcataagttattcacagctccatgaacc

SEQ ID NO: 40504 - DNA, 410 bp, Homo sapiens
acgggccccctttttaacccgcgtcctcgactcccgcaatgaggcgccgcagcccgagagcagaataggcttgggcctggcggggagacgctgaagcggagttgccgggcgagagaggcgggctcctgctttccccttcctccccaccccctaggacttccaggtggggaacctagggctgggtgccggtttgtcctgttcaggcagagtggcggccgaccccggtcctgggctccccgctgtccccagccgccgcgcactttgggctgacaggcagcgggtcaagtcctcgtaaggacacaagatccagatgactcccagaatcggcctaaacgaagagctcattgtctttttgttttccagaaatgttttttgggtgcctgcaggggatttgggcgccggagatgggg

SEQ ID NO: 40505 - DNA, 360 bp, Homo sapiens
ctgcctaggcaattgggaggctggaaattagacattgtatctcatgcctgattcttccgctcacaaaggcaggtccccgacttgggtctccaccaactctccactgcaatgattgggatgatgatgtgtgcagtgatcaatgcaaaagaaagtaacaggaaaatctttcctctgttccaccctttctttttccttttatgaatgagatggtggagaaagagctaagcagtctcatacctcaatattcaacaggccaaggggactactacaaaagatgtttccattctactcacttccacccttcctccagcagggagaggcaacaagatagctgcactgaggaggttttatatagggagg

SEQ ID NO: 40506 - DNA, 196 bp, Homo sapiens
aatttggacacagagaccaacatgccagaggaaagaccatgtgaaaaggcagggagaagacagccattcacaagccctggacagaggcctggaacagattctccctcacaccctcacaaggaaccagccctgcccaccttggtcttggacttccaacctccagaactgtgaggcaatacatttcgctgtttaagcc

SEQ ID NO: 40507 - DNA, 542 bp, Homo sapiens
gaagagcaacattttcagtatttagaatagacttatgccagactacctgggtacagagcctggcttcatctccttttacctctgtaaccttgggcaagatacttaccctgtctgtctgttttggtttcctcattgatctaatcaaattataaataggcataggctttccagatgtttttatggttaaacaagttgatattgataaaacatttagaatagtactggaacataaaaaagactatataaatgttaattgttatgagaaatatccttttcatgatgatcattaccaccaccatcaccaccatccacttctgctgcacagagatgcaatccaatgtttccattcttctaaagtataattattttgaaataagtggtattattttaaaaatagtgaagctctgtaataagcttcactgtttagaatatgaaataaatggtaacatacatgtgaataatgtgcatttgtattatggaatatataacctaactcagaaccttcaattcgaagacttagccacctatcacaccccatccta

SEQ ID NO: 40508 - DNA, 393 bp, Homo sapiens
gctcttcctttgcttttttttaaattaagaaactattttttttagagcagttttagattcacagcaaaattgagtgaaaagtgcagaggattctcatatacctcctgtcctcacacacactagcctcccccactgtcaacatactgaaccacaatgctaatttgttacattcaatgaacctgcattgacatattatcacccaagtccatagtttatattagaattcactcttggtattacaaattctgtaggttttaacaaatatataatgaggccgggcacagtggttcatgcctgtaatctcaacactttgggaagccgaggcaggaggattgctggagcccaggagttcaagaccagcctaggcaacatagtgagaccccatccttacaa

SEQ ID NO: 40509 - DNA, 644 bp, Homo sapiens
ttttaacctttttaaaaggtatttagcagcttacatatcatctactaagagcaagaaatagtagcttttgttgttattatcataatgggcaacgtgaggtggagggaggcgggagatgaaattcttggttgaaacaatagtcagaagaaaataatcttctcatttttcctcactttagttgattcattcattcaacaaacctttgttgagtacctaccttgtgccaggttgtcttgtgctaggtattggaagggggacaagggagatggaggtaagacagatgaacacaacacagtctttgctgaaggaggtcatcccttgtaccctgggcttcagttagcagtttagccctttgcccatacagtaaatattcattgctgtcctacttcaagccagtctcaagggatatagaattgaatcagactgtatttctttcctcaggaaacatatagagtactgggggaaacatcaatttgaggacagtgtgatcaatggtgtaattaaggtagatacaaaatactgaagaaattttcaaggaactgcaaatcaacaacaggaaaaataaaaaacaatgacaagaaacccaatggaaatgtggctaagtacttatgatacccaatgcaatgaaaaaagtaaaaaaaaaa

SEQ ID NO: 40510 - DNA, 920 bp, Homo sapiens
tgaaactcctatggggctaaggagatcaattttataccaataaatcatttcagaaaatgaggtcattttaatattcttggggttactcagcaaaacactttgcttggacgtctcttttgtactttccttaaattcttcttccttttcttctcggctttttgaatgtatgactgaagggaactgccactcactgacacggacaacagtaaaggaacttggtcttcactatgcctcatagtggtgggtcacactgcccaggaggaacccgcaatgagaccggcaaatgccttaaccatctcattgtctcatcaggaagaagcttaaatgactcttcttgctcacatacttcctgggcaaacatgtctgctctgttgggataaaggacgctctagaccaggctctgctgaaagatccagggcaaaggttcctgacaagactatgtccagcctcaaataaggccacagaagagcccaggctcgctgacgagcaccggctccgaggcagtcacatcaggagacagaaacagacatgttggtgctgccctctcaggtcagtgcaaatgccacttgaggagggctgagagctttgcagcataaaatgaccagaacaaggagaaacacagatgcaatggcaatagctggcaattcgcacatggcgtcaaacaccactgccacagaagctttttagctacaagccacgctatgcaacctttaagcaaaacattattgattttgtggttgtaaaaacataccttcaactgcagaactcagttttatgacaccttgaataaaaacaaaaagtggcagttatataatggacccaaatcgccttttccaggcttctcataacacacgcatgcttcagatttggatttttctttttctgctggcattgcaagaacgtaactaaacaaatatcaa

SEQ ID NO: 40511 - DNA, 1402 bp, Homo sapiens
atcaaagcattgatgagtgtttctgtttaaattcaaaggacattccacctttaaccttagcattcatgagacacaaaatgggtttttctttttgctgatttaaaaagctgctatgaagctgcacagtgcggaagagggcacccctgctccagaaaagaagaaacaaaactgcctgccatagacacttggtagggagtggcaaatggaatcttggtttgtttttctcttaggactttgacaattatttttccttgaaaagaataagagaatctacctaaaatattaatactagtttcagagctctaggataatatagagcagagtctctttttttaaaaaaaggaaagcggtttcatttctgacagtggatttcttccactgatgtgcacactctttgacatgaaaagctgcacgaagctgccttgaattcattctgcagatggaaagttgcaagtacggtaattagctaagcagtggcaaggccgaccatctgaggtttgatttctcatcaagagatagtgtccgacacgtgccactgagcatgcttgcagggaggaacttggattgtccttcagtaaaattccactttgatgcgcaaagcgaacttgaatttctgcttggcctaccacaggcctgcaacatgcactttctcctcgagggaactgccactcactgacacggacaacagtaaaggaacttggtcttcactatgcctcatagtggtgggtcacactgcccaggaggaacccgcaatgagaccggcaaatgccttaaccatctcattgtctcatcaggaagaagcttaaatgactcttcttgctcacatacttcctgggcaaacatgtctgctctgttgggataaaggacgctctagaccaggctctgctgaaagatccagggcaaaggttcctgacaagactatgtccagcctcaaataaggccacagaagagcccaggctcgctgacgagcaccggctccgaggcagtcacatcaggagacagaaacagacatgttggtgctgccctctcaggtcagtgcaaatgccacttgaggagggctgagagctttgcagcataaaatgaccagaacaaggagaaacacagatgcaatggcaatagctggcaattcgcacatggcgtcaaacaccactgccacagaagctttttagctacaagccacgctatgcaacctttaagcaaaacattattgattttgtggttgtaaaaacataccttcaactgcagaactcagttttatgacaccttgaataaaaacaaaaagtggcagttatataatggacccaaatcgccttttccaggcttctcataacacacgcatgcttcagatttggatttttctttttctgctggcattgcaagaacgtaactaaacaaatatcaa

SEQ ID NO: 40512 - DNA, 703 bp, Homo sapiens
atcaaagcattgatgagtgtttctgtttaaattcaaaggacattccacctttaaccttagcattcatgagacacaaaatgggtttttctttttgctgatttaaaaagctgctatgaagctgcacagtgcggaagagggcacccctgctccagaaaagaagaaacaaaactgcctgccatagacacttggtagggagtggcaaatggaatcttggtttgtttttctcttaggactttgacaattatttttccttgaaaagaataagagaatctacctaaaatattaatactagtttcagagctctaggataatatagagcagagtctctttttttaaaaaaaggaaagcggtttcatttctgacagtggatttcttccactgatgtgcacactctttgacatgaaaagctgcacgaagctgccttgaattcattctgcagatggaaagttgcaagtacggtaattagctaagcagtggcaaggccgaccatctgaggtttgatttctcatcaagagatagtgtccgacacgtgccactgagcatgcttgtaagagttccacgtttcagatgcactgagaatgcatgcatggaacacacgtccccccagcccaacaaccgcactcccaaattgcccctgcacacatatattctaacacggttacaacacagcatgctcccgagcctcagacaataagctgcccaa

SEQ ID NO: 40513 - DNA, 440 bp, Homo sapiens
cagagtgaaccaactgttatctgtaattcaacagataattaactgaaactcagtgctcaaattgctactgggagtttctgcagccaaggtcattctcatggtgctgcttgattttgtttctgtgtctcttatatcgttttaggcagggaggaacttggattgtccttcagtaaaattccactttgatgcgcaaagcgaacttgaatttctgcttggcctaccacaggcctgcaacatgcactttctcctcgaggtgagaaggtctttttctctccactctgaaacaccgctgcctgcaccttttgctgagtttagagtagcatcatactttctgccacgaatgccacaaatactgccttttcaacttggttttgtaaaatgtaatggtactaaatccgccaaagggataaagcacccttactttggatttgccagtccca

SEQ ID NO: 40514 - DNA, 582 bp, Homo sapiens
ttgggataaaggacgctctagaccaggctctgctgaaagatccagggcaaaggttcctgacaagactatgtccagcctcaaataaggccacagaagagcccaggctcgctgacgagcaccggctccgaggcagtcacatcaggagacagaaacagacatgttggtgctgccctctcaggtcagtgcaaatgccacttgaggagggctgagagctttgcagcataaaatgaccagaacaaggagaaacacagatgcaatggcaatagctggcaattcgcacatggcgtcaaacaccactgccacagaagctttttagctacaagccacgctatgcaacctttaagcaaaacattattgattttgtggttgtaaaaacataccttcaactgcagaactcagttttatgacaccttgaataaaaacaaaaagtggcagttatataatggacccaaatcgccttttccaggcttctcataacacacgcatgcttcagatttggatttttctttttctgctggcattgcaagaacgtaactaaacaaatatcaacttcaaaaataaaataatttttagtcttaacta

SEQ ID NO: 40515 - DNA, 658 bp, Homo sapiens
tgtccggtgccgtgagttacctgctcagccctggagcaggggtcaaagctgggcggagctggacagccagtctcagcctcaggtactccagtgacaagcagcagcaccagtgctgatgagggtagcagggaaaactggtgaaatgtgccgaggtctctccagaggtggtaggcggttgcgccagcttcacatcctggataggcaggaacgtttccctatcatactcctgtcccgggtctcatgtgtctcagttcaaacagacactgccgtctatcttcaagctgcaatgaagctgagagccacagaaaacacctgtaccatggtttcagggaggagtctcttccctcagccgaaaacagacagctttgctggtcatctgttctccactgcgaggacgctgccactcagtgtggagagaggaaggggttctgcctatggtgcaagaaggtcggactcggcagttaatactcttggataatgtatttaaggatgcttaagaaattgcaacagccagttcaaccttcagcaaccaccatactgatcagtagtcatcaacattgagacgagactgtacaccagcaaaaagatcccaactcaatgaaggctcagatgattttagcatttttttagcaataaagcatttttaaattaaactata

SEQ ID NO: 40516 - DNA, 700 bp, Homo sapiens
attctgaaagcatctctgccaactctagagagtttagatatctacttatttatatctacatctatctatatttatattaaacaaaagtgacaggacatggtaatagatgcaatgtataggtgaattagagagaggtatcaagcttgactcccaggtttctgatagaatggctgaattgatggcaatacctttcactgagaggaaacattggcagaaaaccagttttgaatgaagaggatgcttccttttccttctgacatgagtggaaccagccataggccctcatcagaggcagatgctggcactttgcttctcgtacagcctgcagaatgttaatactcttggataatgtatttaaggatgcttaagttcatcatgggtcctctggaaatctcctacctttgtgagcaaagattactgcagggtggaagacaggtccatgattgcccaggctgcagtgcaagaagtatgatggcaccatatctcatcttgcacctcaatgatcatctaagcaagaatccttctgcaagatcccatctaaaattacatttccaggcattccacataaccggagggaaaaaaaaacatggatcctatgggaaagtattgaagagtttcaaaaataagaagaaaaatagcagaacagtatgagaagacagatggctcagctgatgacaaaatccatttgacttttaccaca

SEQ ID NO: 40517 - DNA, 886 bp, Homo sapiens
tgtccggtgccgtgagttacctgctcagccctggagcaggggtcaaagctgggcggagctggacagccagtctcagcctcaggtactccagtgacaagcagcagcaccagtgctgatgagggtagcagggaaaactggtgaaatgtgccgaggtctctccagaggtggtaggcggttgcgccagcttcacatcctggataggcaggaacgtttccctatcatactcctgtcccgggtctcatgtgtctcagttcaaacagacactgccgtctatcttcaagctgcaatgaagctgagagccacagaaaacacctgtaccatggtttcagggaggagtctcttccctcagccgaaaacagacagctttgctggtcatctgttctccactgcgaggacgctgccactcagtgtggagagaggaaggggttctgcctatggtgcaagaaggtcggactcggcagttaatactcttggataatgtatttaaggatgcttaagaaattgcaacagccagttcaaccttcagcaaccaccatactgatcagtagtcatcaacattgagacgagactgtacaccagcaaaaagatcccaactcaatgaaggctcagatgattttagcatttttttagcaataaagcatttttaaattaaactatatacattgttgttttagacaagtttttgcacattcagaatacagtaaagtgtaaacatgacttttatatacactggggaaaccaaaaaatttgtgtgacttactttattgcaatatttgttttattgtgctgatctggagctaaatatatctgagatatgcttgtactgatgattattttaacaccaagatattttaaaattcattaaataaatgtttatttaaataga

SEQ ID NO: 40518 - DNA, 292 bp, Homo sapiens
aaaaaaaattctgcagaaaaaattaggcataatatacaaatctagtttggaaatacatttatcaggttctcaaatgtgtccttttgaataatctatacaaagaaactcaaaattttctcacccatacattttcttcttagcaataggtgcacataagcatatgctaatttatttatttagcctattcagggatgtgctgagagaaggcagatttcacattatttatcagagggtaacaattcttgcagagaggtgtctgctggggcgtgcagtatggtaccggtggcctttg

SEQ ID NO: 40519 - DNA, 218 bp, Homo sapiens
ctggcttctgcagctggagttaaacatgatttgctctttgctttcttaggcttttgttactgaattattttatgttatcttttagatgttgatggtcacttgcacgtgccatagcggaggtctaatggtctcaaggaggattttaactttgtattttgggtaatgtctttgtgttttccttcttctgatacattctgctttttaaatctatttaaact

SEQ ID NO: 40520 - DNA, 324 bp, Homo sapiens
cgtctgttaaaaatgtggaaagctagatccgtatattttcctttgcctcttttatcatcacatgatcccatataactttggggaggattttagaatattatttggcctttggtttttggtttttatttctcttactgttgttttatagggactagagtcttgtctggagcatactaacttttatttatggaaacatttctggcctatctttacctcccatagttcccttatgtataaatggagaatctgcagagttgatttcagttccatcatgttgatattcctctcattcaggacatctgtaaacacaaataagaattgctc

SEQ ID NO: 40521 - DNA, 974 bp, Homo sapiens
caaaaattcttcctaaagagagggaaccaaagtcacatgggtcaccttgtccacctgtgtggacgttgctcatgttcacatacccttccttgcctccttcaaggcaggtctggccacaagcccagctctggctaatgaaatgtgaagggagtcaagggccgggggcggtggctcacacctgtaatcccagcattttgggaggccgaggtgggttgattacctgaggtgaagaatttgagaccagcctggccaacatggtgaaacccgtctctactaaaaatacaaaaattagccgggtgtggtggcgtgctcataatcccagctactcaggaggctgaggcaggagaatcgcttgaacccgggaggtggaggttgcagtgaactgagattgggccactacactccagcctggatgacagagcaggactccgtctcaaaaaagaaaaaagaaatgtgaaggggtcagttttggggcaaaatatgtcattgccagtgctcaattttccagccctctcttcctctgccatgaccgttggggaagtacatgttgagatggaggtgctaaatagttgagtcataatctcacctggatacgctgtaacaaatgccctggattatcaaatcagttatgtaaactaaaaatcctaaaaccccaccgactgaacagatgccacctcgtggccgagggaatctcagaaaaaacttaaaacaattcctggccctgatgggttgggaggtcagatgcaacttgttataccccatccctttatggtttagacacagctgccgagcatgaatgaacaaaatagggatcatgagatggacagaacagacactgtggcaataagataccaaattgtaaacaggacctaaggccatgccaagcaagggttaagtcatgtagagcccgccttcatgccccgcctcccctgcccccaacttatgaataaactatgttctaactgcaaaatggg

SEQ ID NO: 40522 - DNA, 387 bp, Homo sapiens
  misc_feature (357)..(357): n is a, c, g, or t
  misc_feature (361)..(361): n is a, c, g, or t
caaaaattcttcctaaagagagggaaccaaagtcacatgggtcaccttgtccacctgtgtggacgttgctcatgttcacatacccttccttgcctccttcaaggcaggtctggccacaagcccagctctggctaatgaaatgtgaagggagtcaagggccgggggcggtggctcacacctgtaatcccagcattttgggaggccgaggtgggttgattacctgaggtgaagaatttgagaccagcctggccaacatggtgaaacccgtctctactaaaaatacaaaaattagccgggtgtggtggtgggcacctgtggtctcagctccggggtggctgggactacaggtgcatgccnccanccctggctaatttgtaaaattttttg

SEQ ID NO: 40523 - DNA, 311 bp, Homo sapiens
ctgaggtttagagaggtgaagtcatttggtcagggttacacaggtagcaagtagaagagttatgtttagaacttggctccaaagccttagttctttttattctgctaactagagcttcatagaaattaatttccgtaaagaaatgacatagaatggtagcttcaggcaaccaggtaccatgctggggagttgacttgtacatctcatttcattttcataactaccctgcagctgtcatcccatccccgttttacagttgagggacctggggctccgagaagggagatctgagcatggcccacagctggtat

SEQ ID NO: 40524 - DNA, 443 bp, Homo sapiens
accctcagaagactgacatgcaagtggggaagaggccgctcagcggccacctcctagaggaatatcagctgtgcaagggcagatgggtgacactgacagtccagtgacagccaaagagaggagcagctggagagaccaagaaggtggcgcagggaagctgaggggccatcctcgacaatcacaaagccgccctacttcagcctttcctatgtgactctagacaagggccaggggaagtcctgggatgccgcagtgcatccacagctggagctgtccagagcaggaggggccagccctgccccggcaggagtgctgcagggagatgtcctgctgcataaactggtgacctgtgacatccccaggctcccaggttctaaaattccgtggtgtgccttgaaaagtgaccattgtttttggtcacaaagtgattgttggggctcttt

SEQ ID NO: 40525 - DNA, 385 bp, Homo sapiens
gcgggctacagctggggctgcggtcagcgcttcgatcatgagaccaattccgatgatgcctgtacataccacccaggtgttccagtctttcacgatgctttaaagggttggtcttgctataagagaagaacaactgatttttctgatttcttaagcattgtacactgcacaaaaggtagacataatagtgagaagccacctgaaccagtcaaacctgaagtcaagactactgagaagaaggaaatatctgaattgaaacccaaatttcaggaacacatcattcaagcccctaagccagtagaagcaataaaacggccaagcccagatgaaccaatgacaaatttggaattaaaaatatctgcctccccaaaacaagcacttgata

SEQ ID NO: 40526 - DNA, 884 bp, Homo sapiens
tttattctatattttggaacaaatcttcacaaaattcatggtatgcacgccggccccttcctagcgtgtaggtgtgcactttgaccctgctgtagtgtgtaagtatgctcactgacctctgccctactgtatatcctgacacaggaagggggatgtcttttagaagctcatttctacctctttcccagctcaactgtgcttgtcttgactgtatcttaaaagtgctggttaatggtgggtgtctggacaaggtaggagagtctataaacctataccgaagtcctctcttatacacggttttgctttccatagtttcggttacttgcagtcaaccgtggtccaaaaatatgcgatggaaaattccagaaataaatccttcataagttttaaattgtgcaccattctgagtagtgggatgaaatgcgtcgttctgatccattgcctcctgcatgcgaatcctcctttgcccggagtccccacctgcccatcacttagtagccaactcagttctcagatcagctgtctatgtggccgtgcttatgttcaagtcacttttatttaataatggccctgaagcagaagaggcatgatgctggctggtaatttgtatatgctgaagagaagctaccaagtgcttcctttaagtgaaaagatgtgaaagttctgaacttggagaagaaaaaaaaatcaaatgctgaggtcgctgagacctactgtaagaacaaatcatcttctgtctgtgaaggtgtgaagaaggaaaaagaaatttatattagttttgctgtcacacttcatacgttcaagttatgaccactgtgtgacaagtgcttagggacatttgtaggtagaagacatgaacacgagctccgattgctggcagacgg

SEQ ID NO: 40527 - DNA, 422 bp, Homo sapiens
acaggcagatgcataggtgaaaactgcaggcaggagaggagttgaagtgtagaaatacagagctgtgaatggtcacacatattagtagttgacagtatcagtaaatgagaaaagagagaaccaggaaaaatacgtagaatgtaggaaagggggaatggagtgagagggaagaccagagggcttgcagggaaacaagggcagcaatagtgacacagaagcaagggaggggagagttctagaaacaaggatctgatcagacacggcctcctcaccagatcaacccaagcaaggttgtgtccagaaatgcataagatttgagaacttctctaggacctcaggcccaggtctcaaagaggatcccctggggcacactaggaacctcccaccagtcttcctggaagccgccctgatagcaatggcca

SEQ ID NO: 40528 - DNA, 383 bp, Homo sapiens
tgagccaccacacccggctactaaaattacaaaaattagctaggcatgggcatggtggtgcatgcctgtagtcccagctactcgggaggctgagacaggagaatcacttgaacccaggaggtggaggttgcagtgagccgagatcacgtcactgcactccagcttgggcaacagagtgagactttgtctcaaaaaaaaaaagaaaaaaaaagaggatccttgctccccacaacgccacccctcctctcctctcaattagatgatgtctataaagccccctggagccagaagcactataaatccaagacattactgttagatccaggtcggggaagcttcaaggaggtgagcatgggggaggggtggaaggtacgcggtcggtt

SEQ ID NO: 40529 - DNA, 453 bp, Homo sapiens
gaacacattgtgatttacccagttatatcaggctgtcttacaaataacctaaaaattaatatgatcaacaagtatcttaccacatcacagaatcctacccatcccactcccactacctgactactttcaaactcgacgtctttggttcttggattcttgaattcatagccagaatttctcactggtaagagttcactccagtaacacgagaacaagaacaggaaacacaatcaaggaatgattccaaagatcaggaggaaatggttagtacaacagtaatctttcttaagaattttccagtaacactagttttgcctgtcaggagagcaaagaattaaacatcttaaaatcaactctcaagacacttaacatccattttatacacaaggaagacttcaaccagctacaagtgtataatttaaaaattcagcttattcagcagagtgaatatgg

SEQ ID NO: 40530 - DNA, 349 bp, Homo sapiens
gttttgtgcctgaaacccagggcccttttggtgtatgcacacagggaatctcctggtctgtgaattgcaaaaatcatgggaaaagcatagtacctgcgctggatagcacagtccctcactcggctgcggaagggaggcccccaactccttgcacttcctgggtgaggcgatgccccaccctgcttctgctagccctccatgggctgcacccactacctaatctgtcctctcagttggaaatgcagaaatcacccatcttctgtgttggtctcgctggaagctgccagacggggctgttattcagccatcttcaagtcttgctttcaaatgtttgaagtataaacctaga

SEQ ID NO: 40531 - DNA, 274 bp, Homo sapiens
ttcaaggtgtcataatgcccttaaggtttatccacgttatagcatctgacaggatttccttcattttctatttgtttcttcttatataagagtattcaacctttaagtgcatgacaaagtttatacccattcctgttctagaatagtcttacaggctgggctctgtggctcatgcctgtaatcccgtcactttgggaggccaaagtgggaggatcgcttgagcccaggagttcaagaccaggccgggcaacataagtgagatcatgtctctaca

SEQ ID NO: 40532 - DNA, 875 bp, Homo sapiens
cgggtacgtgtacatgagcacactcgggtacgtgtacatgaggacagttgggtacgtgtacgtgggcacactcgggttcacgtacagggacacacacattctcgggtgtgtgtacctgggtggcagtgtgtgcatggatgtttgtttacatgagcatcacatgtgtgtttacgtaggtgcccgcgtgtcggcgtctatgttggtgaaattgtagaatgtgtccaccaggagagagcagtcccctctgggaatggcgggggtggagggcacaagagactaggcttaaactcatacttttaagtttgtataaaggagactgcattctggtaacacttgtgtaactgaaatgcaacaacgacaaacataatcaacagcttcactgctaccagggaggggccggccaggcttgcctagtgagcacagctgtgagagaccagggcggggggcatctgactcggaggctgggtgctgggagatgggggttctgtgcttgtctgtccccctgatctgtaacacgacctgtgactcttagggttaaaacgataaaaagggacttaggaatttggctggtgaagcgtgcgagacccacagctctccaacctactaaaacctaggagggcggccggccgcggctcacgcctgaaatcccagcactgcgggaggccgaggcgggcggatcacgaggtcagcagatcgagaccatcctggccaacacggtgaaaccccatctctactaaaaatacaaaaaattagccgggcgtggtggcgggcgcctgtagtcccagctactcgggaggccgaggagggcggatcacgaggtcaggagatcgagaccatcctggctaacacggtgaaaccccgtctctactaaaaat

SEQ ID NO: 40533 - DNA, 298 bp, Homo sapiens
tcaatttgatcaccgattaaattatctcgctcaatgtcattctcagatcttaatacatgtgatgcctctctttgtccaaataattgataagagctttgttaaaggtaggaccaaggacagaatctttgagcacttgtaggggaattaatcaattaatactcctgggctacagtttttcaaccaaatatgaacacacctgattgtattatcattcagtcttgtctataagggcatgaaaaatttggtcaaatgcctttctggccacagcattttcctgattaatccagtaagtttattc

SEQ ID NO: 40534 - DNA, 446 bp, Homo sapiens
aaaaaaaaaaagaaaagaaaagaaaagaaattaaaattctgaagtttgcatacctaactgttcacttacggtatctcacagtctaattaattcatagccacatgcatagagtttattgcatttgcaactatgcagcatcaaattgttgcaaagggacctctggaaaggactgtccttcctcccaatgtgtatgtgtgtatgtacatgtaatacatgtacatataatgaagattacatacatgtataattgtattatatacatatataattgtatacgtatataatacatttatataatcttcaattatatgtatatgtattatatatacatacatacacattgggaaggatatatatataattgaagatacagaattgaagatgagtatatttaatatttatcaaagggtaaaggcgctcatccgcagtttggatcagagcctcaa

SEQ ID NO: 40535 - DNA, 1525 bp, Homo sapiens
gaagccacagaattagtcattatacaggccacaattaatccagcacctctaatgtaaggcactttgcatatatgaactcattaatccatttatcaataaaatgggatggtgttattttctctgctttctcattaaggaaacagagacttagagacatttaatattgtatctaggtttgtgtaagtgctttatggtgagctggattttgaatctaggactgaccccaaatcccatgttattttctctgcaaaatagcaagacagaaagggcttctatatgtacacctgtcttcaaatgtaaaaggactgctaggtggcagagagattagaaatttctgatgctccaagaagttgatctcttacctatgagtggaataatgaagggggacagactctatttcagaataatgaagaaatgactatcttatgaaggtagaattctctaccacagatggtgtttagcacatgactacttcttagggagttttagaagaaactcctatttggatgacccctgactttgcttccaacttccagtatgatgttatagtaagtaaaaagcatgagacaaatctgttagaaatactgtttcttttacatgaactttctcaggaaggatttgtattttagactaattgcatgtggataaagagctgacttccaagataaaaggctcaatagttctccaaagagtttacaagtgcctttctttgaagactgccctattattttggagcttccaagacctggtcagaaatgcatacattctcaaaaatcaaaatacaatcccaaacctccatcatcagcaaggttgcagtataataaagaggctctattactttcctcaatccttctcaaagtgaatggacatcaattaacaagaaatcttagaatcattagattaccctactatagacaatggtttaaggcaattttaatgtgattctgttgtgtgtgtaagataaatattatatttattttcaaatttcctcctgtgttttactacattttgggggagggaatgcccttttcatcttcccacaatctctttcatagacaccctttcaatttttgttttaggaatacatctcctctaataaatcaagggttttctaggaagcacacttttgtcctggacagagcacaggaaaattaaataaagggctggctactgatcagtaaagagaaatcgtagagccaggtaacatcactgctgctgtctccaccactgtcttctctgcctttgccccatctctccctttctcctctttacttccttccagccaagcaattggtgccccattcaacctccagtcctgtgaggagtctgaaatgattctggacttgcagtgactgtttcctttattctttattccccaaaccaaggataattatgagacaaacctaggccaggcatggttgtcacgcctataatcccagcactttgggaggtcgaggcgggaggattgcttgagtccaggatcaagaccagcctggacaacatggtgagatcccatctctaccaa

SEQ ID NO: 40536 - DNA, 420 bp, Homo sapiens
gcaaatacagtgaacaaagcaaagaaacaaatggaagtgagcctctaggtgttttccctacccaaggtactccagtagcatctcttgacttagaacaagaacagctcacaattaaggctcttaaagaattaggtgaaagacaggttgagaagtcaacttctgcacagcgtgacgcagaattgccttctgaagaagtactgaagcaaactttcacatttgctccagaatcttggccacagagatcatatgacatcctagaacgtaatgtcaagaatggatctgatcttgggatttcccagaagcccatcactatcagagaaactactagggtagatgctgtttccagccttagcaagactgaattggtaaaaaagcatgtcctagcaagacttctgacagacttctcaggtaaccatttat

SEQ ID NO: 40537 - DNA, 440 bp, Homo sapiens
ctactgaggtttccatttgtaaatttttattcataaatcataaatcagtgagtgaagggctgaaatggcaggcataaagggtatgagtaggagcctagcagagagggcattggggctagttcttgtcgaacggtgggaattgtagaaagagcagagagaagagctttctatgctgtaggagctgttctgtccaaaagaaggaattgtgggccaggcgcggtggctcacgcctataatcccagcactttgggaggctgaggcaggaggatcacaaggtcaggagattgagaccatcctggctaagacagtgaaacccgttctctactaaaaatacaaaaagaaaattagccgggcatggtagtgggcgcctgtagtcccagctactccagaggctgaggcaggagaatggcgtgaacccgggaggcggagcttgcagtgag

SEQ ID NO: 40538 - DNA, 258 bp, Homo sapiens
gcagagatgcatagggcaagaaaaagtggtggtgaaagctggggcaggtaggtaattctgctaaatagctgtgacaaaaaattcctcatgctttttgttctccgaaatcagcttaacgaaaagagacacccttcccattgtgacttcaataatactctctcttctttttttctaaacctaccacagagtcagacacggaccacacatttccatctttttctcatatacaattggctgaacaatttcatcttcgatggt

SEQ ID NO: 40539 - DNA, 390 bp, Homo sapiens
cgggggcttcacctggaccacgcttgggggctgtctctaactcctgtttggcagggcagtctgaaagtctgcagttagaagacatttctgaacagtagggtggagcaagggtctccacagggaggtgagcaggatgcttcgctgggtacacagagagaatattagaacttcaatcattttttctctgccttttaaattatattcctgtacaaattttataacatgcctaccatttaagttcagggtcacatgactttaatttgaaaacagatacacacatattggaaatgtttgcacatatgcacaggggtgtgcattccaaaacactggagaaatgtttttaaaaatacaagtgaccagctgggcgcggaggctcacgcctgtaatccc

SEQ ID NO: 40540 - DNA, 387 bp, Homo sapiens
aactctcccacagggcaacttggcaaaatgctcgaaagccttaacaatgttcttatcctttcacccagtaattctccttctaaggatttatcctaaaaggaaatagagatgcacaaaaaaatacaaatacatggaaattcattgtggcaatatttaaaatagagaaaaagtggaaaaaacttaagttgtccatactatgaaatcctatgcagtaacatttatactatgaaatgcaatgtaattatttaaaatcatgtttagaagaatatttaatgacatgagtaaatgctcatggtctaacttaagtgggggaaaggaggatacacaaacatacagtgaaatcccaagtgtgtttgtgtgtgtgtgtgtgtgtgtgtgtgtgtgtgt

SEQ ID NO: 40541 - DNA, 424 bp, Homo sapiens
cccaaaggcattctttctctcctttcaaggtggcatcacagctgtcaacaggagaacattctgacatatctatcgtccacagataggaagagaccatcaaatggtgaaaagaaagcatttttctaaataaagcatttctgagcataacaagcacaaaactggagaatacaaaggaatgaaaatatagcataagggagtcagaacatctttatccccgagaaggtttttaaaatatttcttcccatgttataaagtactgggtctaccaaacaaatggaaattgtttaaactaataaattcattttgccactttaaaattaaccaaaacacatgtaagaaaatgctagtttctgttcagaatgtaataatcaatgtcattaatttgggctgatacaattataatctaaagcaaataaatttggta

SEQ ID NO: 40542 - DNA, 371 bp, Homo sapiens
atccctctccaatcccattctcctctccttttcctctccattggtaaccactatcttgaagtcgatgcaaatcctcttgcccctgtttttgtatttttactatgtttgaatgtgtttataaacaatgtatgattgttttgtggttttggactttacatgttaaatgttgtgttttatatgtatgcttctacaacttgcttctcattttttgagatttatcaatgttcatacataaaaatctagtttattcatttaactggtattataactgaataaaagtgctacattttattcattcttctgttgatggacctctaggcttctcccctttcttttttcactattaaaaacaatactgaagcagaccttct

SEQ ID NO: 40543 - DNA, 405 bp, Homo sapiens
taagtggggagtgcgctgggcagagccagcctggggagtgggaagggcagctttctgtccacggggtcccttctggagacagagaggagctgcttcgaactagtgacagcaataaacctggtttgcgtgctcagaaatgtgaaagtaaccccaagaactcccaatccaaatgcccccttctctttctcgggccaccagatgatcctggtctctttacagatgaggagatggaggcaagttaagttttttattctaagaaggcagggtaagaggtgggcagaagaaaacagaaggcaggatattaattggattctaggctaacgggcctagcgcaagacccagtcctgtccctcccctgtcctgtgactctgggctcagttccttcatctgtgaaactcctgcctc

SEQ ID NO: 40544 - DNA, 346 bp, Homo sapiens
gaccattttccacacccctatgattgcatccccaacaaatcagcaacacccaaactatccttgaaaaactgtagcctctgaacttccagggagactgatttgcataataaaactctggtctcccattccgctggctctgcatgacattaaactctttctctattgcaatccccgtcttgataaatcagctctatcttggcagcaggcaagatgaacccattgcatggttataggggcacctcccatgagtgggaaggattgggaaagcacccatgtgcatccacacagcggcagtgtgccggggacttagcatggcacacagattccctcacatagagtctaaggt

SEQ ID NO: 40545 - DNA, 222 bp, Homo sapiens
agaccctgtctctaagtatatatatatgagagaaggttcattttttttcaactggagggaaaggacctcacaaatagtgatgcttatggcactgtgtatattagtatttcctgctggatgtagtacaagcaaaagagataaaaattacattaaataaagcaaagtcctagagactcagattgccttttttctgctttgatcagattttcagtctaaatgtga

SEQ ID NO: 40546 - DNA, 592 bp, Homo sapiens
tggcgttttctttgggggggttttgtttgtttgtttgttttgagacactgtctcgctcattgcacttcagcctgggtgatagggcaagactctgtcccaaaaaacaaaaaaagaaaaaaagaaagaaaaaattcaggaatcaggggtctaggagtctccctcagcttgaagagggagtgagcacatgggaattacaaggagagggagttgtaatcagaaagtgagtttaatttctgaaattaagtccatcaagaactcgtgacttccagagggaccctgtgaactagaagtctaaaaggagtaaaggtctttgaagaccaagaggatgagaaattttgagacaaagttgttggatgttcatctgtatgaacactgaaatgtcttaagattatagtaggatttggggaattggggaaagaagattggacaagataaggggttaaaaaaagagtgacaaggatatcagaaggtaacagcaacaaagaacagaagatgaccttagcctcaaagacacattgccaagggtgaaagagaatggtctgaaagcagggtttgacacttaggccaaatgcttgaaagcctaatttgcatt

SEQ ID NO: 40547 - DNA, 774 bp, Homo sapiens
aaaataaaaaaaataaaaaaataaaaaaaaaaatctcactgtggtcttaggggatgttatttcaatagtgaactatgttccctctgggatcagagcaggtgagcccatatccagagctccaagactcagtttaggggaatagatggcaaagcagagaatctagagaagcagcccagggtaggatctggatggtcacctggagaggagacctgcagggaatggatggctgtcttcatccagaaagacagagaatatattccacttacaccagagggcagacaaagctgcctaaccctgatggaggtccagtgagtgcccattgcaggaagcattcaagctgaggctggatgaacatcgacagggctgttgagagggagattagatggcatttcagggtcttttcccttttaagattctggcatggagagctctagttttccaaccagcttcatttatcaaatcaacaaaatgattgaaatgatcagagtttgcagggaagatgatgacaatgctcactagcacccagtttgcatcaaattgaatacctgcattggactgaatattcactaataatacacattgattataagtacccttggccctagtccccaaggtacctgccagtaggagcaaaggggaccctgggagagacccaggagtctatgcaatggaaggacaggtgttaaatatatatatatatttttttttgaggtagagcctgggtaacacagcgagactctgtctcaaaaatacaaataaaaaaaataaaaaaat

SEQ ID NO: 40548 - DNA, 373 bp, Homo sapiens
acaagatcgttcatctgaacagatgcccagatggcccgagtggtttttttccaactcttttgtggactcgaggacatacagttttttaatggagacgctgtgtttttctcattttctttcacagcacacatgttatttccccactgaatacacccactgttcttacccttgcactgtcacccatacaggacgcacagggatggacgcggacggaattctgactcagccacacctggaggaaattattgtgtcaaaaatgtggggacacaagggctggcactgtggtttgcaatggtttactgatgagacagcaaaaatgagacaggaccatcagatgcaataaagattctaatttaaaaagataaaatgtgtt

SEQ ID NO: 40549 - DNA, 721 bp, Homo sapiens
ggccactcgcccacttggggacacactgagagctggagatgctctaggatgcaggaaaacagtgagagagaaacccgcagggatccaaaatgagcttttataatcttgactctgggagaaaccctcaaccactaaggccacaggcctgacatacagagctgcctaaagattgcacagggccattgctgcagaaagggagccctcacagaagcccacaggcatctgaacctggaataacctcaactgggagccatttgagagcccagatgccagggatctacacatgtgggtgctgctcctagggggaagtggggatcctaggggctgtcattcacccctgggagggtccctgccaccctgcagcaggctgctgttgagactgcgatgtgaccggaccacactccccccagcctgttgcccatgctgcttgcctgagatgcgccccatcctctctggtccaaggctgaaagcaccattttcagtttatcactgggctgcaccccacattcaggccaagttggaggcaatgtgactgaatctattgcccagttgggagaagaaaaggggagtccaagctcttctaagcacacgcattaccctacccactgcccttatcactttatgtggttccagatatcttgaaggttttgctcattcttcaatcttttttagcccttaattttgtttgactggattgtttcaaaagatctgtcctctacta

SEQ ID NO: 40550 - DNA, 345 bp, Homo sapiens
gttttggtttggtttttgcttttttgagatggagtctcgctctgtctcccaggctggatgcaggtcatggtgcctttggcaccatggtgaatagaaaggtgagcagagccactgctcagagttggctttttgtttctcagaaagtatgtgtctctgtcctgagtgtgactaaggacttggtaagaacacaccaattgagaagacactcagttggggtgttaatttccatttctgtgtcctagaggttctcactcccctctccaacaaggaaataggcagtggattggtggggtctcatctggtgcaggctcacctcagtagccatgggatccctccctgacaggt

SEQ ID NO: 40551 - DNA, 684 bp, Homo sapiens
taaattgtatgtgtacttgcatctaagactgtggtagagaagtaaagagaagtcaattccttcttcctcacctctcagcctccagatcccttcctgcccatcccttccctacaatgcccactccagacgcaaagatacacttttttcctttggactgtgaacatggaagcctcagcctgaatgtgagtggcaagtggcttatctggagccacctgcccaagtcttactaaaatgcagctgttgttagacaactgttgaaaactccagaaatacatcacccaaggtggcagttctcagtatttggcagaacaattgcaattgcactgggtatattatatatatatatgtatgcatatatatcatattttttacaaggaacattttatgatgaaagaagaaacccttctctgccttctctcccacgaattctgtccctgtatcctctggatgtaaaaagcaaggagagaccccaactgtctccatggagaagaactaggaatcaccacaaggggaagaaatgtacatgaagtctccattacctcgaatttttttctcagtctcactggttgtgatttggtcactttagtgttgggacaggggaaagggtctgtgcgtgggcaaagctgaaggtgatgaggaagaagagacgaacattaaagatgtctatttactatgaaaaaaatg

SEQ ID NO: 40552 - DNA, 440 bp, Homo sapiens
taaattgtatgtgtacttgcatctaagactgtggtagagaagtaaagagaagtcaattccttcttcctcacctctcagcctccagatcccttcctgcccatcccttccctacaatgcccactccagacgcaaagatacacttttttcctttggactgtgaacatggaagcctcagcctgaatgtgagtggcaagtggcttatctggagccacctgcccaagtcttactaaaatgcagctgttgttagacaactgttgaaaactccagaaatacatcacccaaggtggcagttctcagtatttggcagaacaattgcaattgcactgggtatattatatatatatatgtatgcatatatatcatattttttacaaggaacattttagtgatgaggaagaagagacgaacattaaagatgtctatttactatgaaaaaaatg

SEQ ID NO: 40553 - DNA, 251 bp, Homo sapiens
gcctctaagccctcagggacagtgcacacgtggagagaagtcctttgggggattgagcagttttttgagcaagcgcatatgtaaggagcacatcagaagctctggagaggcaaagtcaagcctttgaagggcataggcccaagcactggctgcccaagagaagccccaggcccttctctgctggtagcatctgctccctccaggtgctggcggcatcacctagtcatgcaggtgacatggggcctcacaca

SEQ ID NO: 40554 - DNA, 433 bp, Homo sapiens
gcgtcctcagctctcacacctgccaggcctgtcatcccctgcaggatgaagcctggtgtccatggcttgcccttagcacctcccacaacattgtaagccttgtagctccttcctatgggctgctgaatccacacagccctgaacgtcacagccagcctccccgactcaaaccccacggaagctcagggttcgttcaattcctgaatcctgcatggagccctgcctgctccctccctgtcacctcagcctcacatcctctcctctcactgccatcgagggagccctttgaggccacctttccatttctgagccattccccctaagcctcacgagggcaaggaatgtgtctgaataacaacagcttccatttatcaagggcttgctatatgccaagccctgtgctagcgcttgacgtgggcagcagggtctccca

SEQ ID NO: 40555 - DNA, 1746 bp, Homo sapiens
aaggaagagaagtagaatcagaagttaggacatctattgcttgatgcttctgggatgggtaagacgtagttctggtgatagaagttgaagctgcagcataatgagagatgaaagagaaactgctcttctggtgattttaaccctagggatgtagctactgggacaggaggaagtgagggacccagtgctgcagggtccctgttgtcacatatgtcaatcctactttaaagtcaaataatggattctggctgataaagcctatcagaattatggtgttgatacgaaagtgtcacatagccaccaaaatgtgttctctactttcttgctttgctctgattagctaagtcttggtcacatggctttatagcactgggaaaaccaggatctggtcttttatagggtaggaagtgagccctatcttttgtgtagatttgtggcggggagtttcccaagcatgggaaatgggctcagatgatgtggttataaaatgtgaatgtccattaaaaggcagtcagtgttggctactctaagccttcaaattgttgcttttccccttcaacagggaccaaggggagatactggaaacctctgagcttcagctgttggtttttgggttttgtttttgttttattgagatacagttcacttaactatacagtttacccatttaaggtatacagtgttttttagtaaatttacagaattgtgcaactattacaattttggaacatttttgacacctccccccaaaaaaacccctatgccccttagcagtcatcctcagtctcctcagccctaggcaaccactcatctactttctgtctttatagatttgcctatttgggacatttcctataaatggaatctgtatgtggtctttgcttggttttgtttttggggtggtgggggctgactacttagtcttgacaagccaaggtcccaacccagcagtagaaatataaggagtcacggctgtgaggatggcctcacaatgggctcagggtagtgaacttctgtcccctaagttatctcagaaatgaggccaactctctgccctctagaatggatggccctgagggagagaaaggttcatgtccttcctggctggtgacagaaggctggactgtgcctgaaatcaaagcttctcacctggatttgggcaaatcaagcagtcccgaatctcagggtggggtgagatgtgtgctgaagagggcaacacaggagctgcactgcagatggcgacatgcagggtttcaaggccaaagctggtgtgttcttcccttaagaattgctgtaggctaggtgaggtggctcacacctgtaatcccagcactttgggaggctgaggtgggcggatcacctgaggtcgggagttcgaaaccagcctgaccaacatggagcaaccctgtctctactaaaaatacaaaattagccgggtgtggtggcgcatgcctgtaatcccagctactcgggaggctgaggcaggagaattgcttgaaccccggaggtagaggttgcagtgagccgagatcacaccattgcactgcagcctgggcaacaaaagcgaaactccatctaaaaaaaaaaaaaaggccgggtgcagtggttcatgcctgtaatgccagtgctttgggaggccgaggtggctggatcacctgaggtcaggagtttgagaccagcctgaccaatatgatgaaaccctgtctctactaacaatacaaaaattagctgggcgtggtggcggga

SEQ ID NO: 40556 - DNA, 745 bp, Homo sapiens
  misc_feature (535)..(536): n is a, c, g, or t
  misc_feature (543)..(543): n is a, c, g, or t
aaggaagagaagtagaatcagaagttaggacatctattgcttgatgcttctgggatgggtaagacgtagttctggtgatagaagttgaagctgcagcataatgagagatgaaagagaaactgctcttctggtgattttaaccctagggatgtagctactgggacaggaggaagtgagggacccagtgctgcagggtccctgttgtcacatatgtcaatcctactttaaagtcaaataatggattctggctgataaagcctatcagaattatggtgttgatacgaaagtgtcacatagccaccaaaatgtgttctctactttcttgctttgctctgattagctaagtcttggtcacatggctttatagcactgggaaaaccaggatctggtcttttatagggtaggaagtgagccctatcttttgtgtagatttgtggcggggagtttcccaagcatgggaaatgggctcagatgatgtggttataaaatgtgaatgtccattaaaaggcagtcagtgttggctaaaaaaaaaaannattacancaaaaaacctcttcaaaattaaaacaaaacattggggggggcctcgtacccaattgcccttatgggggcgtttaaaatccacgggccggggtttaaaacggggtaccgggaaaacctggggttcccatttaagccttggaaaaattccccttttcaagggggctaataccggcccccacattcgctttccgtcgccccgtgg

SEQ ID NO: 40557 - DNA, 385 bp, Homo sapiens
tgccgtacatacatatctcttcatctgactcttcatttggatccttcgaaatatcctttgtaattaatcagccgtaataagtaaattgttttcctgaggtctgtgagccactctagcaaattatcaaatctgaggagggggtggtgggaccctccaatttgtagccaagtcagaccgaaactgtgggtaacctgaggacctaccatttgtgattggcttctgaagtgggaggcagtcttgtaggatggagaccttaacctgtggggtctgcactaactccagttagtgtcagaatattgaatggaatcataggacattcaactgagtcagagaattggtcagtgggaaaaaccaccacaaatctggtcacagaagtgttgagtgt

SEQ ID NO: 40558 - DNA, 1005 bp, Homo sapiens
tagttaaaaaaaaatgcttatgtttttataagcatagccaaaggtctggaattttgtggctggaggggccctgtctcgttcatctccattttgcagaggtggtgactgaagccactgagtgtcggtgctttactcatggtcatccagttgatccctcagtggcagaaccaggcctgggagcctgtttctggctgcctggtccagtgcgctttgggaggtcacaacccaaacctagtctggggcaagacctccctttgggagatggcctctgatatttttggagcaccaggtcttccttagtgtttgagaccgtctcggagctgactggctttcacatgagaaacagttgggtctgtgttacatgtgtgtctattattttatgggataatagttcagggccgtcagggggaaactcagtccaggtagctcacagagggacccactgtacataagcgagcatgacctgtgcaggctgcactcctttgcagagttgtctgatgtcctgtgggccatgctgatgcgcgtgggcctccgcgttgacaccacctatggcgtcttgctactgctcccggttatcgcgctctttgcagttttgaccattttcatccttctgatcatggaagggctttctgcgtttcttcacgccatacgcctccactgggtagaatttcagaacaaattctacgttggtgcaggcaccaaatttgttcctttctcattcagtctactttcatcaaagttcaataacgacgacagtgtggcatgatcatattgctgtaaccaacaagctttcagatttatggagaatgaccatgttatagactttcacttatgtcagatttatgataggaaaaattccatcttcattactgccttatgacatagccaaataattctgtaagatatacctcttcctcatatgttaaatattttgtaaagtttaccaatttgagatataaaaatttcttttggttttttatgatgagcaaatataagttaatgcca

SEQ ID NO: 40559 - DNA, 793 bp, Homo sapiens
gtgtaagcctgagtggattttgcttttgatttagctttaagtaactataaatcttcgtttttctaaggaagtgtttttggttttgttctgaattctcttccacgattttctgtgtgtggaggtaaatccacttgctgattcacactcatagtcctcagacggtctttataatcatcaaagaacaggaaaacagaaccaagaatatacaaaatattctgcttgtgcttatactttctcatttacagtgtttacagaaaatgattagttggagtttgactctctttagaatttttgtaaagtttccttgctggtctaaaacaaaataatactttaccacagggtcattaatgttattcatcagttctagaattcagctatgagtttaggaaaagaaaacccgctggcaagtgtagctggctggcatttattgaatgttcctcgcgtggagacattgttcgatctttcctgatttcatcgtgtgctgctgaccctgcaggcaggccttcacgttttaatcgggtttctcaccttctgcactaacaggagtatgtccagagagtgctgctggttgtcacagcattgtctgtccctgtcctcttcttgggaaagccactgtttttgttgtggcttcacaatgggcgtagttgcttcggggtgaaccgggtaagtgcgggtttggatgcatttacaactgtgagcaaagcttgctttcggttatacaaggattggtgtagaaaacacctcctggagggtccctgtctcttgatttaaaagccacgacagctccctttat

SEQ ID NO: 40560 - DNA, 568 bp, Homo sapiens
aagagtatgaaagacacaggccagtggcttcctcccaccccatagccttacttgtccacttccgactccatctcaaaaaaaaaaaaaagaaaaaaacaaaacaaaaaaacccactgtttttggtatactgcatgaagattattggaattacacttggaactaattactaccctcttaagtaaccattgttttgttttaggagcagttgcagaagctcgaggttgaactgagagaagtcactaagaacaaggagaaactgaggaaaaacttgctggaactgatagagtacactcacatgctgagagtgacaaagacctttgtgaaacgcaatgttgaggtactgaacagctcgtgaggaaatacagctgtttttataaacagctttttataaaaatctcattcccataggctgtgtattttgctattagttcatatagatatgttgcttcttttaagagattaaatttatttatttatttaattttatattttgtttttgagacggaattttgcactccagcctgggcgacagagtgagaccctgtaccctgtatctaaaaaaaaaaaa

SEQ ID NO: 40561 - DNA, 540 bp, Homo sapiens
gacctcgcggactgctgtggcggcagctggagcggcggccgcggtggcagaaccgggggcggccgctgcagtctggagccccatagtgcggggccgcggccaggccacaggaagagctcgaggcccgggccgcaccggctgagtgtgcgggcccgcgcggctcggagccgccgccgcccatcgagcccctccgggcgtgggtcggcccgccatggggtccctgttccggagcgagaccatgtgcctggcgcagctcttcctgcagtcgggcacggcctacgagtgcctcagcgccctgggcgagaaaggcctggtccagttccgagacgtgagtgtcgcccgggagacgcgggccgcacctgctctcctggcgcccccaatcccgcgcatcgctggggccctcccgcggggagcaccgaggaagggcgcgccccgtccccattgtccagacggggaagatgacaccccagctcagcggccaaagcttcccggagcgcggggctgactccagggtcgccggccgtctgtgtggtcggcggc

SEQ ID NO: 40562 - DNA, 550 bp, Homo sapiens
caccgtgttggcccggctggattttcaggcttttttggtaacagttgacaaattgctctcaagaaaagttgtgtcagtttatagtttcattcaatagtatacaagagtgtacatcccccaaactttggtgatgttttattttttacataaaagtatttttaaattttagaaatttaaaccatatttttcatccttttctcagctcaaccagaacgtaagttctttccaaagaaaatttgttggtgaggtgaagaggtgtgaagagctagagcgaatattggtgtatttggtacaggaaattaatagagctgatattccccttcctgaaggagaggccagccctcctgcgccacccctgaaacaggttctagaaatgcaggtaacttgcttctgacgaagctggttgcagccattgatcttgggggctgcttacttacttatttcatgttgtctaatgcttttctgcctttcttctcaaaactatggaagatggtgatctctctaggcagagagattaaagaccgctattatgattaaccctcagtaatag

SEQ ID NO: 40563 - DNA, 3021 bp, Homo sapiens
gacctcgcggactgctgtggcggcagctggagcggcggccgcggtggcagaaccgggggcggccgctgcagtctggagccccatagtgcggggccgcggccaggccacaggaagagctcgaggcccgggccgcaccggctgagtgtgcgggcccgcgcggctcggagccgccgccgcccatcgagcccctccgggcgtgggtcggcccgccatggggtccctgttccggagcgagaccatgtgcctggcgcagctcttcctgcagtcgggcacggcctacgagtgcctcagcgccctgggcgagaaaggcctggtccagttccgagacctcaaccagaacgtaagttctttccaaagaaaatttgttggtgaggtgaagaggtgtgaagagctagagcgaatattggtgtatttggtacaggaaattaatagagctgatattccccttcctgaaggagaggccagccctcctgcgccacccctgaaacaggttctagaaatgcaggagcagttgcagaagctcgaggttgaactgagagaagtcactaagaacaaggagaaactgaggaaaaacttgctggaactgatagagtacactcacatgctgagagtgacaaagacctttgtgaaacgcaatgttgagtttgaacccacttatgaagaattcccttccttagagagcgattctttgttggattacagctgtatgcagaggctgggagcaaaactgggatttgtgtctggcctaattaaccaaggaaaagtggaagcatttgaaaaaatgttgtggagagtctgcaaagggtacaccatcgtgtcctatgcagaactggatgaatcccttgaagaccctgaaacaggggaagtcataaaatggtatgtctttttaatatccttttggggagagcagattggccacaaggttaagaagatatgtgattgctaccactgccacgtgtacccctatccaaacacagccgaggagcggagggagatccaggaggggctgaacacccgcatccaggatctctacactgtactgcacaaaaccgaggactatttgaggcaagtgctatgtaaagccgccgagtctgtctacagccgtgtgatccaggtgaagaaaatgaaggccatctatcacatgctgaacatgtgcagctttgacgtgaccaacaagtgcctcattgctgaggtctggtgtcccgaggcggatctgcaggacctgcgccgggcactggaggagggctcgagagagagtggtgctacaatcccctcattcatgaatataatccccacaaaagaaacaccccccactcggatccgcaccaacaaattcaccgagggatttcagaacatcgtggatgcttatggagtcggaagctacagagaagtcaatccagctctctttaccatcatcaccttcccgtttttatttgctgtgatgtttggagacttcggacatggctttgtgatgtttttatttgccctcttgtgggtgttaaatgaaaatcatcccagactaaatcagtcacaagagatcatgaggatgttttttaatggccggtacatcctcctgctgatggggctgttctcagtgtacactggcctcatctacaacgactgcttttcaaagtcagtcaacctgttcggctctgggtggaacgtgtcggccatgtacagctccagccacccacccgcagagcataagaagatggtgctttggaacgacagcgtcgttagacacaacagcattttgcagctggatccaagcattcctggagtgttccgaggcccttatccccttggcattgatcctatttggaacttggccacaaatcgcctcacttttctaaactctttcaaaatgaaaatgtccgtgattttaggaatcattcatatgacttttggagtcattctgggaatatttaaccacttgcacttcaggaagaagttcaacatttacctggtttccatcccggaacttctcttcatgctctgtatctttggataccttatatttatgattttctacaagtggctggttttttcagcagaaacctccagagttgctcccagcattctgattgaatttattaacatgtttttattcccagccagtaaaacaagtggcctttacacagggcaggagtatgtccagagagtgctgctggttgtcacagcattgtctgtccctgtcctcttcttgggaaagccactgtttttgttgtggcttcacaatgggcgtagttgcttcggggtgaaccggagtggctacacacttataaggaaagatagtgaggaagaagtttcattgctgggaagccaagatatagaagagggaaatcaccaggtggaagatggatgtagagaaatggcgtgtgaagagtttaattttggagaaatattaatgacccaagtaatccattccatcgagtactgtctgggatgcatctccaacaccgcctcctacctgaggctctgggcgcttagcctggctcacgcacagttgtctgatgtcctgtgggccatgctgatgcgcgtgggcctccgcgttgacaccacctatggcgtcttgctactgctcccggttatcgcgctctttgcagttttgaccattttcatccttctgatcatggaagggctttctgcgtttcttcacgccatacgcctccactgggtagaatttcagaacaaattctacgttggtgcaggcaccaaatttgttcctttctcattcagtctactttcatcaaagttcaataacgacgacagtgtggcatgatcatattgctgtaaccaacaagctttcagatttatggagaatgaccatgttatagactttcacttatgtcagatttatgataggaaaaattccatcttcattactgccttatgacatagccaaataattctgtaagatatacctcttcctcatatgttaaatattttgtaaagtttaccaatttgagatataaaaatttcttttggttttttatgatgagcaaatataagttaatgcca

SEQ ID NO: 40564 - DNA, 2752 bp, Homo sapiens
gacctcgcggactgctgtggcggcagctggagcggcggccgcggtggcagaaccgggggcggccgctgcagtctggagccccatagtgcggggccgcggccaggccacaggaagagctcgaggcccgggccgcaccggctgagtgtgcgggcccgcgcggctcggagccgccgccgcccatcgagcccctccgggcgtgggtcggcccgccatggggtccctgttccggagcgagaccatgtgcctggcgcagctcttcctgcagtcgggcacggcctacgagtgcctcagcgccctgggcgagaaaggcctggtccagttccgagacctcaaccagaacgtaagttctttccaaagaaaatttgttggtgaggtgaagaggtgtgaagagctagagcgaatattggtgtatttggtacaggaaattaatagagctgatattccccttcctgaaggagaggccagccctcctgcgccacccctgaaacaggttctagaaatgcaggagcagttgcagaagctcgaggttgaactgagagaagtcactaagaacaaggagaaactgaggaaaaacttgctggaactgatagagtacactcacatgctgagagtgacaaagacctttgtgaaacgcaatgttgagtttgaacccacttatgaagaattcccttccttagagagcgattctttgttggattacagctgtatgcagaggctgggagcaaaactgggatttgtgtctggcctaattaaccaaggaaaagtggaagcatttgaaaaaatgttgtggagagtctgcaaagggtacaccatcgtgtcctatgcagaactggatgaatcccttgaagaccctgaaacaggggaagtcataaaatggtatgtctttttaatatccttttggggagagcagattggccacaaggttaagaagatatgtgattgctaccactgccacgtgtacccctatccaaacacagccgaggagcggagggagatccaggaggggctgaacacccgcatccaggatctctacactgtactgcacaaaaccgaggactatttgaggcaagtgctatgtaaagccgccgagtctgtctacagccgtgtgatccaggtgaagaaaatgaaggccatctatcacatgctgaacatgtgcagctttgacgtgaccaacaagtgcctcattgctgaggtctggtgtcccgaggcggatctgcaggacctgcgccgggcactggaggagggctcgagagagagtggtgctacaatcccctcattcatgaatataatccccacaaaagaaacaccccccactcggatccgcaccaacaaattcaccgagggatttcagaacatcgtggatgcttatggagtcggaagctacagagaagtcaatccagctctctttaccatcatcaccttcccgtttttatttgctgtgatgtttggagacttcggacatggctttgtgatgtttttatttgccctcttgtgggtgttaaatgaaaatcatcccagactaaatcagtcacaagagatcatgaggatgttttttaatggccggtacatcctcctgctgatggggctgttctcagtgtacactggcctcatctacaacgactgcttttcaaagtcagtcaacctgttcggctctgggtggaacgtgtcggccatgtacagctccagccacccacccgcagagcataagaagatggtgctttggaacgacagcgtcgttagacacaacagcattttgcagctggatccaagcattcctggagtgttccgaggcccttatccccttggcattgatcctatttggaacttggccacaaatcgcctcacttttctaaactctttcaaaatgaaaatgtccgtgattttaggaatcattcatatgacttttggagtcattctgggaatatttaaccacttgcacttcaggaagaagttcaacatttacctggtttccatcccggaacttctcttcatgctctgtatctttggataccttatatttatgattttctacaagtggctggttttttcagcagaaacctccagagttgctcccagcattctgattgaatttattaacatgtttttattcccagccagtaaaacaagtggcctttacacagggcaggagtatgtccagagagtgctgctggttgtcacagcattgtctgtccctgtcctcttcttgggaaagccactgtttttgttgtggcttcacaatgggcgtagttgcttcggggtgaaccggagtggctacacacttataaggaaagatagtgaggaagaagtttcattgctgggaagccaagatatagaagagggaaatcaccaggtggaagatggatgtagagaaatggcgtgtgaagagtttaattttggagaaatattaatgacccaagtaatccattccatcgagtactgtctgggatgcatctccaacaccgcctcctacctgaggctctgggcgcttagcctggctcacgcacgtaagttcctgcttagacctgcagttcccaatgccctgtagtgccagcagactcagggggcactgtgggatattttaactttgtaactaatagtcatagcaccatctttcagctgccacgtgaacttacactattcactacttaatacacagctctcttggctatttcttttggctgaggagtgctgtggaaaaatcacagagggagtctctctgaggctggtctggcttcagagcctgcccaattta

SEQ ID NO: 40565 - DNA, 1314 bp, Homo sapiens
gacctcgcggactgctgtggcggcagctggagcggcggccgcggtggcagaaccgggggcggccgctgcagtctggagccccatagtgcggggccgcggccaggccacaggaagagctcgaggcccgggccgcaccggctgagtgtgcgggcccgcgcggctcggagccgccgccgcccatcgagcccctccgggcgtgggtcggcccgccatggggtccctgttccggagcgagaccatgtgcctggcgcagctcttcctgcagtcgggcacggcctacgagtgcctcagcgccctgggcgagaaaggcctggtccagttccgagacctcaaccagaacgtaagttctttccaaagaaaatttgttggtgaggtgaagaggtgtgaagagctagagcgaatattggtgtatttggtacaggaaattaatagagctgatattccccttcctgaaggagaggccagccctcctgcgccacccctgaaacaggttctagaaatgcaggagcagttgcagaagctcgaggttgaactgagagaagtcactaagaacaaggagaaactgaggaaaaacttgctggaactgatagagtacactcacatgctgagagtgacaaagacctttgtgaaacgcaatgttgagtttgaacccacttatgaagaattcccttccttagagagcgattctttgttggattacagctgtatgcagaggctgggagcaaaactgggatttgtgtctggcctaattaaccaaggaaaagtggaagcatttgaaaaaatgttgtggagagtctgcaaagggtacaccatcgtgtcctatgcagaactggatgaatcccttgaagaccctgaaacaggggaagtcataaaatggtatgtctttttaatatccttttggggagagcagattggccacaaggttaagaagatatgtgattgctaccactgccacgtgtacccctatccaaacacagccgaggagcggagggagatccaggaggggctgaacacccgcatccaggatctctacactgtactgcacaaaaccgaggactatttgaggcaagtgctatgtaaagccgccgagtctgtctacagccgtgtgatccaggtgaagaaaatgaaggccatctatcacatgctgaacatgtgcagctttgacgtgaccaacaagtgcctcattgctgaggtctggtgtcccgaggcggatctgcaggacctgcgccgggcactggaggagggctcgagagagagtggtgctaccatcccctcacttcatgaatgatcgtcgcaccactccttcgctctgat

SEQ ID NO: 40566 - DNA, 1418 bp, Homo sapiens
gtgtaagcctgagtggattttgcttttgatttagctttaagtaactataaatcttcgtttttctaaggaagtgtttttggttttgttctgaattctcttccacgattttctgtgtgtggaggtaaatccacttgctgattcacactcatagtcctcagacggtctttataatcatcaaagaacaggaaaacagaaccaagaatatacaaaatattctgcttgtgcttatactttctcatttacagtgtttacagaaaatgattagttggagtttgactctctttagaatttttgtaaagtttccttgctggtctaaaacaaaataatactttaccacagggtcattaatgttattcatcagttctagaattcagctatgagtttaggaaaagaaaacccgctggcaagtgtagctggctggcatttattgaatgttcctcgcgtggagacattgttcgatctttcctgatttcatcgtgtgctgctgaccctgcaggcaggccttcacgttttaatcgggtttctcaccttctgcactaacaggagtatgtccagagagtgctgctggttgtcacagcattgtctgtccctgtcctcttcttgggaaagccactgtttttgttgtggcttcacaatgggcgtagttgcttcggggtgaaccggagtggctacacacttataaggaaagatagtgaggaagaagtttcattgctgggaagccaagatatagaagagggaaatcaccaggtggaagatggatgtagagaaatggcgtgtgaagagtttaattttggagaaatattaatgacccaagtaatccattccatcgagtactgtctgggatgcatctccaacaccgcctcctacctgaggctctgggcgcttagcctggctcacgcacagttgtctgatgtcctgtgggccatgctgatgcgcgtgggcctccgcgttgacaccacctatggcgtcttgctactgctcccggttatcgcgctctttgcagttttgaccattttcatccttctgatcatggaagggctttctgcgtttcttcacgccatacgcctccactgggtagaatttcagaacaaattctacgttggtgcaggcaccaaatttgttcctttctcattcagtctactttcatcaaagttcaataacgacgacagtgtggcatgatcatattgctgtaaccaacaagctttcagatttatggagaatgaccatgttatagactttcacttatgtcagatttatgataggaaaaattccatcttcattactgccttatgacatagccaaataattctgtaagatatacctcttcctcatatgttaaatattttgtaaagtttaccaatttgagatataaaaatttcttttggttttttatgatgagcaaatataagttaatgcca

SEQ ID NO: 40567 - DNA, 1120 bp, Homo sapiens
gacctcgcggactgctgtggcggcagctggagcggcggccgcggtggcagaaccgggggcggccgctgcagtctggagccccatagtgcggggccgcggccaggccacaggaagagctcgaggcccgggccgcaccggctgagtgtgcgggcccgcgcggctcggagccgccgccgcccatcgagcccctccgggcgtgggtcggcccgccatggggtccctgttccggagcgagaccatgtgcctggcgcagctcttcctgcagtcgggcacggcctacgagtgcctcagcgccctgggcgagaaaggcctggtccagttccgagacctcaaccagaacgtaagttctttccaaagaaaatttgttggtgaggtgaagaggtgtgaagagctagagcgaatattggtgtatttggtacaggaaattaatagagctgatattccccttcctgaaggagaggccagccctcctgcgccacccctgaaacaggttctagaaatgcaggagcagttgcagaagctcgaggttgaactgagagaagtcactaagaacaaggagaaactgaggaaaaacttgctggaactgatagagtacactcacatgctgagagtgacaaagacctttgtgaaacgcaatgttgagatttgtgtctggcctaattaaccaaggaaaagtggaagcatttgaaaaaatgttgtggagagtctgcaaagggtacaccatcgtgtcctatgcagaactggatgaatcccttgaagaccctgaaacaggggaagtcataaaatggtatgtctttttaatatccttttggggagagcagattggccacaaggttaagaagatatgtgattgctaccactgccacgtgtacccctatccaaacacagccgaggagcggagggagatccaggaggggctgaacacccgcatccaggatctctacactacttgaacaaaatcgagggactattttgaaggcaaggtggctaatggtaaaaggccggcggaagtcttggtcttaaccaggccggtggttgaattcccaagggttggaaaggaaaaaaaaattgtgacaagggggggcccaaattcctttatttcaacaactgggcttggaaa

SEQ ID NO: 40568 - DNA, 1417 bp, Homo sapiens
ttggaggttgtggcaggagcagccagtgtggttgggggtacgaggctggacagggaagtagcggctccccgcaaagaacagaggtgcagtcccaggaagacagcagagcatggcctcctttcttttcatggaaactttattttggccatttagtgaggaccaaacaaaatgtcttataatcaacattttgtaattattatgtaatttcgtgttttaattcgggacaattaataattaagttctaggatcatagagaaacaaaagcagagctggaaagcgcatgagagtcaccttgcctggtgctttgcagccctttccctgtcaggggccccttgcatagttttccctggttggctctacttagaatgctcacatctagtgaatcgcagtctactcttagggttggtgaatacctattttatcagtagatgtttcataattactgagacctgccccagaatcccattagtatagcagctgtggccacggcagttcctctggtctaccttcttggtttacacaggggagtctgaggcgtgcggtgggagtggggctgatgaaggtggggatttggggtggtaaagtctggtcatggagctgggtagtggcagagtggtgaacagagtgcgtctggggtttctgttcctcacactctagcgtgttcttaccagcatccagccggcagctctttcattgtaatccttgaagtggaacccacttggcatgtagaagtacacatgtaacatcatgactcttaacatatgttgtgtgatctctctcagtttaattttggagaaatattaatgacccaagtaatccattccatcgagtactgtctgggatgcatctccaacaccgcctcctacctgaggctctgggcgcttagcctggctcacgcacagttgtctgatgtcctgtgggccatgctgatgcgcgtgggcctccgcgttgacaccacctatggcgtcttgctactgctcccggttatcgcgctctttgcagttttgaccattttcatccttctgatcatggaagggctttctgcgtttcttcacgccatacgcctccactgggtagaatttcagaacaaattctacgttggtgcaggcaccaaatttgttcctttctcattcagtctactttcatcaaagttcaataacgacgacagtgtggcatgatcatattgctgtaaccaacaagctttcagatttatggagaatgaccatgttatagactttcacttatgtcagatttatgataggaaaaattccatcttcattactgccttatgacatagccaaataattctgtaagatatacctcttcctcatatgttaaatattttgtaaagtttaccaatttgagatataaaaatttcttttggttttttatgatgagcaaatataagttaatgcca

SEQ ID NO: 40569 - DNA, 1148 bp, Homo sapiens
ttggaggttgtggcaggagcagccagtgtggttgggggtacgaggctggacagggaagtagcggctccccgcaaagaacagaggtgcagtcccaggaagacagcagagcatggcctcctttcttttcatggaaactttattttggccatttagtgaggaccaaacaaaatgtcttataatcaacattttgtaattattatgtaatttcgtgttttaattcgggacaattaataattaagttctaggatcatagagaaacaaaagcagagctggaaagcgcatgagagtcaccttgcctggtgctttgcagccctttccctgtcaggggccccttgcatagttttccctggttggctctacttagaatgctcacatctagtgaatcgcagtctactcttagggttggtgaatacctattttatcagtagatgtttcataattactgagacctgccccagaatcccattagtatagcagctgtggccacggcagttcctctggtctaccttcttggtttacacaggggagtctgaggcgtgcggtgggagtggggctgatgaaggtggggatttggggtggtaaagtctggtcatggagctgggtagtggcagagtggtgaacagagtgcgtctggggtttctgttcctcacactctagcgtgttcttaccagcatccagccggcagctctttcattgtaatccttgaagtggaacccacttggcatgtagaagtacacatgtaacatcatgactcttaacatatgttgtgtgatctctctcagtttaattttggagaaatattaatgacccaagtaatccattccatcgagtactgtctgggatgcatctccaacaccgcctcctacctgaggctctgggcgcttagcctggctcacgcacgtaagttcctgcttagacctgcagttcccaatgccctgtagtgccagcagactcagggggcactgtgggatattttaactttgtaactaatagtcatagcaccatctttcagctgccacgtgaacttacactattcactacttaatacacagctctcttggctatttcttttggctgaggagtgctgtggaaaaatcacagagggagtctctctgaggctggtctggcttcagagcctgcccaattta

SEQ ID NO: 40570 - DNA, 523 bp, Homo sapiens
aagagtatgaaagacacaggccagtggcttcctcccaccccatagccttacttgtccacttccgactccatctcaaaaaaaaaaaaaagaaaaaaacaaaacaaaaaaacccactgtttttggtatactgcatgaagattattggaattacacttggaactaattactaccctcttaagtaaccattgttttgttttaggagcagttgcagaagctcgaggttgaactgagagaagtcactaagaacaaggagaaactgaggaaaaacttgctggaactgatagagtacactcacatgctgagagtgacaaagacctttgtgaaacgcaatgttgaggtactgaacagctcgtgaggaaatacagctgtttttataaacagctttttataaaaatctcattcccataggctgtgtattttgctattagttcatatagatatgttgcttcttttaagagattaaggatagagagataaggaagagagattcaaggatagagagattaaggatagagagattaca

SEQ ID NO: 40571 - DNA, 3454 bp, Homo sapiens
gacctcgcggactgctgtggcggcagctggagcggcggccgcggtggcagaaccgggggcggccgctgcagtctggagccccatagtgcggggccgcggccaggccacaggaagagctcgaggcccgggccgcaccggctgagtgtgcgggcccgcgcggctcggagccgccgccgcccatcgagcccctccgggcgtgggtcggcccgccatggggtccctgttccggagcgagaccatgtgcctggcgcagctcttcctgcagtcgggcacggcctacgagtgcctcagcgccctgggcgagaaaggcctggtccagttccgagacctcaaccagaacgtaagttctttccaaagaaaatttgttggtgaggtgaagaggtgtgaagagctagagcgaatattggtgtatttggtacaggaaattaatagagctgatattccccttcctgaaggagaggccagccctcctgcgccacccctgaaacaggttctagaaatgcaggagcagttgcagaagctcgaggttgaactgagagaagtcactaagaacaaggagaaactgaggaaaaacttgctggaactgatagagtacactcacatgctgagagtgacaaagacctttgtgaaacgcaatgttgagtttgaacccacttatgaagaattcccttccttagagagcgattctttgttggattacagctgtatgcagaggctgggagcaaaactgggatttgtgtctggcctaattaaccaaggaaaagtggaagcatttgaaaaaatgttgtggagagtctgcaaagggtacaccatcgtgtcctatgcagaactggatgaatcccttgaagaccctgaaacaggggaagtcataaaatggtatgtctttttaatatccttttggggagagcagattggccacaaggttaagaagatatgtgattgctaccactgccacgtgtacccctatccaaacacagccgaggagcggagggagatccaggaggggctgaacacccgcatccaggatctctacactgtactgcacaaaaccgaggactatttgaggcaagtgctatgtaaagccgccgagtctgtctacagccgtgtgatccaggtgaagaaaatgaaggccatctatcacatgctgaacatgtgcagctttgacgtgaccaacaagtgcctcattgctgaggtctggtgtcccgaggcggatctgcaggacctgcgccgggcactggaggagggctcgagagagagtggtgctacaatcccctcattcatgaatataatccccacaaaagaaacaccccccactcggatccgcaccaacaaattcaccgagggatttcagaacatcgtggatgcttatggagtcggaagctacagagaagtcaatccagctctctttaccatcatcaccttcccgtttttatttgctgtgatgtttggagacttcggacatggctttgtgatgtttttatttgccctcttgtgggtgttaaatgaaaatcatcccagactaaatcagtcacaagagatcatgaggatgttttttaatggccggtacatcctcctgctgatggggctgttctcagtgtacactggcctcatctacaacgactgcttttcaaagtcagtcaacctgttcggctctgggtggaacgtgtcggccatgtacagctccagccacccacccgcagagcataagaagatggtgctttggaacgacagcgtcgttagacacaacagcattttgcagctggatccaagcattcctggagtgttccgaggcccttatccccttggcattgatcctatttggaacttggccacaaatcgcctcacttttctaaactctttcaaaatgaaaatgtccgtgattttaggaatcattcatatgacttttggagtcattctgggaatatttaaccacttgcacttcaggaagaagttcaacatttacctggtttccatcccggaacttctcttcatgctctgtatctttggataccttatatttatgattttctacaagtggctggttttttcagcagaaacctccagagttgctcccagcattctgattgaatttattaacatgtttttattcccagccagtaaaacaagtggcctttacacagggcaggagtatgtccagagagtgctgctggttgtcacagcattgtctgtccctgtcctcttcttgggaaagccactgtttttgttgtggcttcacaatgggcgtagttgcttcggggtgaaccggagtggctacacacttataaggaaagatagtgaggaagaagtttcattgctgggaagccaagatatagaagagggaaatcaccaggtggaagatggatgtagagaaatggcgtgtgaagagtttaattttggagaaatattaatgacccaagtaatccattccatcgagtactgtctgggatgcatctccaacaccgcctcctacctgaggctctgggcgcttagcctggctcacgcacagttgtctgatgtcctgtgggccatgctgatgcgcgtgggcctccgcgttgacaccacctatggcgtcttgctactgctcccggttatcgcgctctttgcagttttgaccattttcatccttctgatcatggaagggctttctgcgtttcttcacgccatacgcctccactgggtagaatttcagaacaaattctacgttggtgcaggcaccaaatttgttcctttctcattcagtctactttcatcaaagttcaataacgacgacagtgtggcatgatcatattgctgtaaccaacaagctttcagatttatggagaatgaccatgttatagactttcacttatgtcagatttatgataggaaaaattccatcttcattactgccttatgacatagccaaataattctgtaagatatacctcttcctcatatgttaaatattttgtaaagtttaccaatttgagatataaaaatttcttttggttttttatgatgagcaaatataagttaatgccaaacgttatgttaaagttattttttcaaatacaggatttggggagagaagccaattttgcatggctagttgaaaatggtattagatacttatttcctttaaactttatttaaaacaaacaacagagttaatctgtcacctgaagttgccagataatattttccaacagctgaagtagggatagttttttacaaaaatttaatgatgggtaatcaaaacattcacatttattctgctggatttaaaaatatgtactttttttttttttttgagatgaagtcttgctgtgtcacgtaggctggagtgcaatggcacgatcgtgtctcattgcaacttccgcctcctggattcaggtgattctcctgtctcagcctcccgagtaactgggattacaggcatgcgccaccgtgaccagctaatttttttgtatttttg

SEQ ID NO: 40572 - DNA, 1641 bp, Homo sapiens
gacctcgcggactgctgtggcggcagctggagcggcggccgcggtggcagaaccgggggcggccgctgcagtctggagccccatagtgcggggccgcggccaggccacaggaagagctcgaggcccgggccgcaccggctgagtgtgcgggcccgcgcggctcggagccgccgccgcccatcgagcccctccgggcgtgggtcggcccgccatggggtccctgttccggagcgagaccatgtgcctggcgcagctcttcctgcagtcgggcacggcctacgagtgcctcagcgccctgggcgagaaaggcctggtccagttccgagacctcaaccagaacgtaagttctttccaaagaaaatttgttggtgaggtgaagaggtgtgaagagctagagcgaatattggtgtatttggtacaggaaattaatagagctgatattccccttcctgaaggagaggccagccctcctgcgccacccctgaaacaggttctagaaatgcaggagcagttgcagaagctcgaggttgaactgagagaagtcactaagaacaaggagaaactgaggaaaaacttgctggaactgatagagtacactcacatgctgagagtgacaaagacctttgtgaaacgcaatgttgagtttgaacccacttatgaagaattcccttccttagagagcgattctttgttggattacagctgtatgcagaggctgggagcaaaactgggatttgtgtctggcctaattaaccaaggaaaagtggaagcatttgaaaaaatgttgtggagagtctgcaaagggtacaccatcgtgtcctatgcagaactggatgaatcccttgaagaccctgaaacaggggaagtcataaaatggtatgtctttttaatatccttttggggagagcagattggccacaaggttaagaagatatgtgattgctaccactgccacgtgtacccctatccaaacacagccgaggagcggagggagatccaggaggggctgaacacccgcatccaggatctctacacttctgtctacagccgtgtgatccaggtgaagaaaatgaaggccatctatcacatgctgaacatgtgcagctttgacgtgaccaacaagtgcctcattgctgaggtctggtgtcccgaggcggatctgcaggacctgcgccgggcactggaggagggctcgagagagagtggtgctacaatcccctcattcatgaatataatccccacaaaagaaacaccccccactcggatccgcaccaacaaattcaccgagggatttcagaacatcgtggatgcttatggagtcggaagctacagagaagtcaatccagctctctttaccatcagtcaccttcacggtttctatcttgctcgtcactcgtccggacgaccttcggcaccatcgcttcgtgactgtcctctactctcgccctctctgtgggtgtcaccttgccatcctccccagacctagctccgtccacgagatctgacgctgcctccctgggcgcggcgcttcttcgactgatgcccttcgtccctcgtcccgtgctctcctcccgctcgctcctacccgcgccccttcccacctgctgaatttcggctcacgccgccccctccctctgccgc

SEQ ID NO: 40573 - DNA, 1827 bp, Homo sapiens
agagtaggaaccacctatttgagagataaacacagatgattcttcttttactgagagagagagtggtgctacaatcccctcattcatgaatataatccccacaaaagaaacaccccccactcggatccgcaccaacaaattcaccgagggatttcagaacatcgtggatgcttatggagtcggaagctacagagaagtcaatccagctctctttaccatcatcaccttcccgtttttatttgctgtgatgtttggagacttcggacatggctttgtgatgtttttatttgccctcttgtgggtgttaaatgaaaatcatcccagactaaatcagtcacaagagatcatgaggatgttttttaatggccggtacatcctcctgctgatggggctgttctcagtgtacactggcctcatctacaacgactgcttttcaaagtcagtcaacctgttcggctctgggtggaacgtgtcggccatgtacagctccagccacccacccgcagagcataagaagatggtgctttggaacgacagcgtcgttagacacaacagcattttgcagctggatccaagcattcctggagtgttccgaggcccttatccccttggcattgatcctatttggaacttggccacaaatcgcctcacttttctaaactctttcaaaatgaaaatgtccgtgattttaggaatcattcatatgacttttggagtcattctgggaatatttaaccacttgcacttcaggaagaagttcaacatttacctggtttccatcccggaacttctcttcatgctctgtatctttggataccttatatttatgattttctacaagtggctggttttttcagcagaaacctccagagttgctcccagcattctgattgaatttattaacatgtttttattcccagccagtaaaacaagtggcctttacacagggcaggagtatgtccagagagtgctgctggttgtcacagcattgtctgtccctgtcctcttcttgggaaagccactgtttttgttgtggcttcacaatgggcgtagttgcttcggggtgaaccggagtggctacacacttataaggaaagatagtgaggaagaagtttcattgctgggaagccaagatatagaagagggaaatcaccaggtggaagatggatgtagagaaatggcgtgtgaagagtttaattttggagaaatattaatgacccaagtaatccattccatcgagtactgtctgggatgcatctccaacaccgcctcctacctgaggctctgggcgcttagcctggctcacgcacagttgtctgatgtcctgtgggccatgctgatgcgcgtgggcctccgcgttgacaccacctatggcgtcttgctactgctcccggttatcgcgctctttgcagttttgaccattttcatccttctgatcatggaagggctttctgcgtttcttcacgccatacgcctccactgggtagaatttcagaacaaattctacgttggtgcaggcaccaaatttgttcctttctcattcagtctactttcatcaaagttcaataacgacgacagtgtggcatgatcatattgctgtaaccaacaagctttcagatttatggagaatgaccatgttatagactttcacttatgtcagatttatgataggaaaaattccatcttcattactgccttatgacatagccaaataattctgtaagatatacctcttcctcatatgttaaatattttgtaaagtttaccaatttgagatataaaaatttcttttggttttttatgatgagcaaatataagttaatgcca

SEQ ID NO: 40574 - DNA, 874 bp, Homo sapiens
gacctcgcggactgctgtggcggcagctggagcggcggccgcggtggcagaaccgggggcggccgctgcagtctggagccccatagtgcggggccgcggccaggccacaggaagagctcgaggcccgggccgcaccggctgagtgtgcgggcccgcgcggctcggagccgccgccgcccatcgagcccctccgggcgtgggtcggcccgccatggggtccctgttccggagcgagaccatgtgcctggcgcagctcttcctgcagtcgggcacggcctacgagtgcctcagcgccctgggcgagaaaggcctggtccagttccgagacctcaaccagaacgtaagttctttccaaagaaaatttgttggtgaggtgaagaggtgtgaagagctagagcgaatattggtgtatttggtacaggaaattaatagagctgatattccccttcctgaaggagaggccagccctcctgcgccacccctgaaacaggttctagaaatgcaggagcagttgcagaagctcgaggttgaactgagagaagtcactaagaacaaggagaaactgaggaaaaacttgctggaactgatagagtacactcacatgctgagagtgacaaagacctttgtgaaacgcaatgttgaggtactgaacagctcgtgaggaaatacagctgtttttataaacagctttttataaaaatctcattcccataggctgtgtattttgctattagttcatatagatatgttgcttcttttaagagattaaatttatttatttatttaattttatattttgtttttgagacggaattttgcactccagcctgggcgacagagtgagaccctgtaccctgtatctaaaaaaaaaaaa

SEQ ID NO: 40575 - DNA, 581 bp, Homo sapiens
aatgttttgattacacatcagtattaggaaaacatgtttgaagcattgtctaagtctgtttgtgctgatgtaacagaataccatagactgggtagtttataaagagagaaattattggcttacagttgtggaggctggaaagtctagtatcagcgtactgggatttggcaagggccttcttggtgcatgatagtatggtggaaggtatcacacggcaggcagaaaggcagagagagaacaaaagggggcgaacccactcccttgatgagaacctaaatacctcttaaaagtcctaactctcaatgctgtttacaatggcaaccaaatttaaacaagagttttgtagggaacaaacactcaatcaaaaccatagcaagtatgtaccatgactgtatgtgtatttataaaatacattcatatatttctacagcaatatatatgaggtacatttaagcatgtaaaaataggaatttttaaaaataggacagttgtaataatttctttgtacattccactttggagactgtttttatatggagcttgttttatcaccaaaaggcattttaattttgcacacttta

SEQ ID NO: 40576 - DNA, 529 bp, Homo sapiens
ctgagaagattagtggtggtatcaatgaatataatttctgatatttcaccatgaaatgtgtcagcatttggaagctacgcataactcagcaaacaaatggttcctagttaccgatgtatgattttacaaaactgtaatgggtaatccatcaaagtacaaaataccaacagattttaagggaacactgaaaacttcattgatgtggtttcagatttcatattgcaactaacctttgagaaacaactgtgtttttatgtagtatcaaagaataacacctatagttatctgaaaatgctattcaactacttacctcttttcaactgtatatctgtgagagtccagattttcttaatatttttggaccaaaacaacatattgcaacaaattgaatgctgagatagatgtgacaatccaggtgtcttctactaaccagatgttagaggtttgcaaaaatatacgatgccactcttcatacaaaatatctttgttttggaaaataataagtttttaaaataaaaatatgtcattt

SEQ ID NO: 40577 - DNA, 252 bp, Homo sapiens
tacagacagggtcttgccatgttgccaaggctggcctggaactcctggcttcaagcaatcctcccaccacagcctcccaaagcactgggatttcaggtgtgagccaccatgcccagcctggaatctatttttaaagccaatcaagcgttgaataaaattgcaacttgggctgttttttctttgcattttttacatttcaatggttttcaatatattcagagatatacacaaacattaccagtcaattttaga

SEQ ID NO: 40578 - DNA, 876 bp, Homo sapiens
aagatactgttgccccaagtagatatcataatttgttacaataagtaaaaatgtatattattcaatactaaactgttataccacatttcaagtttttaaaactttatcttccttttatgcatagatagtagtagagcattaagaacatgcatggctatcacctgaggtgttgattgtaaattcacattcctaggctttgtctcttaactactgaatcggaatctttgggagtgaactgacaggaatctgaattttaaaaataaggtcttcaggtgattctcatgcatctaaagataactgctttaatatataacaaagaaacccaaagagggacacttgaggattttttcaatatatcttcttttgcagagattaatagtgaatgttgttttatctgctgtttagaattttacatatgcattggatgatacatcttcttttactgacaaaaaggcttttctctggagaaaataaaaaggcagctttccctgagagcacacacttctagcaaagccccaatccatatgactctaagacagagtgatttccaccttctagtccttactttcttgcaaaaggggctttcaaatctcattactgatggtcccatcttttattactggtgttatcaatgggatgcttgcagcagcttaagtatgtggataaagaaggaatgcacaatatacggtactgaatatttttaaaaagtggtctttcagaatgtctgtatgtgtgggggcccatgcttaggcatatgtgcatgccagtgtgttatttatgttgaaaccaatgttttacattaatggctggaattccagaaaaataagaaaatatttgtattttctaaaccattaaaagtttagtggaactcattaa

SEQ ID NO: 40579 - DNA, 531 bp, Homo sapiens
aagtccatgctaatttacttctttctttgcttacaccaataatctgttagcagttaacaaggaaaacagtaagattaattttggggatatactatagcttgtgatgtgcctcctatggacattcctagtgttacgccttgatgttcctagctgtcagtgtcattagcctaagaggaaagaaattccatttggaataggttaggttatctattagaaattaggctgggtccaggtgcagtggctcatgcctgtaatcccagcactttgggaggccaaggtgggtggatcacctgaggtcaggagttcaagaccagcctggctcacatggtgaaaccctgtctctactaaaaatacaaaaaaaaaaaaaaaaaaaattagccggacgcagtggcgcatgcctatagtcccagctacttgggaggctgaggcaggagaattgtttgaacctgggaggcggaggttgtagtgagccaagattgcaccattgcactccagcctaggtgacagagcgagactccacctcaaaaaaaa

SEQ ID NO: 40580 - DNA, 520 bp, Homo sapiens
caaactgctgggctcgagtaatccacccctctcagcctcccaaactgttgagattacaggcgtaagccaccacgctcaaccaagactgagtttcttaaaccaaataaaaattatgggagattacttgagcccaggaggttgacgctgcagtgagccctgattgcaccactgcattccagtgtaggtaacagaatgagactcagtctcaaaaaataagataaaataaaataaaaattagaccgggcatggtggctcacgcctgtaatcccagcactttgggaagccaaggcaggcagatcacgaggtcaggagatcgagaccatcctggctaacatggtgaaaccccgtctgttctaaaagtacaacgaattagccaggtgtggtggcaggtgcctgtagtcccagctacttgggaggctaaggcaggagaatggtgtgaacccgggaggcagagcttgcagtgagccgagatcgcgccactgcgctccagcctgggcaacagagcaagactctgtcttta

SEQ ID NO: 40581 - DNA, 253 bp, Homo sapiens
ataattttgatggttgaatactaaaacatatgttcattcactacattttcataaaaagtgtattttaattttaataaagaaatgaatatgtggttctaaaacattaactaaatatttttaatatctcatcatgacaagactggataatatattgatttgaaagcacaaaaacgaatggacttttatgactccatatacccggaaatatatgttcctctgtacgtacaattgagaaccatacatagttctattt

SEQ ID NO: 40582 - DNA, 549 bp, Homo sapiens
  misc_feature (42)..(42): n is a, c, g, or t
ccatttacactgaagatcgatctgaaactcagcaccagcganaatccagaacttgcctgtctccatggctggttttaatttccccattctgcagtggcttgttaatattagttctgacctttggggcaaggtgaacacatggttggactgaagagaaaaggcttctggtggctcaggaacgtctttggcaactacaacagctgatatttcaacagagcacatacatcccccacttaacaagggtacgtcctcagccttctcagggaaccaacgaacacctccaggcttcctctttgatgccacccactggacctgccttgggggtctgtaaatgcaagagaaccgagtgttggataattagcgatggaagaaaaaacctctagaataaaaggtaggtgagaaagaagggaaagtaggcaggagttgcacaaatccacatccattcttcaggccctctggaaagttttctttgcatagatggttggttgtcgtgtgcattaaagggcatgggaaagtgggggaaaagattatatctatatgtaacctaat

SEQ ID NO: 40583 - DNA, 610 bp, Homo sapiens
  misc_feature (42)..(42): n is a, c, g, or t
ccatttacactgaagatcgatctgaaactcagcaccagcganaatccagaacttgcctgtctccatggctggttttaatttccccattctgcagtggcttgttaatattagttctgacctttggggcaaggtgaacacatggttggactgaagagaaaaggcttctggtggctcaggaacgtctttggcaactacaacagctgatatttcaacagagcacatacatcccccacttaacaagggtacgtcctcagccttctcagggaaccaacgaacacctccaggcttcctctttgatgccacccactggacctgccttgggggtctgtaaatgcaagagaaccgagtgttggataattagcgatggaagaaaaaacctctagaataaaagaactctccaccccaaatcaacagaatatacattttttccagcaccacaccacacctattccaaaattgaccacatagttggaagtaaagctgtcctcggcaaatgtaaaagaacagaaattataacaaactgtctctcagaccacagtgcaatcaaactagaactcaggattaagaaactcactcaaaactgctcacctacatggaaactgaacaacct

SEQ ID NO: 40584 - DNA, 188 bp, Homo sapiens
gagagcacacctccctactgccatcccaaagaggtggatcttccaaaggctgccaggcaaggacaacattttatatttctgacgctaggattattttcctgtttcatggatggcaaaaccaaggcacgaagaggtcaagtgctttggctctgttgatgaaagcagcctgagcatggcatggtgaactc

SEQ ID NO: 40585 - DNA, 464 bp, Homo sapiens
agggcctgggattctgcatttctaacaggcttccaggtgaggccaaggctgctggtcctaaccacactgtaaggtcttggggaactgagcataaaaaataaaatgtccatggcaatataatattggcttttaatatattttaaatatttttagatggtcctatagatttctcctctttgaaatggaacttaaagttaactaacattgttcatgcttatttttcaacttaaattgtcccaacaaaattgagggggttctatcttgatattccacttctggatttaagcatcttactcagggagtaagtcctggctagctgtgtttccttgtatgtatggatcattgcggtgctgtgtcagaggctggagtgaaaggccatcatgcagcccaatcccaacactaaaatcagagtagggtgacaggcttaccacccagaatcacctcctaataatcaggaagttatt

SEQ ID NO: 40586 - DNA, 312 bp, Homo sapiens
tcacgcttgtaatcccaacactttgggaagtcgaggagggtggatcacttgaacccaggagtttgaaaccagcctgctcaatatgaccaaacctcatctctacacaaaaatacaaaaaaaaaaaaaaaaaatatctgggcatggtggcatgcacctctggttgtaatcccttgggaggctgaggtggaaggatctcctgagcctggggaggttgaagttaccgtgagctgtgatgccaccactgcactccaggctgggagacagagtgggaccccgtctcgaaaaaaataaaaataaaaatttggcctggca

SEQ ID NO: 40587 - DNA, 874 bp, Homo sapiens
acgtcgggggcgagccgggcctgcgcggtagtgggacccgaccctgtctccagtgggcgtcttgggccccggctctattctgggctgcgggcctgggaagggctcgccgggtgccaaatgagctgtcctaactctgcggggctgcagcttcctgcatgatgctggggagcttggcgcctgacccaggatctagaaggcactctgggcaggccgcgctccgcccacgaaggtacccaaccctctgggatagatgcaggaagcgatggttaagacccattttcacccaacttctcgccgcaggtctggcttaccacacgctcctccccattcccagtgagccgctttttgcagcaccaggcgaacacttacaccagtgctttgtaaaggaatcttattgtccaccccgtgtcttggcaaaagaacagtgatcacacagattcctacttgggctctttcctttaatcttcggaggctgagtttgcccaactcaggtttaaccaccaaggactctgagagctggcaggtctgagtaaccctggtaacaattctcttcaccttatcaaaacctgagctaaaaccaatgcatcagctgatgatgacagcagagagtggcagggctgaggacccaaagtcatttcccaggctggcggagaataaactgccagggagaagaatgagaagacaggagacaaactgtttggaaagctaaatcttccctcttaatgaataaaggtttttgccttgtcttaaagtttctgagtcctaattttggcaaaataaataacttatggtaatctggaattgtattttgtaatattaagtgttttgaacctctaacatttacttcccaaaatcaaacttcagtttcaaaatt

SEQ ID NO: 40588 - DNA, 679 bp, Homo sapiens
acgtcgggggcgagccgggcctgcgcggtagtgggacccgaccctgtctccagtgggcgtcttgggccccggctctattctgggctgcgggcctgggaagggctcgccgggtgccaaatgagctgtcctaactctgcggggctgcagcttcctgcatgatgctggggagcttggcgcctgacccaggatctagaaggcactctgggcaggccgcgctccgcccacgaaggtctggcttaccacacgctcctccccattcccagtgagccgctttttgcagcaccaggcgaacacttacaccagtgctttgtaaaggaatcttattgtccaccccgtgtcttggcaaaagaacagtgatcacacagattcctacttgggctctttcctttaatcttcggaggctgagtttgcccaactcaggtttaaccaccaaggactctgagagctggcaggtctgagtaaccctggtaacaattctcttcaccttatcaaaacctgagctaaaaccaatgcatcagctgatgatgacagcagagagtggcagggctgaggacccaaagtcatttcccaggctggcggagaataaactgccagggagaagaatgagaagacaggagacaaactgtttggaaagctaaatcttccctcttaatgaataaaggtttttgccttgtcttaa

SEQ ID NO: 40589 - DNA, 803 bp, Homo sapiens
acgtcgggggcgagccgggcctgcgcggtagtgggacccgaccctgtctccagtgggcgtcttgggccccggctctattctgggctgcgggcctgggaagggctcgccgggtgccaaatgagctgtcctaactctgcggggctgcagcttcctgcatgatgctggggagcttggcgcctgacccaggatctagaaggcactctgggcaggccgcgctccgcccacgaaggtctggcttaccacacgctcctccccattcccagtgagccgctttttgcagcaccaggcgaacacttacaccagtgctttgtaaaggaatcttattgtccaccccgtgtcttggcaaaagaacagtgatcacacagattcctacttgggctctttcctttaatcttcggaggctgagtttgcccaactcaggtttaaccaccaaggactctgagagctggcaggtctgagtaaccctggtaacaattctcttcaccttatcaaaacctgagctaaaaccaatgcatcagctgatgatgacagcagagagtggcagggctgaggacccaaagtcatttcccaggctggcggagaataaactgccagggagaagaatgagaagacaggagacaaactgtttggaaagctaaatcttccctcttaatgaataaaggtttttgccttgtcttaaagtttctgagtcctaattttggcaaaataaataacttatggtaatctggaattgtattttgtaatattaagtgttttgaacctctaacatttacttcccaaaatcaaacttcagtttcaaaatt

SEQ ID NO: 40590 - DNA, 2093 bp, Homo sapiens
acgtcgggggcgagccgggcctgcgcggtagtgggacccgaccctgtctccagtgggcgtcttgggccccggctctattctgggctgcgggcctgggaagggctcgccgggtgccaaatgagctgtcctaactctgcggggctgcagcttcctgcatgatgctggggagcttggcgcctgacccaggatctagaaggcactctgggcaggccgcgctccgcccacgaaggtacccaaccctctgggatagatgcaggaagcgatggttaagacccattttcacccaacttctcgccgcaggtctggcttaccacacgctcctccccattcccagtgagccgctttttgcagcaccaggcgaacacttacaccagtgctttgtaaaggaatcttattgtccaccccgtgtcttggcaaaagaacagtgatcacacagattcctacttgggctctttcctttaatcttcggaggctgagtttgcccaactcaggtatgccgcagcacactacatcatctcgggtctccttgctcttctgcagctcttcattgctacccaagttatttgaataccccagggatgcttacccccgggcctatctgatgtcttttactgttgtgccaagaaatggaatctttaaccagagtggagctacccaagttctagaagatcataatgtgattgacttagtttcacagattaattcattttgcttttaccttctgaaataaaatatactgtttcatttttaattttaaatacactgtttcatttttttgtggaaggaaagaccaaatgtttacactgactctgaactagttatcaaagataaagatttagatttcaaattaacatgtcatgacaggccccattcctttgtctgtcgtttctaactcctttagcagtaaagtttgacctgaagggaagtgaggctatgtgtaactgaatgttccctttgtgtaaatattcataagttttctacagaaatattgtgtttgattacagtacagcttgctggaagtgtttcataatatatggcagacgtactattctaagaaaagttctgaattttgaaacatatctagccaaaaagattttaaataagggattaggaatttgtagttgtaatttctgaaggtgtgataaagaactttttctttcatatataagtgcgatgctctggatgatgttaaagtttgcttacaagataaagtttttaaattgagtaactaaaaactactcagaaaccttcgttgtattttttttctcctttttagtgagtcttggcatctctttaaaagtttatgcatgtttaatgcctgttggtgcatagaatttagaaccatttcgcttcactctttttcctactcttgttgtttatttcaatggaaacaagatgtttctgtaaagattcctgaattatcggatagacaaaaaggtgtgggagtgaaaaaatgaatggaacacagatttgagtatgtagaaaaaaatcttttaaaatatgttatactgataagcatatgtaccccaaatcaccaaaaacaggtattttaaaatatgtttggcttcaaaatgtgtgatatatattttaatgaaagattccaaattatgttgcattcaggttaaacttgaacgagtttgcatttcttagagtggagcgggagatattggctggtaaggaagatgttttaggcacttgaagtatttgtgatagcaagaagttgttccaagattaaaaattgactatgagtcaaagtaactttttggaggaaaatttgtaagtagtacaagtggtgataattttttaagttgccattaaaaaaatcttttatttttgttcttctgtagttcttactcagcataccacaaattgcaaaagactttatagataagtctagataaatttcaccattaaaaagtattaaaatgctagactaagaagttcatgtttcaatctgcataactggcttcctgctaagatttgtgactctaataagtaaggagatatggtaaatagccctaatctatgggagacctgtaacctcctttcattctgatgtataaaatgaacatgttgaagaaataattttgtga

SEQ ID NO: 40591 - DNA, 559 bp, Homo sapiens
acgtcgggggcgagccgggcctgcgcggtagtgggacccgaccctgtctccagtgggcgtcttgggccccggctctattctgggctgcgggcctgggaagggctcgccgggtgccaaatgagctgtcctaactctgcggggctgcagcttcctgcatgatgctggggagcttggcgcctgacccaggatctagaaggcactctgggcaggccgcgctccgcccacgaaggtacccaaccctctgggatagatgcaggaagcgatggttaagacccattttcacccaacttctcgccgcaggtttaaccaccaaggactctgagagctggcaggtctgagtaaccctggtaacaattctcttcaccttatcaaaacctgagctaaaaccaatgcatcagctgatgatgacagcagagagtggcagggctgaggacccaaagtcatttcccaggctggcggagaataaactgccagggagaagaatgagaagacaggagacaaactgtttggaaagctaaatcttccctcttaatgaataaaggtttttgccttgtcttaa

SEQ ID NO: 40592 - DNA, 819 bp, Homo sapiens
acgtcgggggcgagccgggcctgcgcggtagtgggacccgaccctgtctccagtgggcgtcttgggccccggctctattctgggctgcgggcctgggaagggctcgccgggtgccaaatgagctgtcctaactctgcggggctgcagcttcctgcatgatgctggggagcttggcgcctgacccaggatctagaaggcactctgggcaggccgcgctccgcccacgaaggtacccaaccctctgggatagatgcaggaagcgatggttaagacccattttcacccaacttctcgccgcaggtctggcttaccacacgctcctccccattcccagtgagccgctttttgcagcaccaggcgaacacttacaccagtgctttgtaaaggaatcttattgtccaccccgtgtcttggcaaaagaacagtgatcacacagattcctacttgggctctttcctttaatcttcggaggctgagtttgcccaactcaggtttaaccaccaaggactctgagagctggcaggtctgagtaaccctggtaacaattctcttcaccttatcaaaacctgagctaaaaccaatgcatcagctgatgatgacagcagagagtggcagggctgaggacccaaagtcatttcccaggctggcggagagtgagtaaatgagattctaaaactaaacaagggaggtcagagactctttccaaccttacctgatggcttctggccaaagcaaggaagtgtcttggaaggtgttggttggtgatggtgcgaaaagacacttgagaaggagggaagaaaaagcagcgccccttgataa

SEQ ID NO: 40593 - DNA, 588 bp, Homo sapiens
acgtcgggggcgagccgggcctgcgcggtagtgggacccgaccctgtctccagtgggcgtcttgggccccggctctattctgggctgcgggcctgggaagggctcgccgggtgccaaatgagctgtcctaactctgcggggctgcagcttcctgcatgatgctggggagcttggcgcctgacccaggatctagaaggcactctgggcaggccgcgctccgcccacgaaggtacccaaccctctgggatagatgcaggaagcgatggttaagacccattttcacccaacttctcgccgcaggtctggcttaccacacgctcctccccattcccagtgagccgctttttgcagcaccaggcgaacacttacaccagtgctttgtaaaggaatcttattgtccaccccgtgtcttggcaaaagaacagtgatcacacagattcctacttgggctctttcctttaatcttcggaggctgagtttgcccaactcagataaactgccagggagaagaatgagaagacaggagacaaactgtttggaaagctaaatcttccctcttaatgaataaaggtttttgccttgtcttaa

SEQ ID NO: 40594 - DNA, 521 bp, Homo sapiens
acgtcgggggcgagccgggcctgcgcggtagtgggacccgaccctgtctccagtgggcgtcttgggccccggctctattctgggctgcgggcctgggaagggctcgccgggtgccaaatgagctgtcctaactctgcggggctgcagcttcctgcatgatgctggggagcttggcgcctgacccaggatctagaaggcactctgggcaggccgcgctccgcccacgaaggtacccaaccctctgggatagatgcaggaagcgatggttaagacccattttcacccaacttctcgccgcaggtctggcttaccacacgctcctccccattcccagtgagccgctttttgcagcaccaggcgaacacttacaccagtgctttgtaaaggaatcttattgtccaccccgtgtcttggcaaaagaacagtgatcacacagattcctacttgggctctttcctttaatcttcgaagcgcttaggtaaggcactgtaggtaaggcgctgtaggtaacgcgctgtata

SEQ ID NO: 40595 - DNA, 612 bp, Homo sapiens
acgtcgggggcgagccgggcctgcgcggtagtgggacccgaccctgtctccagtgggcgtcttgggccccggctctattctgggctgcgggcctgggaagggctcgccgggtgccaaatgagctgtcctaactctgcggggctgcagcttcctgcatgatgctggggagcttggcgcctgacccaggatctagaaggcactctgggcaggccgcgctccgcccacgaaggtttaaccaccaaggactctgagagctggcaggtctgagtaaccctggtaacaattctcttcaccttatcaaaacctgagctaaaaccaatgcatcagctgatgatgacagcagagagtggcagggctgaggacccaaagtcatttcccaggctggcggagaataaactgccagggagaagaatgagaagacaggagacaaactgtttggaaagctaaatcttccctcttaatgaataaaggtttttgccttgtcttaaagtttctgagtcctaattttggcaaaataaataacttatggtaatctggaattgtattttgtaatattaagtgttttgaacctctaacatttacttcccaaaatcaaacttcagtttcaaaatt

SEQ ID NO: 40596 - DNA, 488 bp, Homo sapiens
acgtcgggggcgagccgggcctgcgcggtagtgggacccgaccctgtctccagtgggcgtcttgggccccggctctattctgggctgcgggcctgggaagggctcgccgggtgccaaatgagctgtcctaactctgcggggctgcagcttcctgcatgatgctggggagcttggcgcctgacccaggatctagaaggcactctgggcaggccgcgctccgcccacgaaggtttaaccaccaaggactctgagagctggcaggtctgagtaaccctggtaacaattctcttcaccttatcaaaacctgagctaaaaccaatgcatcagctgatgatgacagcagagagtggcagggctgaggacccaaagtcatttcccaggctggcggagaataaactgccagggagaagaatgagaagacaggagacaaactgtttggaaagctaaatcttccctcttaatgaataaaggtttttgccttgtcttaa

SEQ ID NO: 40597 - DNA, 750 bp, Homo sapiens
acgtcgggggcgagccgggcctgcgcggtagtgggacccgaccctgtctccagtgggcgtcttgggccccggctctattctgggctgcgggcctgggaagggctcgccgggtgccaaatgagctgtcctaactctgcggggctgcagcttcctgcatgatgctggggagcttggcgcctgacccaggatctagaaggcactctgggcaggccgcgctccgcccacgaaggtacccaaccctctgggatagatgcaggaagcgatggttaagacccattttcacccaacttctcgccgcaggtctggcttaccacacgctcctccccattcccagtgagccgctttttgcagcaccaggcgaacacttacaccagtgctttgtaaaggaatcttattgtccaccccgtgtcttggcaaaagaacagtgatcacacagattcctacttgggctctttcctttaatcttcggaggctgagtttgcccaactcaggtttaaccaccaaggactctgagagctggcaggtctgagtaaccctggtaacaattctcttcaccttatcaaaacctgagctaaaaccaatgcatcagctgatgatgacagcagagagtggcagggctgaggacccaaagtcatttcccaggctggcggagaataaactgccagggagaagaatgagaagacaggagacaaactgtttggaaagctaaatcttccctcttaatgaataaaggtttttgccttgtcttaa

SEQ ID NO: 40598 - DNA, 215 bp, Homo sapiens
cttctccttcaagtctccacttaatgtcgtctcctcagggagaccttccttgaccacacctagaatatattttccccctcacccctgcatcactgaatacatggagaatggaccagggtgtttctaaatcccttctggttcttatcttgtgtattttccacaatgttattattttttaggcacagggttcctcccataagcctaggctattcatt

SEQ ID NO: 40599 - DNA, 266 bp, Homo sapiens
gataagttctcaaccttggttatatattggaatcactttaaaattactaatgccttggcattttacgaaggtctctaggtgattttaatatgccacatgctagaaggagcaccctcactttacttgggcaagttcaatcttacaatatacctgatagtacttcttgatttctttgactttaatgaccatctgcaatgtggttacctgctgatacaattgcctcctaaactagtggttttcaagtgtcaaggtgcataggcatttcc

SEQ ID NO: 40600 - DNA, 407 bp, Homo sapiens
tatcactgtctgtatttaaatgtaattggatattttatatccagccatgttcctagtgggattttagacatcgggcaataatacatgaaatacacccaaataacataattcatttgtgagtgaaagacttttagttcccttctcttaaccgagaatggagaggaagaattcaggaaatgaatgtcaactagtagggaggaattatggggaagtgaagatttctttgatttgagggtgccaatggggctgggcagaggcagagccagaagaatcctggttagtttaactctgaccagtttgatcccaatgttcttggcttggggagtccttggtgacttgtgcgtagattatccatggatatttcaagggggtgggaagtgagagctgaaattaagtggtctcaggaa

SEQ ID NO: 40601 - DNA, 1812 bp, Homo sapiens
agcggaaattttcctccaggctgtccttggagaattccaccctctttcattctggggagaagaagttaaaattagggccagccctgcgggactgacatgccagatgcagggaagctgtccccagaaataagcgagttcccaccgcggctgggcggggcgggagcctcgggtcccaacccagcggagggactcctggaaggcctgccccttccaagtgtctgcaagggctctggtcccaagctttaaaatcctgagcgaaggcactgcgggccgacctctcctctcccagccagtcgtggctggcctttcaaagtgtgcagttgtctcctccctgtccagccccatcgtcgcccaggaccagctgggccgcggtctgacctgaggctgctgctcagcgccggggcgctggcgctctccattcgagcaccttccagcataccgctcggctccgggagccgctctgcaaagttgggcagctcagagcgcaagctttgcctctcgacttctccctccttgggtccccggcgcccccgcctcccacgatccctttcactaggagcagccagtcccagcgggctggcaacttgcaccccttcctagtcatcctccctgaaacgcgaccatgctgttaaggggcgtcctcctggcgttgcaagccctgcagctcgccggtgccctcgacctgcccgctgggtcctgtgcctttgaagagagcacttgcggctttgactccgtgttggcctctctgccgtggattttaaatgaggaaggccattacatttatgtggatacctcctttggcaagcagggggagaaagctgtgctgctaagtcctgacttacaggctgaggaatggagctgcctccgtttggtctaccagataaccacatcttcggagtctctgtcagatcccagccagctgaacctctacatgagatttgaagatgaaagctttgatcgcttgctttggtcagctaaggaaccttcagacagctggctcatagccagcttggatttgcaaaacagttccaagaaattcaagattttaatagaaggtgtactaggacagggaaacacagccagcatcgcactatttgaaatcaagatgacaaccggctactgtattgaatgtgactttgaagaaaatcatctctgtggctttgtgaaccgctggaatcccaatgtgaactggtttgttggaggaggaagtattcggaatgtccactccattctcccacaggatcacaccttcaagagtgaactgggccactacatgtacgtggactcagtttatgtgaagcacttccaggaggtggcacagctcatctccccgttgaccacggcccccatggctggctgcctgtcattttattaccagatccagcaggggaatgacaatgtcttttccctttacactcgggatgtggctggcctttacgaggaaatctggaaagcagacaggccagggaatgctgcctggaaccttgcggaggtcgagttcaatgctccttaccccatggaggttatttttgaagttgctttcaatggtcccaagggaggttatgttgccctggatgatatttcattctctcctggttcactgccagaatcagaccgaacttctgttcacgtgccgtggaagccgttgcaatttgagccagatctctggcatttttcccagcattaagcaagggccggctgggcccggtggaattaaaccactgtttcgcgtgggaccccttacggtagggttccttgccccaggtgcttcccccgggtctgggggctggcccccacggaaggtggggccca

SEQ ID NO: 40602 - DNA, 1384 bp, Homo sapiens
acccacatacgattcactactgaatcagcctttctggatggaaacctgggaatctgtatttataacaagcagtcagatgattcttaggcattcttaagtttgaatacattgggagaggtgggtcataggatcacaactataccttttccttatccagcctattttacaatgccataacattcttccttaagtccttataattacattattctaaatcctattttctcctttctttcttcaaggaagttaaaggtttgaatttggtagtcttacaaatggaatagtctgtcatttgttgtggctcatttatttactcattcatgccattcaacacatacttactgagggtctgctacatgccaggcactatcctagatactgggagtacagcagtaaacaaaacagacaataacaggagctcttgctctgatgaggaaatgattaaaaaatgaagtaagaatttaaaatatatgtattatgtcaggtaagtaccatggagaaaaacagagaagaagagttgcaattttaattatggcagagaagaagagtgttgctggcaaggtgacattttagcaaagctttgaacaaagtgaagcaaagagtagtgcatctgtctggtaatgagcattccaggcagagggaatgcaagtgtggtagcactgagacaggaacctgtaagcattcctgggccaggcagggaaaacagaggccagagtgggtagagtggaatgagtgaagggatggtggcaggagatgctggcagaaaagtagcaggactaggagagaggagtggtccaggggaaccagattctaaagccagtcaacaaaaccccaatttgagaatttactagataccattctaatttcagaatcctcctatcctgtgttataatccaaatatgtcctactgacagtgaatgaaggaaatgtctataagctctcaacctcttcctctttaaaaagcgagctgccagcgctgtttcataggtgccgtgagtcgaacagaatattttggtcccttagacttatcagttctcactaaacctggcgtttttttaagtgtggtatttgaactaaaggaaataggctcattcttagattgtggtaattaaggttatgacattatgtaaataatcatgaaatgattattttaccatgtgagttttgggaaacttagattcttaaagggaaagcctttgatttgggtctctctgtgttccagtctcctttgacttaagcatctttatgtttcagctgacttctcccttagcatttggattatctgtcatatgcgtcctaagccttttgttttttaaagagaaagcaatatgttaattgaattggatcctaaccaataataggggatacttgtgtaaaaaagaaa

SEQ ID NO: 40603 - DNA, 305 bp, Homo sapiens
atgagagatctaatagtaattactgaacagttaatgtctttgtccctttattttaatggcactatcaattttaaagatgaaagtttgaatgaaaactttaggaaactttagttgtaggtactcagccaaagtagaattactgtgcttaggagcttcaaagaaaataattcactgaaacttatgtatatatgcttttttttttttttttttccatgagacggaatctcgctctgtcgcccaggctggagtgcagtggcacaatctcagctcactgcaagctctgcctcccaggttccagcgattct

SEQ ID NO: 40604 - DNA, 1033 bp, Homo sapiens
gcttttccgcgctacctgcagaggggtccatacggcgttgttctggattcccgtcgtaacttaaagggaaattttcacaatgtccggagcccttgatgtcctgcaaatgaaggaggaggatgtccttaagttccttgcagcaggaacccacttaggtggcaccaatcttgacttccagatggaacagtacatctataaaaggaaaagtgatggcatctatatcataaatctcaagaggacctgggagaagcttctgctggcagctcgtgcaattgttgccattgaaaaccctgctgatgtcagtgttatatcctccaggaatactggccagagggctgtgctgaagtttgctgctgccactggagccactccaattgctggccgcttcactcctggaaccttcactaaccagatccaggcagccttccgggagccacggcttcttgtggttactgaccccaggctgaccaccagcctctcacggaggcatcttatgttaacctacctaccattgcgctgtgtaacacagattctcctctgcgctatgtggacattgccatcccatgcaacaacaagggagctcactcagtgggtttgatgtggtggatgctggctcgggaagttctgcgcatgcgtggcaccatttcccgtgaacacccatgggaggtcatgcctgatctgtacttctacagagatcctgaagagattgaaaaagaagagcaggctgctgctgaaaaggcagtgaccaaggaggaatttcagggtgaatggactgctcccgctcctgagttcactgctactcagcctgaggttgcagactggtctgaaggtgtacaggtgccctctgtgcctattcagcaattccctactgaagactggagcgctcagcctgccacggaagactggtctgcagctcccactgttcaggccactgaatgggtaggagcaaccactgactggtcttaagctgttcttgcataggctcttaagcagcatggaaaaatggttgatggaaaataaacatcagtttcta

SEQ ID NO: 40605 - DNA, 329 bp, Homo sapiens
tcatttaggaggagatacaaattgaaactccagagctctgaaaaaggaagggttttcaatctcttaaactgtgcaagaagtgaaacaagtaattaccatgtctttatattaaccccagtcaggagcttgttctctctacttttgccagtcagttcctgccacacattaactttttcctgggagccttcaactactcctccaggtcctcaccagatgtgaaagttatggtatctgtgcttatacagtttttcatagtcactgccgctttagcattttatttcttccttgtgttagagtgagttgtttgatcttctctttattaaattctt

SEQ ID NO: 40606 - DNA, 623 bp, Homo sapiens
taaatgcacctgaactgtcaaagtgctaaaagcaggcaatccagaaatgtctggaggtaggaatcacagctgcaagaggcacttcctggttaacctcgccctccgacctctagttggagccacccctttggatcctacttcagcctttctggagtcagtggctcacaggtttcctgagacaaagagaagaggcttgagactattattacagatcagtcgtctttagaagcaaagttggttcgtggattgaattttcaaccttacagtaccaattataaatcctgaggcattctatcagttaagacaacttagaatatttgatcccattcagaactttttcatttgttttaaagcaggaaaagtaaaggaagtcaatgtaataacttttcttctttaaaatgtggatcatagtcctcttggggatgttgttcatttaatattaacattttttaagcttgccatgtatcgtgggtgtatctgtttggtttcctttggtaactgcattttgccatgacccttgataccagctctactgctacagccctaggctaggccaccgtcatctgtggcctggaccctttcagtcctaactggttgccgtgtctcctttcttagcccccaac

SEQ ID NO: 40607 - DNA, 524 bp, Homo sapiens
tttcctttggttttcctcctcaatctaggcattcctaagagttgtcttttatttcttcttagtagttaattctgggtaaatagttaataattctttataagactccctatttaaattgctgtatggatttcattttctgtccagaccctggctgctacagagatcactatctggacagtaggtatgcttcttgcaacttacatctaagcttttttcaacagccagagataggaaatgtaatacatttatctatatgcataggtataatgcacacatttatacatacctctaatcatttgcaaacctgcatatatatatgtatatgtgcacgtgtattatatagatatacatatattttagaattgtttataatacctttagtgaaacaaaattttatatgttcaattatatatttagttctctttgtactctcctcccacctcctggttttgggtttctggtcttgactagaaatgtctcctaatgcctacctgttttacaagatgattattatagtactagtt

SEQ ID NO: 40608 - DNA, 481 bp, Homo sapiens
tttgtgttctgttccctattacatgcctaaggcttcagagagctgatagccttcacttcctgccagcccccagcccatggaactgcgtaggaatctgcccatcctcgccctggagggcagaggaccgtaattacttacccaggatagcctgaccactaataaccataatcagccttagagttcaaggaagaatttcaactccagcattataagggagtgctccatctaaaaaatagatgcctttgacctttgacagtcagccgttaattttatttaaaagtaaaaaaagcttgggttatcagtcccattaactgcctttttacctgttatgtgctggtttcaaaaggtatggaagggccaggcatggtggctcatgcctgtaatcccagcattttaggaggccaaggtgggagcatccttgagtccagagaccaacccgggcaacatagggagaccctatccctaaagaaatacaatatga

SEQ ID NO: 40609 - DNA, 427 bp, Homo sapiens
tttgtgttctgttccctattacatgcctaaggcttcagagagctgatagccttcacttcctgccagcccccagcccatggaactgcgtaggaatctgcccatcctcgccctggagggcagaggaccgtaattacttacccaggatagcctgaccactaataaccataatcagccttagagttcaaggaagaatttcaactccagcctgggcggcagagcgagactctctgtctcaaaaaaaaaaaaaaaaaaaaaaaaaaggctcccaatcttgagccaggcgcagccgtgcacacctacctattgtcccagctactcaggagactgaggcaggatgattgcccaggagttcagggcttcagtgcacgttgatcatgtctatgaatgaccactgctctcctgcctaggcaacatagcgagatctcta

SEQ ID NO: 40610 - DNA, 977 bp, Homo sapiens
ggacggaagcgcagagcacggaccccgccccctcgcggccccgctcgtgacgtcgcggggggcgccggcctccgcccggccccgaggggctctccccggaggctcagccccctctgctccccatgggcaactgccaggcagggcacaacctgcacctgtgtctggcccaccacccacctctggtctgtgccactttgatcctgctgctccttggcctctctggcctgggccttggcagcttcctcctcacccacaggactggcctgcgcagccctgacatcccccaggactgggtctcttttttgagatcttttggccagctgaccctgtgtcccaggaatgggacagtcacagggaagtggcgagggtctcacgtcgtgggcttgctgaccaccttgaacttcggagacggtccagacaggaacaagacccggacattccaggccacagtcctgggaagtcagatgggattgaaaggatcttctgcaggacaactggtccttatcacagccagggtgaccacagaaaggactgcaggaacctgcctatattttagtgctgttccaggaatcctaccctccagccagccacccatatcctgctcagaggagggggctggaaatgccaccctgagccctagaatgggtgaggaatgtgttagtgtctggagccatgaaggccttgtgctgaccaagctgctcacctcggaggagctggctctgtgtggctccaggctgctggtcttgggctccttcctgcttctcttctgtggccttctctgctgtgtcactgctatgtgcttccacccgcgccgggagtcccactggtctagaacccggctctgagggcactggcctagttcccgacttgtttctcaggtgtgaatcaacttcttgggccttggctctgagttggaaaaggttttagaaaaagtgaagagctggaatgtgggggaaaataaaaagcttttttgccca

SEQ ID NO: 40611 - DNA, 1854 bp, Homo sapiens
ggctggcggatccgacgcgcgagaccgggaggggacgagggcgttgcaatcgttcggggcgggggctttccggggagggggtgctcaggtgcaccagcggcggcggaccctcagactctgccctcccctccctttaacccccttccagccggacgggaggcggggcagggctgagcatttgtgacacctacatttccgtggctcccttcttttcccccgacccctgtttatctcttcgccttccagaagttcttttccatcaggccgtcgcaccttgcgtgggaaggagcaccccacttggaagcaggaggcggggttcagatcttggccctacccctcctgtgttaaagtccgcgagcctcagtttccctcacagtattttttgcctcgccttacccggttttgaggatctgtacgagaaagagaaaggaagtggacatttgttgaattcctgcatggccaaataccacgcagactgcttcatccgccacgtttaatccttattacttggtgttctcagaactcccatttcatggattcttaagctcacagagtcagtgaataacagaaagggattcagatctagccgtttagctgcacagtggagttcttctccagagtcttcccttgtctgggctctggctggaactattcctcagccaaatcctcgccccagaacagtgcttcctgtttctccagctaagaagtctccctttcagtttccttcttccagcacggagtacactgctctgcctccacttagattacttcagaaatgaaatgcagcaaatatttatccagcagtgcagggagttgaacttttggagtcgggaaccttggattcttgttctggctctgccacttactgtgtggccttgggaagtcctttgtcttctctgagctttcttttctctttgcgtaaaagcggtgctcttgtcccattctccctccctgtcttccagcaggctctccccggaggctcagccccctctgctccccatgggcaactgccaggcagggcacaacctgcacctgtgtctggcccaccacccacctctggtctgtgccactttgatcctgctgctccttggcctctctggcctgggccttggcagcttcctcctcacccacaggactggcctgcgcagccctgacatcccccaggactgggtctcttttttgagatcttttggccagctgaccctgtgtcccaggaatgggacagtcacagggaagtggcgagggtctcacgtcgtgggcttgctgaccaccttgaacttcggagacggtccagacaggaacaagacccggacattccaggccacagtcctgggaagtcagatgggattgaaaggatcttctgcaggacaactggtccttatcacagccagggtgaccacagaaaggactgcaggaacctgcctatattttagtgctgttccaggaatcctaccctccagccagccacccatatcctgctcagaggagggggctggaaatgccaccctgagccctagaatgggtgaggaatgtgttagtgtctggagccatgaaggccttgtgctgaccaagctgctcacctcggaggagctggctctgtgtggctccaggctgctggtcttgggctccttcctgcttctcttctgtggccttctctgctgtgtcactgctatgtgcttccacccgcgccgggagtcccactggtctagaacccggctctgagggcactggcctagttcccgacttgtttctcaggtgtgaatcaacttcttgggccttggctctgagttggaaaaggttttagaaaaagtgaagagctggaatgtgggggaaaataaaaagcttttttgccca

SEQ ID NO: 40612 - DNA, 1937 bp, Homo sapiens
  misc_feature (1907)..(1907): n is a, c, g, or t
  misc_feature (1910)..(1910): n is a, c, g, or t
  misc_feature (1928)..(1928): n is a, c, g, or t
  misc_feature (1931)..(1931): n is a, c, g, or t
ggctggcggatccgacgcgcgagaccgggaggggacgagggcgttgcaatcgttcggggcgggggctttccggggagggggtgctcaggtgcaccagcggcggcggaccctcagactctgccctcccctccctttaacccccttccagccggacgggaggcggggcagggctgagcatttgtgacacctacatttccgtggctcccttcttttcccccgacccctgtttatctcttcgccttccagaagttcttttccatcaggccgtcgcaccttgcgtgggaaggagcaccccacttggaagcaggaggcggggttcagatcttggccctacccctcctgtgttaaagtccgcgagcctcagtttccctcacagtattttttgcctcgccttacccggttttgaggatctgtacgagaaagagaaaggaagtggacatttgttgaattcctgcatggccaaataccacgcagactgcttcatccgccacgtttaatccttattacttggtgttctcagaactcccatttcatggattcttaagctcacagagtcagtgaataacagaaagggattcagatctagccgtttagctgcacagtggagttcttctccagagtcttcccttgtctgggctctggctggaactattcctcagccaaatcctcgccccagaacagtgcttcctgtttctccagctaagaagtctccctttcagtttccttcttccagcacggagtacactgctctgcctccacttagattacttcagaaatgaaatgcagcaaatatttatccagcagtgcagggagttgaacttttggagtcgggaaccttggattcttgttctggctctgccacttactgtgtggccttgggaagtcctttgtcttctctgagctttcttttctctttgcgtaaaagcggtgctcttgtcccattctccctccctgtcttccagcaggctctccccggaggctcagccccctctgctccccatgggcaactgccaggcagggcacaacctgcacctgtgtctggcccaccacccacctctggtctgtgccactttgatcctgctgctccttggcctctctggcctgggccttggcagcttcctcctcacccacaggactggcctgcgcagccctgacatcccccaggactgggtctcttttttgagatcttttggccagctgaccctgtgtcccaggaatgggacagtcacagggaagtggcgagggtctcacgtcgtgggcttgctgaccaccttgaacttcggagacggtccagacaggaacaagacccggacattccaggccacagtcctgggaagtcagatgggattgaaaggatcttctgcaggacaactggtccttatcacagccagggtgaccacagaaaggactgcaggaacctgcctatattttagtgctgttccaggaatcctaccctccagccagccacccatatcctgctcagaggagggggctggaaatgccaccctgagccctagaatgggtgaggaatgtgttagtgtctggagccatgaaggccttgtgctgaccaagctgctcacctcggaggagctggctctgtgtggctccaggctgctggtcttgggctccttcctgcttctcttctgtggccttctctgctgtgtcactgctatgtgcttccacccgcgccgggagtcccactggtctagaacccggctctgagggcactggcctagttcccgacttgtttctcaggtgtgaatcaacttcttgggccttggctctgagttggaaaaggttttagaaaaagtgaagagctggaatgtgggggaaaataaaaagcttttttgcccaaaaaaaaaaaaaaaaaacaaaacaaaaaaaaaaaaaaaaaaaaaaaaaaaaanaanaaaaaaaaaaaaaaaaanaanaaaaag

SEQ ID NO: 40613 - DNA, 3224 bp, Homo sapiens
ggctggcggatccgacgcgcgagaccgggaggggacgagggcgttgcaatcgttcggggcgggggctttccggggagggggtgctcaggtgcaccagcggcggcggaccctcagactctgccctcccctccctttaacccccttccagccggacgggaggcggggcagggctgagcatttgtgacacctacatttccgtggctcccttcttttcccccgacccctgtttatctcttcgccttccagaagttcttttccatcaggccgtcgcaccttgcgtgggaaggagcaccccacttggaagcaggaggcggggttcagatcttggccctacccctcctgtgttaaagtccgcgagcctcagtttccctcacagtattttttgcctcgccttacccggttttgaggatctgtacgagaaagagaaaggaagtggacatttgttgaattcctgcatggccaaataccacgcagactgcttcatccgccacgtttaatccttattacttggtgttctcagaactcccatttcatggattcttaagctcacagagtcagtgaataacagaaagggattcagatctagccgtttagctgcacagtggagttcttctccagagtcttcccttgtctgggctctggctggaactattcctcagccaaatcctcgccccagaacagtgcttcctgtttctccagctaagaagtctccctttcagtttccttcttccagcacggagtacactgctctgcctccacttagattacttcagaaatgaaatgcagcaaatatttatccagcagtgcagggagttgaacttttggagtcgggaaccttggattcttgttctggctctgccacttactgtgtggccttgggaagtcctttgtcttctctgagctttcttttctctttgcgtaaaagcggtgctcttgtcccattctccctccctgtcttccagcaggctctccccggaggctcagccccctctgctccccatgggcaactgccaggcagggcacaacctgcacctgtgtctggcccaccacccacctctggtctgtgccactttgatcctgctgctccttggcctctctggcctgggccttggcagcttcctcctcacccacaggactggcctgcgcagccctgacatcccccaggactgggtctcttttttgagatcttttggccagctgaccctgtgtcccaggaatgggacagtcacagggaagtggcgagggtctcacgtcgtgggcttgctgaccaccttgaacttcggagacggtccagacaggaacaagacccggacattccaggccacagtcctgggaagtcagatgggattgaaaggatcttctgcaggacaactggtccttatcacagccagggtgaccacagaaaggactgcaggaacctgcctatattttagtgctgttccaggaatcctaccctccagccagccacccatatcctgctcagaggagggggctggaaatgccaccctgagccctagaatgggtgaggaatgtgttagtgtctggagccatgaaggccttgtgctgaccaagctgctcacctcggaggagctggctctgtgtggctccaggctgctggtcttgggctccttcctgcttctcttctgtggccttctctgctgtgtcactgctatgtgcttccacccgcgccgggagtcccactggtctagaacccggctctgagggcactggcctagttcccgacttgtttctcagtgaggttctttgctccagtcctgcgggagcagggaatggggtgggggtgggggttgtaaccggggtagagcagatccttggacttttcctcaaagactgctgcttctgagtccccgagaacctcttcaaccacagctctcccttagggactgggaacaatttgacaccgtcagcattcaatatttttctaattactttaacttttttattataaaatagttaacacttatgtagaaaagtccaatagtataaaaggacagcttggcaaattattataaagtggatacttataaataccactgagtagaatattaccagctgtccagaaaccccccatggtcccttccttcctgacaatgccctctctctccctagaaattactgtcctgctttataatgtattgccatgtatgtattcctaaataatatagtttggttttacttatttttgaaactatgtagacagaatcatacacattcttttgtggctgacttctttcaagcaacattgtgattttaagactcataactagttcacatccaagcatttgggtaacaatggtgagttaagagggttcacatttgatgatttgtcctgaatatgaaccatgtttgtcttgcttttgtcctgaaattccaatacccagttttatgatggaaattttgtaaaattcaacttgaaccgctcagaagagtctaactgatgatactcatttactggggacatagtatgtgcccaagaacttgacatgcaccttctgtcttccatttagtcatcgttacctttagaaaaagctgattccgttaacaagatctttggagggaatcagcttcacaaacgtagcagtgggtgggggtcatgttggttaaccagttcacacatcagctcactaaaggaaaaaatatttctgcaaaaaatcttcacttgtcagaggggggtgcatgaaatttgagagccatgtgttatgcatccagctcttgaactggtctcagcttcagctggctgcagtgccctaggaagttactatgggaaaagtggaaatagttgaggcccagggaactgatcaggccagaggaagtggaagctcaagatcaactgtgcttattttgctgatggctgggcctaaatgccccaaccacctacttgggacaggaaatgacaggaccctgtcaaccttggactgggaaaggagggcttcctggcccctgacagaccctggggtcctgaggctaccttagttgggattaaatgcccgtattggtctctagctgtcactccctctgctccttcctcaatttctgcacacatctcagagcttcctctagcagctcttcgacctgttttgttgttttattttctttctccccaggtgtgaatcaacttcttgggccttggctctgagttggaaaaggttttagaaaaagtgaagagctggaatgtgggggaaaataaaaagcttttttgccca

SEQ ID NO: 40614 - DNA, 1508 bp, Homo sapiens
tccaggacttgtacaaccatagaatgacagtattttttgcctcgccttacccggttttgaggatctgtacgagaaagagaaaggaagtggacatttgttgaattcctgcatggccaaataccacgcagactgcttcatccgccacgtttaatccttattacttggtgttctcagaactcccatttcatggattcttaagctcacagagtcagtgaataacagaaagggattcagatctagccgtttagctgcacagtggagttcttctccagagtcttcccttgtctgggctctggctggaactattcctcagccaaatcctcgccccagaacagtgcttcctgtttctccagctaagaagtctccctttcagtttccttcttccagcacggagtacactgctctgcctccacttagattacttcagaaatgaaatgcagcaaatatttatccagcagtgcagggagttgaacttttggagtcgggaaccttggattcttgttctggctctgccacttactgtgtggccttgggaagtcctttgtcttctctgagctttcttttctctttgcgtaaaagcggtgctcttgtcccattctccctccctgtcttccagcaggctctccccggaggctcagccccctctgctccccatgggcaactgccaggcagggcacaacctgcacctgtgtctggcccaccacccacctctggtctgtgccactttgatcctgctgctccttggcctctctggcctgggccttggcagcttcctcctcacccacaggactggcctgcgcagccctgacatcccccaggactgggtctcttttttgagatcttttggccagctgaccctgtgtcccaggaatgggacagtcacagggaagtggcgagggtctcacgtcgtgggcttgctgaccaccttgaacttcggagacggtccagacaggaacaagacccggacattccaggccacagtcctgggaagtcagatgggattgaaaggatcttctgcaggacaactggtccttatcacagccagggtgaccacagaaaggactgcaggaacctgcctatattttagtgctgttccaggaatcctaccctccagccagccacccatatcctgctcagaggagggggctggaaatgccaccctgagccctagaatgggtgaggaatgtgttagtgtctggagccatgaaggccttgtgctgaccaagctgctcacctcggaggagctggctctgtgtggctccaggctgctggtcttgggctccttcctgcttctcttctgtggccttctctgctgtgtcactgctatgtgcttccacccgcgccgggagtcccactggtctagaacccggctctgagggcactggcctagttcccgacttgtttctcaggtgtgaatcaacttcttgggccttggctctgagttggaaaaggttttagaaaaagtgaagagctggaatgtgggggaaaataaaaagcttttttgccca

SEQ ID NO: 40615 - DNA, 1901 bp, Homo sapiens
ggctggcggatccgacgcgcgagaccgggaggggacgagggcgttgcaatcgttcggggcgggggctttccggggagggggtgctcaggtgcaccagcggcggcggaccctcagactctgccctcccctccctttaacccccttccagccggacgggaggcggggcagggctgagcatttgtgacacctacatttccgtggctcccttcttttcccccgacccctgtttatctcttcgccttccagaagttcttttccatcaggccgtcgcaccttgcgtgggaaggagcaccccacttggaagcaggaggcggggttcagatcttggccctacccctcctgtgttaaagtccgcgagcctcagtttccctcacagtattttttgcctcgccttacccggttttgaggatctgtacgagaaagagaaaggaagtggacatttgttgaattcctgcatggccaaataccacgcagactgcttcatccgccacgtttaatccttattacttggtgttctcagaactcccatttcatggattcttaagctcacagagtcagtgaataacagaaagggattcagatctagccgtttagctgcacagtggagttcttctccagagtcttcccttgtctgggctctggctggaactattcctcagccaaatcctcgccccagaacagtgcttcctgtttctccagctaagaagtctccctttcagtttccttcttccagcacggagtacactgctctgcctccacttagattacttcagaaatgaaatgcagcaaatatttatccagcagtgcagggagttgaacttttggagtcgggaaccttggattcttgttctggctctgccacttactgtgtggccttgggaagtcctttgtcttctctgagctttcttttctctttgcgtaaaagcggtgctcttgtcccattctccctccctgtcttccagcaggctctccccggaggctcagccccctctgctccccatgggcaactgccaggcagggcacaacctgcacctgtgtctggcccaccacccacctctggtctgtgccactttgatcctgctgctccttggcctctctggcctgggccttggcagcttcctcctcacccacaggactggcctgcgcagccctgacatcccccaggactgggtctcttttttgagatcttttggccagctgaccctgtgtcccaggaatgggacagtcacagggaagtggcgagggtctcacgtcgtgggcttgctgaccaccttgaacttcggagacggtccagacaggaacaagacccggacattccaggccacagtcctgggaagtcagatgggattgaaaggatcttctgcaggacaactggtccttatcacagccagggtgaccacagaaaggactgcaggaacctgcctatattttagtgctgttccaggaatcctaccctccagccagccacccatatcctgctcagaggagggggctggaaatgccaccctgagccctagaatgggtgaggaatgtgttagtgtctggagccatgaaggccttgtgctgaccaagctgctcacctcggaggagctggctctgtgtggctccaggctgctggtcttgggctccttcctgcttctcttctgtggccttctctgctgtgtcactgctatgtgcttccacccgcgccgggagtcccactggtctagaacccggctctgagggcactggcctagttcccgacttgtttctcaggtgtgaatcaacttcttgggccttggctctgagttggaaaaggttttagaaaaagtgaagagctggaatgtgggggaaaataaaaagcttttttgcccaaaaaacacaaaaaaaacacaaacaacacaacacaccaacacaagaaa

SEQ ID NO: 40616 - DNA, 1843 bp, Homo sapiens
ggctggcggatccgacgcgcgagaccgggaggggacgagggcgttgcaatcgttcggggcgggggctttccggggagggggtgctcaggtgcaccagcggcggcggaccctcagactctgccctcccctccctttaacccccttccagccggacgggaggcggggcagggctgagcatttgtgacacctacatttccgtggctcccttcttttcccccgacccctgtttatctcttcgccttccagaagttcttttccatcaggccgtcgcaccttgcgtgggaaggagcaccccacttggaagcaggaggcggggttcagatcttggccctacccctcctgtgttaaagtccgcgagcctcagtttccctcacagtattttttgcctcgccttacccggttttgaggatctgtacgagaaagagaaaggaagtggacatttgttgaattcctgcatggccaaataccacgcagactgcttcatccgccacgtttaatccttattacttggtgttctcagaactcccatttcatggattcttaagctcacagagtcagtgaataacagaaagggattcagatctagccgtttagctgcacagtggagttcttctccagagtcttcccttgtctgggctctggctggaactattcctcagccaaatcctcgccccagaacagtgcttcctgtttctccagctaagaagtctccctttcagtttccttcttccagcacggagtacactgctctgcctccacttagattacttcagaaatgaaatgcagcaaatatttatccagcagtgcagggagttgaacttttggagtcgggaaccttggattcttgttctggctctgccacttactgtgtggccttgggaagtcctttgtcttctctgagctttcttttctctttgcgtaaaagcggtgctcttgtcccattctccctccctgtcttccagcaggctctccccggaggctcagccccctctgctccccatgggcaactgccaggcagggcacaacctgcacctgtgtctggcccaccacccacctctggtctgtgccactttgatcctgctgctccttggcctctctggcctgggccttggcagcttcctcctcacccacaggactggcctgcgcagccctgacatcccccaggactgggtctcttttttgagatcttttggccagctgaccctgtgtcccaggaatgggacagtcacagggaagtggcgagggtctcacgtcgtgggcttgctgaccaccttgaacttcggagacggtccagacaggaacaagacccggacattccaggccacagtcctgggaagtcagatgggattgaaaggatcttctgcaggacaactggtccttatcacagccagggtgaccacagaaaggactgcaggaacctgcctatattttagtgctgttccaggaatcctaccctccagccagccacccatatcctgctcagaggagggggctggaaatgccaccctgagccctagaatgggtgaggaatgtgttagtgtctggagccatgaaggccttgtgctgaccaagctgctcacctcggaggagctggctctgtgtggctccaggctgctggtcttgggctccttcctgcttctcttctgtggccttctctgctgtgtcactgctatgtgcttccacccgcgccgggagtcccactggtctagaacccggctctgagggcactggcctagttcccgacttgtttctcaggtgtgaatcaacttcttgggccttggctctgagttggaaaaggttttagaaaaagtgaagagctggagggggccgcgcgggggatcct

SEQ ID NO: 40617 - DNA, 935 bp, Homo sapiens
  misc_feature (11)..(11): n is a, c, g, or t
ctgtacggtcngaatcccgggatcgccgcctccgcccggcccgagggctctccccggaggctcagccccctctgctccccatgggcaactgccaggcagggcacaacctgcacctgtgtctggcccaccacccacctctggtctgtgccactttgatcctgctgctccttggcctctctggcctgggccttggcagcttcctcctcacccacaggactggcctgcgcagccctgacatcccccaggactgggtctcttttttgagatcttttggccagctgaccctgtgtcccaggaatgggacagtcacagggaagtggcgagggtctcacgtcgtgggcttgctgaccaccttgaacttcggagacggtccagacaggaacaagacccggacattccaggccacagtcctgggaagtcagatgggattgaaaggatcttctgcaggacaactggtccttatcacagccagggtgaccacagaaaggactgcaggaacctgcctatattttagtgctgttccaggaatcctaccctccagccagccacccatatcctgctcagaggagggggctggaaatgccaccctgagccctagaatgggtgaggaatgtgttagtgtctggagccatgaaggccttgtgctgaccaagctgctcacctcggaggagctggctctgtgtggctccaggctgctggtcttgggctccttcctgcttctcttctgtggccttctctgctgtgtcactgctatgtgcttccacccgcgccgggagtcccactggtctagaacccggctctgagggcactggcctagttcccgacttgtttctcaggtgtgaatcaacttcttgggccttggctctgagttggaaaaggttttagaaaaagtgaagagctggaatgtgggggaaaataaaaagcttttttgccca

SEQ ID NO: 40618 - DNA, 2398 bp, Homo sapiens
atcctcagggaacaagcttcaattgaatgaaactggcttgaccacagaggaatctgggggactttctgagcttcgcggacttgtgccgcctcctgactttaagctggctctggaggaggaggaagtggaggtatctcaggctctccccggaggctcagccccctctgctccccatgggcaactgccaggcagggcacaacctgcacctgtgtctggcccaccacccacctctggtctgtgccactttgatcctgctgctccttggcctctctggcctgggccttggcagcttcctcctcacccacaggactggcctgcgcagccctgacatcccccaggactgggtctcttttttgagatcttttggccagctgaccctgtgtcccaggaatgggacagtcacagggaagtggcgagggtctcacgtcgtgggcttgctgaccaccttgaacttcggagacggtccagacaggaacaagacccggacattccaggccacagtcctgggaagtcagatgggattgaaaggatcttctgcaggacaactggtccttatcacagccagggtgaccacagaaaggactgcaggaacctgcctatattttagtgctgttccaggaatcctaccctccagccagccacccatatcctgctcagaggagggggctggaaatgccaccctgagccctagaatgggtgaggaatgtgttagtgtctggagccatgaaggccttgtgctgaccaagctgctcacctcggaggagctggctctgtgtggctccaggctgctggtcttgggctccttcctgcttctcttctgtggccttctctgctgtgtcactgctatgtgcttccacccgcgccgggagtcccactggtctagaacccggctctgagggcactggcctagttcccgacttgtttctcagtgaggttctttgctccagtcctgcgggagcagggaatggggtgggggtgggggttgtaaccggggtagagcagatccttggacttttcctcaaagactgctgcttctgagtccccgagaacctcttcaaccacagctctcccttagggactgggaacaatttgacaccgtcagcattcaatatttttctaattactttaacttttttattataaaatagttaacacttatgtagaaaagtccaatagtataaaaggacagcttggcaaattattataaagtggatacttataaataccactgagtagaatattaccagctgtccagaaaccccccatggtcccttccttcctgacaatgccctctctctccctagaaattactgtcctgctttataatgtattgccatgtatgtattcctaaataatatagtttggttttacttatttttgaaactatgtagacagaatcatacacattcttttgtggctgacttctttcaagcaacattgtgattttaagactcataactagttcacatccaagcatttgggtaacaatggtgagttaagagggttcacatttgatgatttgtcctgaatatgaaccatgtttgtcttgcttttgtcctgaaattccaatacccagttttatgatggaaattttgtaaaattcaacttgaaccgctcagaagagtctaactgatgatactcatttactggggacatagtatgtgcccaagaacttgacatgcaccttctgtcttccatttagtcatcgttacctttagaaaaagctgattccgttaacaagatctttggagggaatcagcttcacaaacgtagcagtgggtgggggtcatgttggttaaccagttcacacatcagctcactaaaggaaaaaatatttctgcaaaaaatcttcacttgtcagaggggggtgcatgaaatttgagagccatgtgttatgcatccagctcttgaactggtctcagcttcagctggctgcagtgccctaggaagttactatgggaaaagtggaaatagttgaggcccagggaactgatcaggccagaggaagtggaagctcaagatcaactgtgcttattttgctgatggctgggcctaaatgccccaaccacctacttgggacaggaaatgacaggaccctgtcaaccttggactgggaaaggagggcttcctggcccctgacagaccctggggtcctgaggctaccttagttgggattaaatgcccgtattggtctctagctgtcactccctctgctccttcctcaatttctgcacacatctcagagcttcctctagcagctcttcgacctgttttgttgttttattttctttctccccaggtgtgaatcaacttcttgggccttggctctgagttggaaaaggttttagaaaaagtgaagagctggaatgtgggggaaaataaaaagcttttttgccca

SEQ ID NO: 40619 - DNA, 2387 bp, Homo sapiens
ggctggcggatccgacgcgcgagaccgggaggggacgagggcgttgcaatcgttcggggcgggggctttccggggagggggtgctcaggtgcaccagcggcggcggaccctcagactctgccctcccctccctttaacccccttccagccggacgggaggcggggcagggctgagcatttgtgacacctacatttccgtggctcccttcttttcccccgacccctgtttatctcttcgccttccagaagttcttttccatcaggccgtcgcaccttgcgtgggaaggagcaccccacttggaagcaggaggcggggttcagatcttggccctacccctcctgtgttaaagtccgcgagcctcagtttccctcacagtattttttgcctcgccttacccggttttgaggatctgtacgagaaagagaaaggaagtggacatttgttgaattcctgcatggccaaataccacgcagactgcttcatccgccacgtttaatccttattacttggtgttctcagaactcccatttcatggattcttaagctcacagagtcagtgaataacagaaagggattcagatctagccgtttagctgcacagtggagttcttctccagagtcttcccttgtctgggctctggctggaactattcctcagccaaatcctcgccccagaacagtgcttcctgtttctccagctaagaagtctccctttcagtttccttcttccagcacggagtacactgctctgcctccacttagattacttcagaaatgaaatgcagcaaatatttatccagcagtgcagggagttgaacttttggagtcgggaaccttggattcttgttctggctctgccacttactgtgtggccttgggaagtcctttgtcttctctgagctttcttttctctttgctgaggttctttgctccagtcctgcgggagcagggaatggggtgggggtgggggttgtaaccggggtagagcagatccttggacttttcctcaaagactgctgcttctgagtccccgagaacctcttcaaccacagctctcccttagggactgggaacaatttgacaccgtcagcattcaatatttttctaattactttaacttttttattataaaatagttaacacttatgtagaaaagtccaatagtataaaaggacagcttggcaaattattataaagtggatacttataaataccactgagtagaatattaccagctgtccagaaaccccccatggtcccttccttcctgacaatgccctctctctccctagaaattactgtcctgctttataatgtattgccatgtatgtattcctaaataatatagtttggttttacttatttttgaaactatgtagacagaatcatacacattcttttgtggctgacttctttcaagcaacattgtgattttaagactcataactagttcacatccaagcatttgggtaacaatggtgagttaagagggttcacatttgatgatttgtcctgaatatgaaccatgtttgtcttgcttttgtcctgaaattccaatacccagttttatgatggaaattttgtaaaattcaacttgaaccgctcagaagagtctaactgatgatactcatttactggggacatagtatgtgcccaagaacttgacatgcaccttctgtcttccatttagtcatcgttacctttagaaaaagctgattccgttaacaagatctttggagggaatcagcttcacaaacgtagcagtgggtgggggtcatgttggttaaccagttcacacatcagctcactaaaggaaaaaatatttctgcaaaaaatcttcacttgtcagaggggggtgcatgaaatttgagagccatgtgttatgcatccagctcttgaactggtctcagcttcagctggctgcagtgccctaggaagttactatgggaaaagtggaaatagttgaggcccagggaactgatcaggccagaggaagtggaagctcaagatcaactgtgcttattttgctgatggctgggcctaaatgccccaaccacctacttgggacaggaaatgacaggaccctgtcaaccttggactgggaaaggagggcttcctggcccctgacagaccctggggtcctgaggctaccttagttgggattaaatgcccgtattggtctctagctgtcactccctctgctccttcctcaatttctgcacacatctcagagcttcctctagcagctcttcgacctgttttgttgttttattttctttctccccaggtgtgaatcaacttcttgggccttggctctgagttggaaaaggttttagaaaaagtgaagagctggaatgtgggggaaaataaaaagcttttttgccca

SEQ ID NO: 40620 - DNA, 1719 bp, Homo sapiens
ggctggcggatccgacgcgcgagaccgggaggggacgagggcgttgcaatcgttcggggcgggggctttccggggagggggtgctcaggtgcaccagcggcggcggaccctcagactctgccctcccctccctttaacccccttccagccggacgggaggcggggcagggctgagcatttgtgacacctacatttccgtggctcccttcttttcccccgacccctgtttatctcttcgccttccagaagttcttttccatcaggccgtcgcaccttgcgtgggaaggagcaccccacttggaagcaggaggcggggttcagatcttggccctacccctcctgtgttaaagtccgcgagcctcagtttccctcacagtattttttgcctcgccttacccggttttgaggatctgtacgagaaagagaaaggaagtggacatttgttgaattcctgcatggccaaataccacgcagactgcttcatccgccacgtttaatccttattacttggtgttctcagaactcccatttcatggattcttaagctcacagagtcagtgaataacagaaagggattcagatctagccgtttagctgcacagtggagttcttctccagagtcttcccttgtctgggctctggctggaactattcctcagccaaatcctcgccccagaacagtgcttcctgtttctccagctaagaagtctccctttcagtttccttcttccagcacggagtacactgctctgcctccacttagattacttcagaaatgaaatgcagcaaatatttatccagcagtgcagggagttgaacttttggagtcgggaaccttggattcttgttctggctctgccacttactgtgtggccttgggaagtcctttgtcttctctgagctttcttttctctttgcgtaaaagcggtgctcttgtcccattctccctccctgtcttccagcaggctctccccggaggctcagccccctctgctccccatgggcaactgccaggcagggcacaacctgcacctgtgtctggcccaccacccacctctggtctgtgccactttgatcctgctgctccttggcctctctggcctgggccttggcagcttcctcctcacccacaggactggcctgcgcagccctgacatcccccaggactgggtctcttttttgagatcttttggccagctgaccctgtgtcccaggaatgggacagtcacagggaagtggcgagggtctcacgtcgtgggcttgctgaccaccttgaacttcggagacggtccagacaggaacaagacccggacattccaggccacagtcctgggaagtcagatgggattgaaaggatcttctgcaggacaactggtccttatcacagccagggtgaccacagaaaggactgcaggaacctgcctatattttagtgctgttccaggaatcctaccctccagccagccacccatatcgctgctggtcttgggctccttcctgcttctcttctgtggccttctctgctgtgtcactgctatgtgcttccacccgcgccgggagtcccactggtctagaacccggctctgagggcactggcctagttcccgacttgtttctcaggtgtgaatcaacttcttgggccttggctctgagttggaaaaggttttagaaaaagtgaagagctggaatgtgggggaaaataaaaagcttttttgccca

SEQ ID NO: 40621 - DNA, 1624 bp, Homo sapiens
ggctggcggatccgacgcgcgagaccgggaggggacgagggcgttgcaatcgttcggggcgggggctttccggggagggggtgctcaggtgcaccagcggcggcggaccctcagactctgccctcccctccctttaacccccttccagccggacgggaggcggggcagggctgagcatttgtgacacctacatttccgtggctcccttcttttcccccgacccctgtttatctcttcgccttccagaagttcttttccatcaggccgtcgcaccttgcgtgggaaggagcaccccacttggaagcaggaggcggggttcagatcttggccctacccctcctgtgttaaagtccgcgagcctcagtttccctcacagtattttttgcctcgccttacccggttttgaggatctgtacgagaaagagaaaggaagtggacatttgttgaattcctgcatggccaaataccacgcagactgcttcatccgccacgtttaatccttattacttggtgttctcagaactcccatttcatggattcttaagctcacagagtcagtgaataacagaaagggattcagatctagccgtttagctgcacagtggagttcttctccagagtcttcccttgtctgggctctggctggaactattcctcagccaaatcctcgccccagaacagtgcttcctgtttctccagctaagaagtctccctttcagtttccttcttccagcacggagtacactgctctgcctccacttagattacttcagaaatgaaatgcagcaaatatttatccagcagtgcagggagttgaacttttggagtcgggaaccttggattcttgttctggctctgccacttactgtgtggccttgggaagtcctttgtcttctctgagctttcttttctctttgcgtaaaagcggtgctcttgtcccattctccctccctgtcttccagcaggctctccccggaggctcagccccctctgctccccatgggcaactgccaggcagggcacaacctgcacctgtgtctggcccaccacccacctctggtctgtgccactttgatcctgctgctccttggcctctctggcctgggccttggcagcttcctcctcacccacaggactggcctgcgcagccctgacatcccccaggactgggtctcttttttgagatcttttggccagctgaccctgtgtcccaggaatgggacagtcacagggaagtggcgagggtctcacgtcgtgggcttgctgaccaccttgaacttcggagacggtccagacaggaacaagacccggacattccaggccacagtcctgggaagtcagatgggattgaaaggaggagctggctctgtgtggctccaggctgctggtcttgggctccttcctgcttctcttctgtggccttctctgctgtgtcactgctatgtgcttccacccgcgccgggagtcccactggtctagaacccggctctgagggcactggcctagttcccgacttgtttctcaggtgtgaatcaacttcttgggccttggctctgagttggaaaaggttttagaaaaagtgaagagctggaatgtgggggaaaataaaaagcttttttgccca

SEQ ID NO: 40622 - DNA, 1813 bp, Homo sapiens
tgccctcatccagtggcatgccctgatccacctggtatgaaaataacagggtccccctgtcccttcagttgctccctagatgtggagagccctctccctcatggaggctccttctatagcccttggactggattaacatgtcctcctcctcctctccctgtacccctccctaggaggagctggctctgtgtggctccaggctgctggtcttgggctccttcctgcttctcttctgtggccttctctgctgtgtcactgctatgtgcttccacccgcgccgggagtcccactggtctagaacccggctctgagggcactggcctagttcccgacttgtttctcagtgaggttctttgctccagtcctgcgggagcagggaatggggtgggggtgggggttgtaaccggggtagagcagatccttggacttttcctcaaagactgctgcttctgagtccccgagaacctcttcaaccacagctctcccttagggactgggaacaatttgacaccgtcagcattcaatatttttctaattactttaacttttttattataaaatagttaacacttatgtagaaaagtccaatagtataaaaggacagcttggcaaattattataaagtggatacttataaataccactgagtagaatattaccagctgtccagaaaccccccatggtcccttccttcctgacaatgccctctctctccctagaaattactgtcctgctttataatgtattgccatgtatgtattcctaaataatatagtttggttttacttatttttgaaactatgtagacagaatcatacacattcttttgtggctgacttctttcaagcaacattgtgattttaagactcataactagttcacatccaagcatttgggtaacaatggtgagttaagagggttcacatttgatgatttgtcctgaatatgaaccatgtttgtcttgcttttgtcctgaaattccaatacccagttttatgatggaaattttgtaaaattcaacttgaaccgctcagaagagtctaactgatgatactcatttactggggacatagtatgtgcccaagaacttgacatgcaccttctgtcttccatttagtcatcgttacctttagaaaaagctgattccgttaacaagatctttggagggaatcagcttcacaaacgtagcagtgggtgggggtcatgttggttaaccagttcacacatcagctcactaaaggaaaaaatatttctgcaaaaaatcttcacttgtcagaggggggtgcatgaaatttgagagccatgtgttatgcatccagctcttgaactggtctcagcttcagctggctgcagtgccctaggaagttactatgggaaaagtggaaatagttgaggcccagggaactgatcaggccagaggaagtggaagctcaagatcaactgtgcttattttgctgatggctgggcctaaatgccccaaccacctacttgggacaggaaatgacaggaccctgtcaaccttggactgggaaaggagggcttcctggcccctgacagaccctggggtcctgaggctaccttagttgggattaaatgcccgtattggtctctagctgtcactccctctgctccttcctcaatttctgcacacatctcagagcttcctctagcagctcttcgacctgttttgttgttttattttctttctccccaggtgtgaatcaacttcttgggccttggctctgagttggaaaaggttttagaaaaagtgaagagctggaatgtgggggaaaataaaaagcttttttgccca

SEQ ID NO: 40623 - DNA, 1240 bp, Homo sapiens
aatttcccccgcgcggaattgagaacaggctcttggcaaattattataaagtggatacttataaataccactgagtagaatattaccagctgtccagaaaccccccatggtcccttccttcctgacaatgccctctctctccctagaaattactgtcctgctttataatgtattgccatgtatgtattcctaaataatatagtttggttttacttatttttgaaactatgtagacagaatcatacacattcttttgtggctgacttctttcaagcaacattgtgattttaagactcataactagttcacatccaagcatttgggtaacaatggtgagttaagagggttcacatttgatgatttgtcctgaatatgaaccatgtttgtcttgcttttgtcctgaaattccaatacccagttttatgatggaaattttgtaaaattcaacttgaaccgctcagaagagtctaactgatgatactcatttactggggacatagtatgtgcccaagaacttgacatgcaccttctgtcttccatttagtcatcgttacctttagaaaaagctgattccgttaacaagatctttggagggaatcagcttcacaaacgtagcagtgggtgggggtcatgttggttaaccagttcacacatcagctcactaaaggaaaaaatatttctgcaaaaaatcttcacttgtcagaggggggtgcatgaaatttgagagccatgtgttatgcatccagctcttgaactggtctcagcttcagctggctgcagtgccctaggaagttactatgggaaaagtggaaatagttgaggcccagggaactgatcaggccagaggaagtggaagctcaagatcaactgtgcttattttgctgatggctgggcctaaatgccccaaccacctacttgggacaggaaatgacaggaccctgtcaaccttggactgggaaaggagggcttcctggcccctgacagaccctggggtcctgaggctaccttagttgggattaaatgcccgtattggtctctagctgtcactccctctgctccttcctcaatttctgcacacatctcagagcttcctctagcagctcttcgacctgttttgttgttttattttctttctccccaggtgtgaatcaacttcttgggccttggctctgagttggaaaaggttttagaaaaagtgaagagctggaatgtgggggaaaataaaaagcttttttgccca

SEQ ID NO: 40624 - DNA, 1953 bp, Homo sapiens
ggctggcggatccgacgcgcgagaccgggaggggacgagggcgttgcaatcgttcggggcgggggctttccggggagggggtgctcaggtgcaccagcggcggcggaccctcagactctgccctcccctccctttaacccccttccagccggacgggaggcggggcagggctgagcatttgtgacacctacatttccgtggctcccttcttttcccccgacccctgtttatctcttcgccttccagaagttcttttccatcaggccgtcgcaccttgcgtgggaaggagcaccccacttggaagcaggaggcggggttcagatcttggccctacccctcctgtgttaaagtccgcgagcctcagtttccctcacagtattttttgcctcgccttacccggttttgaggatctgtacgagaaagagaaaggaagtggacatttgttgaattcctgcatggccaaataccacgcagactgcttcatccgccacgtttaatccttattacttggtgttctcagaactcccatttcatggattcttaagctcacagagtcagtgaataacagaaagggattcagatctagccgtttagctgcacagtggagttcttctccagagtcttcccttgtctgggctctggctggaactattcctcagccaaatcctcgccccagaacagtgcttcctgtttctccagctaagaagtctccctttcagtttccttcttccagcacggagtacactgctctgcctccacttagattacttcagaaatgaaatgcagcaaatatttatccagcagtgcagggagttgaacttttggagtcgggaaccttggattcttgttctggctctgccacttactgtgtggccttgggaagtcctttgtcttctctgagctttcttttctctttgcgtaaaagcggtgctcttgtcccattctccctccctgtcttccagcaggctctccccggaggctcagccccctctgctccccatgggcaactgccaggcagggcacaacctgcacctgtgtctggcccaccacccacctctggtctgtgccactttgatcctgctgctccttggcctctctggcctgggccttggcagcttcctcctcacccacaggactggcctgcgcagccctgacatcccccaggactgggtctcttttttgagatcttttggccagctgaccctgtgtcccaggaatgggacagtcacagggaagtggcgagggtctcacgtcgtgggcttgctgaccaccttgaacttcggagacggtccagacaggaacaagacccggacattccaggccacagtcctgggaagtcagatgggattgaaaggatcttctgcaggacaactggtccttatcacagccagggtgaccacagaaaggactgcaggaacctgcctatattttagtgctgttccaggaatcctaccctccagccagccacccatatcctgctcagaggagggggctggaaatgccaccctgagccctagaatgggtgaggaatgtgttagtgtctggagccatgaaggccttgtgctgaccaagctgctcacctcggaggagctggctctgtgtggctccaggctgctggtcttgggctccttcctgcttctcttctgtggccttctctgctgtgtcactgctatgtgcttccacccgcgccgggagtcccactggtctagaacccggctctgagggcactggcctagttcccgacttgtttctcagacagaatcatacacattcttttgtggctgacttctttcaagcaacattgtgattttaagactcataactagttcacatccaagcatttgggtaacaatggtgtgaatcaacttcttgggccttggctctgagttggaaaaggttttagaaaaagtgaagagctggaatgtgggggaaaataaaaagcttttttgccca

SEQ ID NO: 40625 - DNA, 1028 bp, Homo sapiens
atcctcagggaacaagcttcaattgaatgaaactggcttgaccacagaggaatctgggggactttctgagcttcgcggacttgtgccgcctcctgactttaagctggctctggaggaggaggaagtggaggtatctcaggctctccccggaggctcagccccctctgctccccatgggcaactgccaggcagggcacaacctgcacctgtgtctggcccaccacccacctctggtctgtgccactttgatcctgctgctccttggcctctctggcctgggccttggcagcttcctcctcacccacaggactggcctgcgcagccctgacatcccccaggactgggtctcttttttgagatcttttggccagctgaccctgtgtcccaggaatgggacagtcacagggaagtggcgagggtctcacgtcgtgggcttgctgaccaccttgaacttcggagacggtccagacaggaacaagacccggacattccaggccacagtcctgggaagtcagatgggattgaaaggatcttctgcaggacaactggtccttatcacagccagggtgaccacagaaaggactgcaggaacctgcctatattttagtgctgttccaggaatcctaccctccagccagccacccatatcctgctcagaggagggggctggaaatgccaccctgagccctagaatgggtgaggaatgtgttagtgtctggagccatgaaggccttgtgctgaccaagctgctcacctcggaggagctggctctgtgtggctccaggctgctggtcttgggctccttcctgcttctcttctgtggccttctctgctgtgtcactgctatgtgcttccacccgcgccgggagtcccactggtctagaacccggctctgagggcactggcctagttcccgacttgtttctcaggtgtgaatcaacttcttgggccttggctctgagttggaaaaggttttagaaaaagtgaagagctggaatgtgggggaaaataaaaagcttttttgccca

SEQ ID NO: 40626 - DNA, 2034 bp, Homo sapiens
ggctggcggatccgacgcgcgagaccgggaggggacgagggcgttgcaatcgttcggggcgggggctttccggggagggggtgctcaggtgcaccagcggcggcggaccctcagactctgccctcccctccctttaacccccttccagccggacgggaggcggggcagggctgagcatttgtgacacctacatttccgtggctcccttcttttcccccgacccctgtttatctcttcgccttccagaagttcttttccatcaggccgtcgcaccttgcgtgggaaggagcaccccacttggaagcaggaggcggggttcagatcttggccctacccctcctgtgttaaagtccgcgagcctcagtttccctcacagtattttttgcctcgccttacccggttttgaggatctgtacgagaaagagaaaggaagtggacatttgttgaattcctgcatggccaaataccacgcagactgcttcatccgccacgtttaatccttattacttggtgttctcagaactcccatttcatggattcttaagctcacagagtcagtgaataacagaaagggattcagatctagccgtttagctgcacagtggagttcttctccagagtcttcccttgtctgggctctggctggaactattcctcagccaaatcctcgccccagaacagtgcttcctgtttctccagctaagaagtctccctttcagtttccttcttccagcacggagtacactgctctgcctccacttagattacttcagaaatgaaatgcagcaaatatttatccagcagtgcagggagttgaacttttggagtcgggaaccttggattcttgttctggctctgccacttactgtgtggccttgggaagtcctttgtcttctctgagctttcttttctctttgcgtaaaagcggtgctcttgtcccattctccctccctgtcttccagcaggctctccccggaggctcagccccctctgctccccatgggcaactgccaggcagggcacaacctgcacctgtgtctggcccaccacccacctctggtctgtgccactttgatcctgctgctccttggcctctctggcctgggccttggcagcttcctcctcacccacaggactggcctgcgcagccctgacatcccccaggactgggtctcttttttgagatcttttggccagctgaccctgtgtcccaggaatgggacagtcacagggaagtggcgagggtctcacgtcgtgggcttgctgaccaccttgaacttcggagacggtccagacaggaacaagacccggacattccaggccacagtcctgggaagtcagatgggattgaaaggatcttctgcaggacaactggtccttatcacagccagggtgaccacagaaaggactgcaggaacctgcctatattttagtgctgttccaggaatcctaccctccagccagccacccatatcctgctcagaggagggggctggaaatgccaccctgagccctagaatgggtgaggaatgtgttagtgtctggagccatgaaggccttgtgctgaccaagctgctcacctcggaggagctggctctgtgtggctccaggctgctggtcttgggctccttcctgcttctcttctgtggccttctctgctgtgtcactgctatgtgcttccacagaagagaagcaggaaggagccctagaatgggtgagggatgtgatagagatctggagccaagaaggccgtatcaggtgatgcaatgatggttcatcggggatggagctggatctgggtggcaggtcaggctagcagggtgaggagctgcttatgtggtttcgtcatgactgtgaggcttctctgcgtgatgatcactgagtatggtgcgttacaggcacgggccgggagatcccacatggtctaaacgcgggtctgagggcattggaactagatacacgacgggtatctcaggtggtgaatcagcttgttgggcttggatctgagtggaaaaggtaagaaaaggtgaaagc

SEQ ID NO: 40627 - DNA, 1801 bp, Homo sapiens
ggctggcggatccgacgcgcgagaccgggaggggacgagggcgttgcaatcgttcggggcgggggctttccggggagggggtgctcaggtgcaccagcggcggcggaccctcagactctgccctcccctccctttaacccccttccagccggacgggaggcggggcagggctgagcatttgtgacacctacatttccgtggctcccttcttttcccccgacccctgtttatctcttcgccttccagaagttcttttccatcaggccgtcgcaccttgcgtgggaaggagcaccccacttggaagcaggaggcggggttcagatcttggccctacccctcctgtgttaaagtccgcgagcctcagtttccctcacagtattttttgcctcgccttacccggttttgaggatctgtacgagaaagagaaaggaagtggacatttgttgaattcctgcatggccaaataccacgcagactgcttcatccgccacgtttaatccttattacttggtgttctcagaactcccatttcatggattcttaagctcacagagtcagtgaataacagaaagggattcagatctagccgtttagctgcacagtggagttcttctccagagtcttcccttgtctgggctctggctggaactattcctcagccaaatcctcgccccagaacagtgcttcctgtttctccagctaagaagtctccctttcagtttccttcttccagcacggagtacactgctctgcctccacttagattacttcagaaatgaaatgcagcaaatatttatccagcagtgcagggagttgaacttttggagtcgggaaccttggattcttgttctggctctgccacttactgtgtggccttgggaagtcctttgtcttctctgagctttcttttctctttgcgtaaaagcggtgctcttgtcccattctccctccctgtcttccagcaggctctccccggaggctcagccccctctgctccccatgggcaactgccaggcagggcacaacctgcacctgtgtctggcccaccacccacctctggtctgtgccactttgatcctgctgctccttggcctctctggcctgggccttggcagcttcctcctcacccacaggactggcctgcgcagccctgacatcccccaggactgggtctcttttttgagatcttttggccagctgaccctgtgtcccaggaatgggacagtcacagggaagtggcgagggtctcacgtcgtgggcttgctgaccaccttgaacttcggagacggtccagacaggaacaagacccggacattccaggccacagtcctgggaagtcagatgggattgaaaggatcttctgcaggacaactggtccttatcacagccagggtgaccacagaaaggactgcaggaacctgcctatattttagtgctgttccaggaatcctaccctccagccagccacccatatcctgctcagaggagggggctggaaatgccaccctgagccctagaatgggtgaggaatgtgttagtgtctggagccatgaaggccttgtgctgaccaagctgctcacctcggtaagagcctcagatgggtcgccagggttttgtagactgcctgctgactactgtatcttgaaggtccctggaaacaattctaccttgtagaaaaagcacaggttttataaccctgccttgggggctgtgtgacgtagaacaagtgtctaaacatctctgagtgtcagcatcctcatctgtaaaacagaaaacatgaccctatctcttaattccatca

SEQ ID NO: 40628 - DNA, 1697 bp, Homo sapiens
ggctggcggatccgacgcgcgagaccgggaggggacgagggcgttgcaatcgttcggggcgggggctttccggggagggggtgctcaggtgcaccagcggcggcggaccctcagactctgccctcccctccctttaacccccttccagccggacgggaggcggggcagggctgagcatttgtgacacctacatttccgtggctcccttcttttcccccgacccctgtttatctcttcgccttccagaagttcttttccatcaggccgtcgcaccttgcgtgggaaggagcaccccacttggaagcaggaggcggggttcagatcttggccctacccctcctgtgttaaagtccgcgagcctcagtttccctcacagtattttttgcctcgccttacccggttttgaggatctgtacgagaaagagaaaggaagtggacatttgttgaattcctgcatggccaaataccacgcagactgcttcatccgccacgtttaatccttattacttggtgttctcagaactcccatttcatggattcttaagctcacagagtcagtgaataacagaaagggattcagatctagccgtttagctgcacagtggagttcttctccagagtcttcccttgtctgggctctggctggaactattcctcagccaaatcctcgccccagaacagtgcttcctgtttctccagctaagaagtctccctttcagtttccttcttccagcacggagtacactgctctgcctccacttagattacttcagaaatgaaatgcagcaaatatttatccagcagtgcagggagttgaacttttggagtcgggaaccttggattcttgttctggctctgccacttactgtgtggccttgggaagtcctttgtcttctctgagctttcttttctctttgcgtaaaagcggtgctcttgtcccattctccctccctgtcttccagcaggctctccccggaggctcagccccctctgctccccatgggcaactgccaggcagggcacaacctgcacctgtgtctggcccaccacccacctctggtctgtgccactttgatcctgctgctccttggcctctctggcctgggccttggcagcttcctcctcacccacaggactggcctgcgcagccctgacatcccccaggactgggtctcttttttgagatcttttggccagctgaccctgtgtcccaggaatgggacagtcacagggaagtggcgagggtctcacgtcgtgggcttgctgaccaccttgaacttcggagacggtccagacaggaacaagacccggacattccaggccacagtcctgggaagtcagatgggattgaaaggatcttctgcaggacaactggtccttatcacagccagggtgaccacagaaaggactgcaggaacctgcctatattttagtgctgttccaggaatcctaccctccagccagccacccatatcctgcttctcttctgtggccttctctgctgtgtcactgctatgtgcttccacccgcgccgggagtcccactggtctagaacccggctctgagggcactggcctagttcccgacttgtttctcaggtgtgaatcaacttcttgggccttggctctgagttggaaaaggttttagaaaaagtgaagagctggaatgtgggggaaaataaaaagcttttttgccca

SEQ ID NO: 40629 - DNA, 620 bp, Homo sapiens
tctgcatcgttacgcggaatctgtgggctgtgacgtacttgaacttcggagacggtccagacaggaacaagacccggacattccaggccacagtcctgggaagtcagatgggattgaaaggatcttctgcaggacaactggtccttatcacagccagggtgaccacagaaaggactgcaggaacctgcctatattttagtgctgttccaggaatcctaccctccagccagccacccatatcctgctcagaggagggggctggaaatgccaccctgagccctagaatgggtgaggaatgtgttagtgtctggagccatgaaggccttgtgctgaccaagctgctcacctcggaggagctggctctgtgtggctccaggctgctggtcttgggctccttcctgcttctcttctgtggccttctctgctgtgtcactgctatgtgcttccacccgcgccgggagtcccactggtctagaacccggctctgagggcactggcctagttcccgacttgtttctcaggtgtgaatcaacttcttgggccttggctctgagttggaaaaggttttagaaaaagtgaagagctggaatgtgggggaaaataaaaagcttttttgccca

SEQ ID NO: 40630 - DNA, 2049 bp, Homo sapiens
gccgccgcactgctctgtgggacgcggcgacccctctcccgcggcggccgggaccccgcgcccaccgcgtctggagcccacctggcggccccactggctacatttccgacctggaccccggccggctgcgggaaacactcggcgtctcggctgtcaccgaacctgtgcagttgccgcggggggagtcgtgcgtgtcagatttaggccaggaagcggaagtcgccagcagcgagagtttaacctctgtgggcgcagagggttgcggggattcagcgcccgggaccgtggatctgtgcagggagtcataggtgtgtgtgacatcagtggtggaacattttggctcgttttcacaattcagtcattatcctttctgctttcctcctggaagcattaaggttgaagttttcttctaaagatcaaagttttgatttgttatattagttcggatttgtttgatttttgtttgtgttcggtttcaagtgctgatttgtaacttttctccccccccccacacacgccttttgacccctgaattatttaaaagtccattgttggagtggcaaacatcctccgagactcaaagggcaaggccatgggcgctttattccggctgctgctccaggaacgtgggaaagcagcggagttttattctaggggaaggaaacaaaggcggccgagtgccagctgcacgtttggtgggatttggtcatcaggggtggacatgctgcccaatggagctgtcggcagtttgacccagcttggtccgtcgcgtcctgttctaggaatcgattattcaaagaaggaatttagagggactgcagaaaatgttacaggtcttaacaccattttgcatttccgcaaacgaacaagaagttaatccctgtgttagtgatttctaagcccatttgccttgtggcccaagaacgttgagtttgaaatttgatgaaacttgccttaaggctcaagtacgaggccagctttcaaaaatggttttgtgccttgattgaaaacactgtatcttctagttgttggatttatcgtactctgcggctctattggttcaagcttgtgcgttgggccttttaaaatgtgtgtttcctgataattcccttcagcttgtcaactgggggtgatgtggcagggagaaagagagagaggagagagagagactgtactggcaggttttccttgtgctattcaatttttgcttcctatgttttgaagttttattattaactgcaggtttcattactgaatagatatagccaaattccttcccccaaaagattataaagtttcctagtcctaccagcaaaatcattaagttcattaaggcaaatcccctccagcgctggatgttgatgctgtctttaattttgtatttttctgactactttgtgcaattgaggattgttttggtctattggccatttggcttttctcttttgcaaatgttcatatcctttgtccagttttctttagggtgatttttccttttcgtatcaatttgtaaacagtgtacaaattacattgtacattagggatattaacagtctgtcagttacactgtacattagggatattacattagagatattaacatctttgtccattaaggatattaaccatctgtcagttacattgcagtatttttccctaaactctttttgtcttttgcattttatgtttttttaaatgtgcaattagaaaaattttatatgggctgggcacagtaatcccagcacccatctctactaaaaataaaaaaaaaaatagccaggcgtggtatctcaactaaaaaaaaaaaaaaaaattggccgggcatggtgttgggcgcttgtaatcccagttactcgggaggttgaggcaggagaatcgcttgaacttgggaagtggagattgcagtgagctgagctcgggccactgcactccagcctgggtgatagagcaagacttcatctcaaaaaaaaaaaagaaagaaaaattgtatgtgtaatatgtaactagtgaaatgtagcctctgatcagatatgtctaaactttctttta

SEQ ID NO: 40631 - DNA, 690 bp, Homo sapiens
gccgccgcactgctctgtgggacgcggcgacccctctcccgcggcggccgggaccccgcgcccaccgcgtctggagcccacctggcggccccactggctacatttccgacctggaccccggccggctgcgggaaacactcggcgtctcggctgtcaccgaacctgtgcagttgccgcggggggagtcgtgcgtgtcagatttaggccaggaagcggaagtcgccagcagcgagagtttaacctctgtgggcgcagagggttgcggggattcagcgcccgggaccgtggatctgtgcagggagtcataggtgtgtgtgacatcagtggtggaacattttggctcgttttcacaattcagtcattatcctttctgctttcctcctggaagcattaaggttgaagttttcttctaaagatcaaagttttgatttgttatattagttcggatttgtttgatttttgtttgtgttcggtttcaagtgctgatttgtaacttttctccccccccccacacacgccttttgacccctgaattatttaaaagtccattgttggagtggcaaacatcctccgagactcaaagggcaaggccatgggcgctttattccggctgctgctccagacgcgtatgaaaacagcgtagctgtgcttcattttacgtcaggaaacacctactgagcatgagcacgg

SEQ ID NO: 40632 - DNA, 556 bp, Homo sapiens
atgaatctgtccatctatccctaattgatctggactcacatatcttttttttctagtagtttagaatgcattaatacatttaattattttgattcacaaattgtcccagctttgatcagtaggagcccttttaagctggattctgtgtccttgtaacttcctctcatcctattttcttttttttttaatttcagcacttgttatttttaggcataacaagatgttcagtgctcatcttgaatttattctgctcctgccctgaaatctaccatttcttcaaggaaccctagttgctttttgtggataatggtgttaaagactatgctgcttctcagtttattgtattttagctccacatccatccttcattgctttgtcagatctccttttccagctggtatggatgagcttagtcagtagaaggtgttggaaggacactgtaggaagtagggttttgggtgtgcttccgttcctatttgctctgtgctgccagtggcatgtgtgggatgcctagtggtactcatcccctaggaaattttgttgtcagttactgcct

SEQ ID NO: 40633 - DNA, 985 bp, Homo sapiens
  misc_feature (2)..(3): n is a, c, g, or t
gnngcgacgccgcggtccgccggatctccagcgctcagtccgcgccgcaggtggtgcttgtctgcagagtcatgacctctttccgcttggccctcatccagcttcagatttcttccatcaaatcagataacgtcactcgcgcttgtagcttcatccgggaggcagcaacgcaaggagccaaaatagtttctttgccggaatgctttaattctccatatggagcgaaatattttcctgaatatgcagagaaaattcctggtgaatccacacagaagctttctgaagtagcaaaggaatgcagcatatatctcattggaggctctatccctgaagaggatgctgggaaattatataacacctgtgctgtgtttgggcctgatggaactttactagcaaagtatagaaagatccatctgtttgacattgatgttcctggaaaaattacatttcaagaatctaaaacattgagtccgggtgatagtttctccacatttgatactccttactgcagagtgggtctgggcatctgctacgacatgcggtttgcagagcttgcacaaatctacgcacagagaggctgccagctgttggtatatccaggagcttttaatctgaccactggaccagcccattgggagttacttcagcgaagccgggctgttgataatcaggtgtatgtggccacagcctctcctgcccgggatgacaaagcctcctatgttgcctggggacacagcaccgtggtgaacccttggggggaggttctagccaaagctggcacagaagaagcaatcgtgtattcagacatagacctgaagaagctggctgaaatacgccagcaaatccccgtttttagacagaagcgatcagacctctatgctgtggagatgaaaaagccctaaagtttatgtttctaatgtgtcacagaataggacgatatgattctacaacataatcaactccctattaaattctttaatgaaga

SEQ ID NO: 40634 - DNA, 891 bp, Homo sapiens
  misc_feature (2)..(3): n is a, c, g, or t
gnngcgacgccgcggtccgccggatctccagcgctcagtccgcgccgcaggtggtgcttgtctgcagagtcatgacctctttccgcttggccctcatccagcttcagatttcttccatcaaatcagataacgtcactcgcgcttgtagcttcatccgggaggcagcaacgcaaggagccaaaatagtttctttgccggaatgctttaattctccatatggagcgaaatattttcctgaatatgcagagaaaattcctggtgaatccacacagaagctttctgaagtagcaaaggaatgcagcatatatctcattggaggctctatccctgaagaggatgctgggaaattatataacacctgtgctgtgtttgggcctgatggaactttactagcaaagtatagaaagcttactgcagagtgggtctgggcatctgctacgacatgcggtttgcagagcttgcacaaatctacgcacagagaggctgccagctgttggtatatccaggagcttttaatctgaccactggaccagcccattgggagttacttcagcgaagccgggctgttgataatcaggtgtatgtggccacagcctctcctgcccgggatgacaaagcctcctatgttgcctggggacacagcaccgtggtgaacccttggggggaggttctagccaaagctggcacagaagaagcaatcgtgtattcagacatagacctgaagaagctggctgaaatacgccagcaaatccccgtttttagacagaagcgatcagacctctatgctgtggagatgaaaaagccctaaagtttatgtttctaatgtgtcacagaataggacgatatgattctacaacataatcaactccctattaaattctttaatgaaga

SEQ ID NO: 40635 - DNA, 421 bp, Homo sapiens
ggcgcggccgcgcgctgcagctcgagttcgggccgcgggggaggctttggagcggcgccggcggtggctcggccggctcagcccctccgccccgcgtccccgccgtgcgcggccttccctgaggcgggcgtccgcgtgggttccgcattgtttggccggtctgtctctctcactcccggtatgctatgcttatgggctgtaggtctaggtctagaatgttctaagccatcctggtgagcctgtactcgtcgcaactggattcacacagagagatgaccgtttaaatcccacccgtgtgcgatccagagactatcactggtcgttactagtatcttaatatcctatcatcatacctattgtcacacgcgcatctctcagtcatctgccaagctctacatctagcggtccaacttccttcgtc

SEQ ID NO: 40636 - DNA, 1487 bp, Homo sapiens
  misc_feature (2)..(3): n is a, c, g, or t
gnngcgacgccgcggtccgccggatctccagcgctcagtccgcgccgcaggtggtgcttgtctgcagagtcatgacctctttccgcttggccctcatccagcttcagatttcttccatcaaatcagataacgtcactcgcgcttgtagcttcatccgggaggcagcaacgcaaggagccaaaatagtttctttgccggaatgctttaattctccatatggagcgaaatattttcctgaatatgcagagaaaattcctggtgaatccacacagaagctttctgaagtagcaaaggaatgcagcatatatctcattggaggctctatccctgaagaggatgctgggaaattatataacacctgtgctgtgtttgggcctgatggaactttactagcaaagtatagaaagatccatctgtttgacattgatgttcctggaaaaattacatttcaagaatctaaaacattgagtccgggtgatagtttctccacatttgatactctatgtaccagataagtttgcctctttagcaatctcagtagaagacaatcaggtatttatttcttttttgtctctctccgatttcttcacataacctaactgaaagaccataagtgagaaaggcagagaatcatcacagatctggaaagttcgggcttatttgagaactaaggatttgacacgattttgccctttgatttgattgtagcttcctgttacggcttccagagtatacctattaggctacagttgagtacctcccatctagataataagcattcaattagaatgaatttctcatctttactccgctgatgtaaatgatgtctttatgagatgaagtccaagtaggaatgagcttgtaaattatctctgtcctcaggtcctgtgttaatttatccctgtcagtgttttgtgatcattatgtcatggaggatttcccctgccacaccatgctgtagggagttaacttttcatttgtgcattttctgtttggaaacagccttactgcagagtgggtctgggcatctgctacgacatgcggtttgcagagcttgcacaaatctacgcacagagaggctgccagctgttggtatatccaggagcttttaatctgaccactggaccagcccattgggagttacttcagcgaagccgggctgttgataatcaggtgtatgtggccacagcctctcctgcccgggatgacaaagcctcctatgttgcctggggacacagcaccgtggtgaacccttggggggaggttctagccaaagctggcacagaagaagcaatcgtgtattcagacatagacctgaagaagctggctgaaatacgccagcaaatccccgtttttagacagaagcgatcagacctctatgctgtggagatgaaaaagccctaaagtttatgtttctaatgtgtcacagaataggacgatatgattctacaacataatcaactccctattaaattctttaatgaaga

SEQ ID NO: 40637 - DNA, 1717 bp, Homo sapiens
ggcgcggccgcgcgctgcagctcgagttcgggccgcgggggaggctttggagcggcgccggcggtggctcggccggctcagcccctccgccccgcgtccccgccgtgcgcggccttccctgaggcgggcgtccgcgtgggtccgggatcgcgtggccgggcggccgggcgcactcccgggattccaggcttccggggtggcgggcgaggcccagaaagcaccaggccacccggccgcgccggcacccgccgcgtcctgcttgacagaggctgatggacgtgtatttctccacggtgtgggccgcggtgctttccgcttggccctcatccagcttcagatttcttccatcaaatcagataacgtcactcgcgcttgtagcttcatccgggaggcagcaacgcaaggagccaaaatagtttctttgccggaatgctttaattctccatatggagcgaaatattttcctgaatatgcagagaaaattcctggtgaatccacacagaagctttctgaagtagcaaaggaatgcagcatatatctcattggaggctctatccctgaagaggatgctgggaaattatataacacctgtgctgtgtttgggcctgatggaactttactagcaaagtatagaaagatccatctgtttgacattgatgttcctggaaaaattacatttcaagaatctaaaacattgagtccgggtgatagtttctccacatttgatactctatgtaccagataagtttgcctctttagcaatctcagtagaagacaatcaggtatttatttcttttttgtctctctccgatttcttcacataacctaactgaaagaccataagtgagaaaggcagagaatcatcacagatctggaaagttcgggcttatttgagaactaaggatttgacacgattttgccctttgatttgattgtagcttcctgttacggcttccagagtatacctattaggctacagttgagtacctcccatctagataataagcattcaattagaatgaatttctcatctttactccgctgatgtaaatgatgtctttatgagatgaagtccaagtaggaatgagcttgtaaattatctctgtcctcaggtcctgtgttaatttatccctgtcagtgttttgtgatcattatgtcatggaggatttcccctgccacaccatgctgtagggagttaacttttcatttgtgcattttctgtttggaaacagccttactgcagagtgggtctgggcatctgctacgacatgcggtttgcagagcttgcacaaatctacgcacagagaggctgccagctgttggtatatccaggagcttttaatctgaccactggaccagcccattgggagttacttcagcgaagccgggctgttgataatcaggtgtatgtggccacagcctctcctgcccgggatgacaaagcctcctatgttgcctggggacacagcaccgtggtgaacccttggggggaggttctagccaaagctggcacagaagaagcaatcgtgtattcagacatagacctgaagaagctggctgaaatacgccagcaaatccccgtttttagacagaagcgatcagacctctatgctgtggagatgaaaaagccctaaagtttatgtttctaatgtgtcacagaataggacgatatgattctacaacataatcaactccctattaaattctttaatgaaga

SEQ ID NO: 40638 - DNA, 1475 bp, Homo sapiens
caggctgtacggcccgggatgtaggatcgcgccgcacgtggtgcttgtcttgcagagtcatgacctctttccgcttggccctcatccagcttcagatttcttccatcaaatcagataacgtcactcgcgcttgtagcttcatccgggaggcagcaacgcaaggagccaaaatagtttctttgccggaatgctttaattctccatatggagcgaaatattttcctgaatatgcagagaaaattcctggtgaatccacacagaagctttctgaagtagcaaaggaatgcagcatatatctcattggaggctctatccctgaagaggatgctgggaaattatataacacctgtgctgtgtttgggcctgatggaactttactagcaaagtatagaaagatccatctgtttgacattgatgttcctggaaaaattacatttcaagaatctaaaacattgagtccgggtgatagtttctccacatttgatactctatgtaccagataagtttgcctctttagcaatctcagtagaagacaatcaggtatttatttcttttttgtctctctccgatttcttcacataacctaactgaaagaccataagtgagaaaggcagagaatcatcacagatctggaaagttcgggcttatttgagaactaaggatttgacacgattttgccctttgatttgattgtagcttcctgttacggcttccagagtatacctattaggctacagttgagtacctcccatctagataataagcattcaattagaatgaatttctcatctttactccgctgatgtaaatgatgtctttatgagatgaagtccaagtaggaatgagcttgtaaattatctctgtcctcaggtcctgtgttaatttatccctgtcagtgttttgtgatcattatgtcatggaggatttcccctgccacaccatgctgtagggagttaacttttcatttgtgcattttctgtttggaaacagccttactgcagagtgggtctgggcatctgctacgacatgcggtttgcagagcttgcacaaatctacgcacagagaggctgccagctgttggtatatccaggagcttttaatctgaccactggaccagcccattgggagttacttcagcgaagccgggctgttgataatcaggtgtatgtggccacagcctctcctgcccgggatgacaaagcctcctatgttgcctggggacacagcaccgtggtgaacccttggggggaggttctagccaaagctggcacagaagaagcaatcgtgtattcagacatagacctgaagaagctggctgaaatacgccagcaaatccccgtttttagacagaagcgatcagacctctatgctgtggagatgaaaaagccctaaagtttatgtttctaatgtgtcacagaataggacgatatgattctacaacataatcaactccctattaaattctttaatgaaga

SEQ ID NO: 40639 - DNA, 2633 bp, Homo sapiens
  misc_feature (2)..(3): n is a, c, g, or t
gnngcgacgccgcggtccgccggatctccagcgctcagtccgcgccgcaggtggtgcttgtctgcagagtcatgacctctttccgcttggccctcatccagcttcagatttcttccatcaaatcagataacgtcactcgcgcttgtagcttcatccgggaggcagcaacgcaaggagccaaaatagtttctttgccggaatgctttaattctccatatggagcgaaatattttcctgaatatgcagagaaaattcctggtgaatccacacagaagctttctgaagtagcaaaggaatgcagcatatatctcattggaggctctatccctgaagaggatgctgggaaattatataacacctgtgctgtgtttgggcctgatggaactttactagcaaagtatagaaagatccatctgtttgacattgatgttcctggaaaaattacatttcaagaatctaaaacattgagtccgggtgatagtttctccacatttgatactccttactgcagagtgggtctgggcatctgctacgacatgcggtttgcagagcttgcacaaatctacgcacagagaggctgccagctgttggtatatccaggagcttttaatctgaccactggaccagcccattgggagttacttcagcgaagccgggctgttgataatcaggtgtatgtggccacagcctctcctgcccgggatgacaaagcctcctatgttgcctggggacacagcaccgtggtgaacccttggggggaggttctagccaaagctggcacagaagaagcaatcgtgtattcagacatagacctgaagaagctggctgaaatacgccagcaaatccccgtttttagacagaagcgatcagacctctatgctgtggagatgaaaaagccctaaagtttatgtttctaatgtgtcacagaataggacgatatgattctacaacataatcaactccctattaaattctttaatgaagattttttttttaattcggccttgtccttcctaggttctctattgagatgagaaagcctcattatgctgacattttccacgccacattaaatagttaaaaaggatgcagcctggagccagagagcagaaagctgggctggttctgaagcttcttccatacttaagttgcctccaagcagtttgtgaaagtatcagatcttggtatcctggtgattgattcacctaatataaatatatttgtgtcatgaacctcttatcccgttgctggagttgtaatctccatcatctagaaaacgtggtctggtgctattcttttccaagcagtaccttgaagttccatttttggttcatgagtagctatagaacgcaaggtgatacatctttggtgtttgccagagaagttggcagccccacccctcctaccagcctttgcactcttcaaatttaaaaaggagctacttatcaaccccaggcccttctggtcttagaggaaggactgggccaacaaagagcaccatgggagaatggcagtggtggcatttagtgaagacaatttagtatgaatgtctgcaaaagatttttttgatagcgttgagtgtctgaaagtcccattatttttcttttttctttttccccagtaacactttctagctccacggataaggaatcactgaacctagtagttcttagacagcttggtttgagaatccttttgcggttaaaaattagggactgagccaggcgcagtagcatgcgcctgtagtcctagccacattggaggctgaggtaggaggatcccttgagtccacaagtttgagttcagccagagaccctatctcactatatatatgtatctcaaagacttcaatgggtttttgcttacatgggccagtaattgttgaacaaccagctatttgagtttgagctatctgcatgacacctctaaacacagagttgggaatagatgtgcacaatcagctctggggagctggtgcaatcctgccctagcacaccactggtttaagatagatatatcatatagatatttaccatttaccatattggaaagtaaaatggagaaaaatttaaaacacaagatacatgagcacacattccattagctattaaggtgatggacacggtgtccaaatgacacggtgtcatttaacttctggaaaacaacactgtgtactgagaacaagagaaagacaaatgacttttttaaattaagtttttaatttacaattgatgcataattttactttaaaaaaataagtgtgcaatttggtaaactttgacatatacagctataaaccactccaatcaagataacatatttaccacccccaacagtttccatgtgctgtattataatccctctggctagtcctttgtcaatcactgataaattttattactatagattagcttgcattttctaaaattatataaaaatgaaatcatgccattagtgctttttctgtatgtcttctttcactcaaaatcacttggaactcaaaattacttctttcactcaaaatcactcaaaattacatactctgtatgtcttctttcactcaaaattacttctttcatttttagacggaagcatttagacctcaaaattacttggagattcatctggtatgt

SEQ ID NO: 40640 - DNA, 1443 bp, Homo sapiens
  misc_feature (2)..(3): n is a, c, g, or t
gnngcgacgccgcggtccgccggatctccagcgctcagtccgcgccgcaggtggtgcttgtctgcagagtcatgacctctttccgcttggccctcatccagcttcagatttcttccatcaaatcagataacgtcactcgcgcttgtagcttcatccgggaggcagcaacgcaaggagccaaaatagtttctttgccggaatgctttaattctccatatggagcgaaatattttcctgaatatgcagagaaaattcctggtgaatccacacagaagctttctgaagtagcaaaggaatgcagcatatatctcattggaggctctatccctgaagaggatgctgggaaattatataacacctgtgctgtgtttgggcctgatggaactttactagcaaagtatagaaagatccatctgtttgacattgatgttcctggaaaaattacatttcaagaatctatgtaccagataagtttgcctctttagcaatctcagtagaagacaatcaggtatttatttcttttttgtctctctccgatttcttcacataacctaactgaaagaccataagtgagaaaggcagagaatcatcacagatctggaaagttcgggcttatttgagaactaaggatttgacacgattttgccctttgatttgattgtagcttcctgttacggcttccagagtatacctattaggctacagttgagtacctcccatctagataataagcattcaattagaatgaatttctcatctttactccgctgatgtaaatgatgtctttatgagatgaagtccaagtaggaatgagcttgtaaattatctctgtcctcaggtcctgtgttaatttatccctgtcagtgttttgtgatcattatgtcatggaggatttcccctgccacaccatgctgtagggagttaacttttcatttgtgcattttctgtttggaaacagccttactgcagagtgggtctgggcatctgctacgacatgcggtttgcagagcttgcacaaatctacgcacagagaggctgccagctgttggtatatccaggagcttttaatctgaccactggaccagcccattgggagttacttcagcgaagccgggctgttgataatcaggtgtatgtggccacagcctctcctgcccgggatgacaaagcctcctatgttgcctggggacacagcaccgtggtgaacccttggggggaggttctagccaaagctggcacagaagaagcaatcgtgtattcagacatagacctgaagaagctggctgaaatacgccagcaaatccccgtttttagacagaagcgatcagacctctatgctgtggagatgaaaaagccctaaagtttatgtttctaatgtgtcacagaataggacgatatgattctacaacataatcaactccctattaaattctttaatgaaga

SEQ ID NO: 40641 - DNA, 1228 bp, Homo sapiens
  misc_feature (2)..(3): n is a, c, g, or t
gnngcgacgccgcggtccgccggatctccagcgctcagtccgcgccgcaggtggtgcttgtctgcagagtcatgacctctttccgcttggccctcatccagcttcagatttcttccatcaaatcagataacgtcactcgcgcttgtagcttcatccgggaggcagcaacgcaaggagccaaaatagtttctttgccggaatgctttaattctccatatggagcgaaatattttcctgaatatgcagagaaaattcctggtgaatccacacagaagctttctgaagtagcaaaggaatgcagcatatatctcattggaggctctatccctgaagaggatgctgggaaattatataacacctgtgctgtgtttgggcctgatggaactttactagcaaagtatagaaagatccatctgtttgacattgatgttcctggaaaaattacatttcaagaatctaaaacattgagtccgggtgatagtttctccacatttgatactccttactgcagagtgggtctgggcatctgctacgacatgcggtttgcagagcttgcacaaatctacgcacagagaggctgccagctgttggtatatccaggagcttttaatctgaccactggaccagcccattgggagttacttcagcgaagccgggctgttgataatcaggtgtatgtggccacagcctctcctgcccgggatgacaaagcctcctatgttgcctggggacacagcaccgtggtgaacccttggggggaggttctagccaaagctggcacagaagaagcaatcgtgtattcagacatagacctgaagaagctggctgaaatacgccagcaaatccccgtttttagacagaagcgatcagacctctatgctgtggagatgaaaaagccctaaagtttatgtttctaatgtgtcacagaataggacgatatgattctacaacataatcaactccctattaaattctttaatgaagaaaaaaaaacaaaaagcactcagactaagccaaaaaaaataagataaccatgaaaaacgacgaacaacaccaaagccaccagcagccgacccgaacaaacaggcccacggcccgccatagacacccccactccacgagaacaggcgcccaaaccaacccacaccaccccacacaccccagagggccgaaccaacacagccagcagcccgcccgacccacgcgcacaacgcccgcacgggccaca

SEQ ID NO: 40642 - DNA, 829 bp, Homo sapiens
acaatcgagctcgcaccccacgcagattttgccctttgatttgattgtagcttcctgttacggcttccagagtatacctattaggctacagttgagtacctcccatctagataataagcattcaattagaatgaatttctcatctttactccgctgatgtaaatgatgtctttatgagatgaagtccaagtaggaatgagcttgtaaattatctctgtcctcaggtcctgtgttaatttatccctgtcagtgttttgtgatcattatgtcatggaggatttcccctgccacaccatgctgtagggagttaacttttcatttgtgcattttctgtttggaaacagccttactgcagagtgggtctgggcatctgctacgacatgcggtttgcagagcttgcacaaatctacgcacagagaggctgccagctgttggtatatccaggagcttttaatctgaccactggaccagcccattgggagttacttcagcgaagccgggctgttgataatcaggtgtatgtggccacagcctctcctgcccgggatgacaaagcctcctatgttgcctggggacacagcaccgtggtgaacccttggggggaggttctagccaaagctggcacagaagaagcaatcgtgtattcagacatagacctgaagaagctggctgaaatacgccagcaaatccccgtttttagacagaagcgatcagacctctatgctgtggagatgaaaaagccctaaagtttatgtttctaatgtgtcacagaataggacgatatgattctacaacataatcaactccctattaaattctttaatgaaga

SEQ ID NO: 40643 - DNA, 816 bp, Homo sapiens
  misc_feature (2)..(3): n is a, c, g, or t
gnngcgacgccgcggtccgccggatctccagcgctcagtccgcgccgcaggtggtgcttgtctgcagagtcatgacctctttccgcttggccctcatccagcttcagatttcttccatcaaatcagataacgtcactcgcgcttgtagcttcatccgggaggcagcaacgcaaggagccaaaatagtttctttgccggaatgctttaattctccatatggagcgaaatattttcctgaatatgcagagaaaattcctggtgaatccacacagaagctttctgaagtagcaaaggaatgcagcatatatctcattggaggctctatccctgaagaggatgctgggaaattatataacacctgtgctgtgtttgggcctgatggaactttactagcaaagtatagaaaggctgccagctgttggtatatccaggagcttttaatctgaccactggaccagcccattgggagttacttcagcgaagccgggctgttgataatcaggtgtatgtggccacagcctctcctgcccgggatgacaaagcctcctatgttgcctggggacacagcaccgtggtgaacccttggggggaggttctagccaaagctggcacagaagaagcaatcgtgtattcagacatagacctgaagaagctggctgaaatacgccagcaaatccccgtttttagacagaagcgatcagacctctatgctgtggagatgaaaaagccctaaagtttatgtttctaatgtgtcacagaataggacgatatgattctacaacataatcaactccctattaaattctttaatgaaga

SEQ ID NO: 40644 - DNA, 2637 bp, Homo sapiens
  misc_feature (2)..(3): n is a, c, g, or t
gnngcgacgccgcggtccgccggatctccagcgctcagtccgcgccgcaggtggtgcttgtctgcagagtcatgacctctttccgcttggccctcatccagcttcagatttcttccatcaaatcagataacgtcactcgcgcttgtagcttcatccgggaggcagcaacgcaaggagccaaaatagtttctttgccggaatgctttaattctccatatggagcgaaatattttcctgaatatgcagagaaaattcctggtgaatccacacagaagctttctgaagtagcaaaggaatgcagcatatatctcattggaggctctatccctgaagaggatgctgggaaattatataacacctgtgctgtgtttgggcctgatggaactttactagcaaagtatagaaagatccatctgtttgacattgatgttcctggaaaaattacatttcaagaatctaaaacattgagtccgggtgatagtttctccacatttgatactccttactgcagagtgggtctgggcatctgctacgacatgcggtttgcagagcttgcacaaatctacgcacagagagctgcagaatgtaggtatatacaggagatataataaattgacaaaatgaaaaaaaaaaattgggaagtaaattaagagaagccgggctgttgataatcaggtgtatgtggccacagcctctcctgcccgggatgacaaagcctcctatgttgcctggggacacagcaccgtggtgaacccttggggggaggttctagccaaagctggcacagaagaagcaatcgtgtattcagacatagacctgaagaagctggctgaaatacgccagcaaatccccgtttttagacagaagcgatcagacctctatgctgtggagatgaaaaagccctaaagtttatgtttctaatgtgtcacagaataggacgatatgattctacaacataatcaactccctattaaattctttaatgaagattttttttttaattcggccttgtccttcctaggttctctattgagatgagaaagcctcattatgctgacattttccacgccacattaaatagttaaaaaggatgcagcctggagccagagagcagaaagctgggctggttctgaagcttcttccatacttaagttgcctccaagcagtttgtgaaagtatcagatcttggtatcctggtgattgattcacctaatataaatatatttgtgtcatgaacctcttatcccgttgctggagttgtaatctccatcatctagaaaacgtggtctggtgctattcttttccaagcagtaccttgaagttccatttttggttcatgagtagctatagaacgcaaggtgatacatctttggtgtttgccagagaagttggcagccccacccctcctaccagcctttgcactcttcaaatttaaaaaggagctacttatcaaccccaggcccttctggtcttagaggaaggactgggccaacaaagagcaccatgggagaatggcagtggtggcatttagtgaagacaatttagtatgaatgtctgcaaaagatttttttgatagcgttgagtgtctgaaagtcccattatttttcttttttctttttccccagtaacactttctagctccacggataaggaatcactgaacctagtagttcttagacagcttggtttgagaatccttttgcggttaaaaattagggactgagccaggcgcagtagcatgcgcctgtagtcctagccacattggaggctgaggtaggaggatcccttgagtccacaagtttgagttcagccagagaccctatctcactatatatatgtatctcaaagacttcaatgggtttttgcttacatgggccagtaattgttgaacaaccagctatttgagtttgagctatctgcatgacacctctaaacacagagttgggaatagatgtgcacaatcagctctggggagctggtgcaatcctgccctagcacaccactggtttaagatagatatatcatatagatatttaccatttaccatattggaaagtaaaatggagaaaaatttaaaacacaagatacatgagcacacattccattagctattaaggtgatggacacggtgtccaaatgacacggtgtcatttaacttctggaaaacaacactgtgtactgagaacaagagaaagacaaatgacttttttaaattaagtttttaatttacaattgatgcataattttactttaaaaaaataagtgtgcaatttggtaaactttgacatatacagctataaaccactccaatcaagataacatatttaccacccccaacagtttccatgtgctgtattataatccctctggctagtcctttgtcaatcactgataaattttattactatagattagcttgcattttctaaaattatataaaaatgaaatcatgccattagtgctttttctgtatgtcttctttcactcaaaatcacttggaactcaaaattacttctttcactcaaaatcactcaaaattacatactctgtatgtcttctttcactcaaaattacttctttcatttttagacggaagcatttagacctcaaaattacttggagattcatctggtatgt

SEQ ID NO: 40645 - DNA, 2620 bp, Homo sapiens
cgaggctgtcgccctggggtaagatgtcgcgccgagcgttgtgcctttatgctagtcgtgacctctatagattgtccacatcgcagctgctaatacttcacgcaatcagataacgtcactcgcgcttgtagcttcatccgggaggcagcaacgcaaggagccaaaatagtttctttgccggaatgctttaattctccatatggagcgaaatattttcctgaatatgcagagaaaattcctggtgaatccacacagaagctttctgaagtagcaaaggaatgcagcatatatctcattggaggctctatccctgaagaggatgctgggaaattatataacacctgtgctgtgtttgggcctgatggaactttactagcaaagtatagaaagatccatctgtttgacattgatgttcctggaaaaattacatttcaagaatctaaaacattgagtccgggtgatagtttctccacatttgatactccttactgcagagtgggtctgggcatctgctacgacatgcggtttgcagagcttgcacaaatctacgcacagagagctgcagaatgtaggtatatacaggagatataataaattgacaaaatgaaaaaaaaaaattgggaagtaaattaagagaagccgggctgttgataatcaggtgtatgtggccacagcctctcctgcccgggatgacaaagcctcctatgttgcctggggacacagcaccgtggtgaacccttggggggaggttctagccaaagctggcacagaagaagcaatcgtgtattcagacatagacctgaagaagctggctgaaatacgccagcaaatccccgtttttagacagaagcgatcagacctctatgctgtggagatgaaaaagccctaaagtttatgtttctaatgtgtcacagaataggacgatatgattctacaacataatcaactccctattaaattctttaatgaagattttttttttaattcggccttgtccttcctaggttctctattgagatgagaaagcctcattatgctgacattttccacgccacattaaatagttaaaaaggatgcagcctggagccagagagcagaaagctgggctggttctgaagcttcttccatacttaagttgcctccaagcagtttgtgaaagtatcagatcttggtatcctggtgattgattcacctaatataaatatatttgtgtcatgaacctcttatcccgttgctggagttgtaatctccatcatctagaaaacgtggtctggtgctattcttttccaagcagtaccttgaagttccatttttggttcatgagtagctatagaacgcaaggtgatacatctttggtgtttgccagagaagttggcagccccacccctcctaccagcctttgcactcttcaaatttaaaaaggagctacttatcaaccccaggcccttctggtcttagaggaaggactgggccaacaaagagcaccatgggagaatggcagtggtggcatttagtgaagacaatttagtatgaatgtctgcaaaagatttttttgatagcgttgagtgtctgaaagtcccattatttttcttttttctttttccccagtaacactttctagctccacggataaggaatcactgaacctagtagttcttagacagcttggtttgagaatccttttgcggttaaaaattagggactgagccaggcgcagtagcatgcgcctgtagtcctagccacattggaggctgaggtaggaggatcccttgagtccacaagtttgagttcagccagagaccctatctcactatatatatgtatctcaaagacttcaatgggtttttgcttacatgggccagtaattgttgaacaaccagctatttgagtttgagctatctgcatgacacctctaaacacagagttgggaatagatgtgcacaatcagctctggggagctggtgcaatcctgccctagcacaccactggtttaagatagatatatcatatagatatttaccatttaccatattggaaagtaaaatggagaaaaatttaaaacacaagatacatgagcacacattccattagctattaaggtgatggacacggtgtccaaatgacacggtgtcatttaacttctggaaaacaacactgtgtactgagaacaagagaaagacaaatgacttttttaaattaagtttttaatttacaattgatgcataattttactttaaaaaaataagtgtgcaatttggtaaactttgacatatacagctataaaccactccaatcaagataacatatttaccacccccaacagtttccatgtgctgtattataatccctctggctagtcctttgtcaatcactgataaattttattactatagattagcttgcattttctaaaattatataaaaatgaaatcatgccattagtgctttttctgtatgtcttctttcactcaaaatcacttggaactcaaaattacttctttcactcaaaatcactcaaaattacatactctgtatgtcttctttcactcaaaattacttctttcatttttagacggaagcatttagacctcaaaattacttggagattcatctggtatgt

SEQ ID NO: 40646 - DNA, 1736 bp, Homo sapiens
ggcgcggccgcgcgctgcagctcgagttcgggccgcgggggaggctttggagcggcgccggcggtggctcggccggctcagcccctccgccccgcgtccccgccgtgcgcggccttccctgaggcgggcgtccgcgtgggtccgggatcgcgtggccgggcggccgggcgcactcccgggattccaggcttccggggtggcgggcgaggcccagaaagcaccaggccacccggccgcgccggcacccgccgcgtcctgcttgacagaggctgatggacgtgtatttctccacggtgtgggccgcggtgctttccgcttggccctcatccagcttcagatttcttccatcaaatcagataacgtcactcgcgcttgtagcttcatccgggaggcagcaacgcaaggagccaaaatagtttctttgccggaatgctttaattctccatatggagcgaaatattttcctgaatatgcagagaaaattcctggtgaatccacacagaagctttctgaagtagcaaaggaatgcagcatatatctcattggaggtaacttcctacccacaaggctctatccctgaagaggatgctgggaaattatataacacctgtgctgtgtttgggcctgatggaactttactagcaaagtatagaaagatccatctgtttgacattgatgttcctggaaaaattacatttcaagaatctaaaacattgagtccgggtgatagtttctccacatttgatactctatgtaccagataagtttgcctctttagcaatctcagtagaagacaatcaggtatttatttcttttttgtctctctccgatttcttcacataacctaactgaaagaccataagtgagaaaggcagagaatcatcacagatctggaaagttcgggcttatttgagaactaaggatttgacacgattttgccctttgatttgattgtagcttcctgttacggcttccagagtatacctattaggctacagttgagtacctcccatctagataataagcattcaattagaatgaatttctcatctttactccgctgatgtaaatgatgtctttatgagatgaagtccaagtaggaatgagcttgtaaattatctctgtcctcaggtcctgtgttaatttatccctgtcagtgttttgtgatcattatgtcatggaggatttcccctgccacaccatgctgtagggagttaacttttcatttgtgcattttctgtttggaaacagccttactgcagagtgggtctgggcatctgctacgacatgcggtttgcagagcttgcacaaatctacgcacagagaggctgccagctgttggtatatccaggagcttttaatctgaccactggaccagcccattgggagttacttcagcgaagccgggctgttgataatcaggtgtatgtggccacagcctctcctgcccgggatgacaaagcctcctatgttgcctggggacacagcaccgtggtgaacccttggggggaggttctagccaaagctggcacagaagaagcaatcgtgtattcagacatagacctgaagaagctggctgaaatacgccagcaaatccccgtttttagacagaagcgatcagacctctatgctgtggagatgaaaaagccctaaagtttatgtttctaatgtgtcacagaataggacgatatgattctacaacataatcaactccctattaaattctttaatgaaga

SEQ ID NO: 40647 - DNA, 1506 bp, Homo sapiens
  misc_feature (2)..(3): n is a, c, g, or t
gnngcgacgccgcggtccgccggatctccagcgctcagtccgcgccgcaggtggtgcttgtctgcagagtcatgacctctttccgcttggccctcatccagcttcagatttcttccatcaaatcagataacgtcactcgcgcttgtagcttcatccgggaggcagcaacgcaaggagccaaaatagtttctttgccggaatgctttaattctccatatggagcgaaatattttcctgaatatgcagagaaaattcctggtgaatccacacagaagctttctgaagtagcaaaggaatgcagcatatatctcattggaggtaacttcctacccacaaggctctatccctgaagaggatgctgggaaattatataacacctgtgctgtgtttgggcctgatggaactttactagcaaagtatagaaagatccatctgtttgacattgatgttcctggaaaaattacatttcaagaatctaaaacattgagtccgggtgatagtttctccacatttgatactctatgtaccagataagtttgcctctttagcaatctcagtagaagacaatcaggtatttatttcttttttgtctctctccgatttcttcacataacctaactgaaagaccataagtgagaaaggcagagaatcatcacagatctggaaagttcgggcttatttgagaactaaggatttgacacgattttgccctttgatttgattgtagcttcctgttacggcttccagagtatacctattaggctacagttgagtacctcccatctagataataagcattcaattagaatgaatttctcatctttactccgctgatgtaaatgatgtctttatgagatgaagtccaagtaggaatgagcttgtaaattatctctgtcctcaggtcctgtgttaatttatccctgtcagtgttttgtgatcattatgtcatggaggatttcccctgccacaccatgctgtagggagttaacttttcatttgtgcattttctgtttggaaacagccttactgcagagtgggtctgggcatctgctacgacatgcggtttgcagagcttgcacaaatctacgcacagagaggctgccagctgttggtatatccaggagcttttaatctgaccactggaccagcccattgggagttacttcagcgaagccgggctgttgataatcaggtgtatgtggccacagcctctcctgcccgggatgacaaagcctcctatgttgcctggggacacagcaccgtggtgaacccttggggggaggttctagccaaagctggcacagaagaagcaatcgtgtattcagacatagacctgaagaagctggctgaaatacgccagcaaatccccgtttttagacagaagcgatcagacctctatgctgtggagatgaaaaagccctaaagtttatgtttctaatgtgtcacagaataggacgatatgattctacaacataatcaactccctattaaattctttaatgaaga

SEQ ID NO: 40648 - DNA, 1215 bp, Homo sapiens
ggcgcggccgcgcgctgcagctcgagttcgggccgcgggggaggctttggagcggcgccggcggtggctcggccggctcagcccctccgccccgcgtccccgccgtgcgcggccttccctgaggcgggcgtccgcgtgggtccgggatcgcgtggccgggcggccgggcgcactcccgggattccaggcttccggggtggcgggcgaggcccagaaagcaccaggccacccggccgcgccggcacccgccgcgtcctgcttgacagaggctgatggacgtgtatttctccacggtgtgggccgcggtgctttccgcttggccctcatccagcttcagatttcttccatcaaatcagataacgtcactcgcgcttgtagcttcatccgggaggcagcaacgcaaggagccaaaatagtttctttgccggaatgctttaattctccatatggagcgaaatattttcctgaatatgcagagaaaattcctggtgaatccacacagaagctttctgaagtagcaaaggaatgcagcatatatctcattggaggctctatccctgaagaggatgctgggaaattatataacacctgtgctgtgtttgggcctgatggaactttactagcaaagtatagaaagatccatctgtttgacattgatgttcctggaaaaattacatttcaagaatctaaaacattgagtccgggtgatagtttctccacatttgatactccttactgcagagtgggtctgggcatctgctacgacatgcggtttgcagagcttgcacaaatctacgcacagagaggctgccagctgttggtatatccaggagcttttaatctgaccactggaccagcccattgggagttacttcagcgaagccgggctgttgataatcaggtgtatgtggccacagcctctcctgcccgggatgacaaagcctcctatgttgcctggggacacagcaccgtggtgaacccttggggggaggttctagccaaagctggcacagaagaagcaatcgtgtattcagacatagacctgaagaagctggctgaaatacgccagcaaatccccgtttttagacagaagcgatcagacctctatgctgtggagatgaaaaagccctaaagtttatgtttctaatgtgtcacagaataggacgatatgattctacaacataatcaactccctattaaattctttaatgaaga

SEQ ID NO: 40649 - DNA, 1004 bp, Homo sapiens
  misc_feature (2)..(3): n is a, c, g, or t
gnngcgacgccgcggtccgccggatctccagcgctcagtccgcgccgcaggtggtgcttgtctgcagagtcatgacctctttccgcttggccctcatccagcttcagatttcttccatcaaatcagataacgtcactcgcgcttgtagcttcatccgggaggcagcaacgcaaggagccaaaatagtttctttgccggaatgctttaattctccatatggagcgaaatattttcctgaatatgcagagaaaattcctggtgaatccacacagaagctttctgaagtagcaaaggaatgcagcatatatctcattggaggtaacttcctacccacaaggctctatccctgaagaggatgctgggaaattatataacacctgtgctgtgtttgggcctgatggaactttactagcaaagtatagaaagatccatctgtttgacattgatgttcctggaaaaattacatttcaagaatctaaaacattgagtccgggtgatagtttctccacatttgatactccttactgcagagtgggtctgggcatctgctacgacatgcggtttgcagagcttgcacaaatctacgcacagagaggctgccagctgttggtatatccaggagcttttaatctgaccactggaccagcccattgggagttacttcagcgaagccgggctgttgataatcaggtgtatgtggccacagcctctcctgcccgggatgacaaagcctcctatgttgcctggggacacagcaccgtggtgaacccttggggggaggttctagccaaagctggcacagaagaagcaatcgtgtattcagacatagacctgaagaagctggctgaaatacgccagcaaatccccgtttttagacagaagcgatcagacctctatgctgtggagatgaaaaagccctaaagtttatgtttctaatgtgtcacagaataggacgatatgattctacaacataatcaactccctattaaattctttaatgaaga

SEQ ID NO: 40650 - DNA, 941 bp, Homo sapiens
  misc_feature (2)..(3): n is a, c, g, or t
gnngcgacgccgcggtccgccggatctccagcgctcagtccgcgccgcaggtggtgcttgtctgcagagtcatgacctctttccgcttggccctcatccagcttcagatttcttccatcaaatcagataacgtcactcgcgcttgtagcttcatccgggaggcagcaacgcaaggagccaaaatagtttctttgccggaatgctttaattctccatatggagcgaaatattttcctgaatatgcagagaaaattcctggtgaatccacacagaagctttctgaagtagcaaaggaatgcagcatatatctcattggaggctctatccctgaagaggatgctgggaaattatataacacctgtgctgtgtttgggcctgatggaactttactagcaaagtatagaaagatccatctgtttgacattgatgttcctggaaaaattacatttcaagaatccttactgcagagtgggtctgggcatctgctacgacatgcggtttgcagagcttgcacaaatctacgcacagagaggctgccagctgttggtatatccaggagcttttaatctgaccactggaccagcccattgggagttacttcagcgaagccgggctgttgataatcaggtgtatgtggccacagcctctcctgcccgggatgacaaagcctcctatgttgcctggggacacagcaccgtggtgaacccttggggggaggttctagccaaagctggcacagaagaagcaatcgtgtattcagacatagacctgaagaagctggctgaaatacgccagcaaatccccgtttttagacagaagcgatcagacctctatgctgtggagatgaaaaagccctaaagtttatgtttctaatgtgtcacagaataggacgatatgattctacaacataatcaactccctattaaattctttaatgaaga

SEQ ID NO: 40651 - DNA, 824 bp, Homo sapiens
  misc_feature (2)..(3): n is a, c, g, or t
gnngcgacgccgcggtccgccggatctccagcgctcagtccgcgccgcaggtggtgcttgtctgcagagtcatgacctctttccgcttggccctcatccagcttcagatttcttccatcaaatcagataacgtcactcgcgcttgtagcttcatccgggaggcagcaacgcaaggagccaaaatagtttctttgccggaatgctttaattctccatatggagcgaaatattttcctgaatatgcagagaaaattcctggtgaatccacacagaagctttctgaagtagcaaaggaatgcagcatatatctcattggaggctctatccctgaagaggatgctgggaaattatataacacctgtgctgtgtttgggcctgatggaactttactagcaaagtatagaaaggctgccagctgttggtatatccaggagcttttaatctgaccactggaccagcccattgggagttacttcagcgaagccgggctgttgataatcaggtgtatgtggccacagcctctcctgcccgggatgacaaagcctcctatgttgcctggggacacagcaccgtggtgaacccttggggggaggttctagccaaagctggcacagaagaagcaatcgtgtattcagacatagaacaccgaaagagtggttggaaagaaccaaacaaaattcttgggaaaaaaaaaaagagcccattatgtcgtagtatggagagaaaaaaccaaagccctaaagtttatgtttctaatgtgtcacagaataggacgatatgattctacaacataatcaactccctattaaattctttaatgaaga

SEQ ID NO: 40652 - DNA, 529 bp, Homo sapiens
tatgagataagtccctaccaagtaggaccaggttcaaatgtttttgaattaatgaacaatctatataggtaaatatcatcccatttacagatatggaaactgaggttcatgggattaaataatgtgtttcaaaggggaagtagttatttttaatttcaaaatcagtttttaagtattcatggtaacagtagcttcctttcccccactgtattgttagaatgaaacaaaaaaaattttttggagacagggttttacccaggctagagttcaatggcataatcgtaggtcactgttgactccaactcctgggctcaagctatcctcttgcctcagcctccaagtaactaggactacaggtatgtgccaagatgcctagctattttttttttcctatagcgatgggatctcactgtgttgcctaggctggtcttgaactccaggcctcaagtgatcctccctcagcctgtcaaagtgctgggattacaggtgtgggccattgtgcctgacactgaaatgaaaaagttaacca

SEQ ID NO: 40653 - DNA, 346 bp, Homo sapiens
ggactccagatttcatcagagccccagtgatgtcctttgactgtcacacatgttgaggctgtttgcaactgactgctctactgagataccccggacacagctggaggctgaagcatttcctcccagtcacagcagctcggagcctccctgagaattccctagttatatctgcctgtgtagtcacttgtgcactgatccatcctgggtttgacaaagcaattccaaaatgatgtcccgagttcacaccatacatggtttctgccagagacagtttacagatcttcagactgaagaaggccgtactatttagtacccacaaagacattaatcctctttctgtattagc

SEQ ID NO: 40654 - DNA, 297 bp, Homo sapiens
aactcagttttattcctgtgcctacgcaaccacattattggatgcctagaaaatgttcaaacttctaaccaagtcactggtaaccctctgtgattttggcttaatcaggtttattcatcagttttgcccatatttcacttgagctctagtctcattaccttaattacagcttcctgtatgtctataggcttttgcttctatagacccaatttatatggtatcaactctatatgaagccgtttttgaatctcctagtaatgctttaattttcctaaaattcctgttatatcaaatcag

SEQ ID NO: 40655 - DNA, 904 bp, Homo sapiens
caataagtcactccggttctggcatttccctatcttatcctgcatacccctcctcctggctctgagtcctgaggagtgagattgcagtttttgacccatgttcttactgagaagtgggctgtcatgcaggtataatataaaatccagaagctgctgtcagaattatgtgagaattgggaggtgacagcatgggccaattttctgaatctctagggtgctttgatgcttaagaagtctttctgggctccctgagatttgaaacctcttgttttatctgtcctttcactctggttcttcctttcctttcttggggacttcatgcttctcaaatatttgttaagtgggtgcttatatgggaccttagaaagcaaccagctaggcatgcacttggaaagggacaggaggactgagaacaagactaaacatttctgtgagattgagcagcaggagagctttgcttctttactggtgtcagtatgtgcctgcagctcctgggctgcctttactcgagtgagatccatttacaagactcctgactcttctactccactttattacaaaagatgttgatgctcgttttaaaaacaatttaaactacaaacatgaataaaggtatttatctccccaccagtccccctcattctcccttccctcctgttcttagactggtttcccctcccagtagtttaggttgtggggcaagtgtgtgtagctctgcatcagtgtcttaaacaaaatgagtgtgtcgcggatgcgcagctcggccacttcctgttttcttcggctgtatgtcacggccatcctgccatggcaccatgtctgtgccacctgctgctcttgggcatctgcagagaattccatgacatggatcttgaggtagtcttcttcagctttttctacttca

SEQ ID NO: 40656 - DNA, 316 bp, Homo sapiens
gaaaggcagttttgtcctctccttgttagctcacttggctgcgttgggtctcaaataataacgctttcatatccgtgcaaatgccctcatcccaggcagtttagcctacttttcatcatcaaccagtgggagtcttgtgggccaatcctgtctgaattcaaagcagaagggtgaagtctcccttcccctaacagcctctcgcagctctcaacttcatcagtaacagcttgaaggagtgtagctggacagatagaaaacggaagcaatgattcctaggtgggagactcatagaccagaagggacaggctaggaaaga

SEQ ID NO: 40657 - DNA, 335 bp, Homo sapiens
tggaatgttcacactcactttttccacctaacaaatttcccaagagctttcagctgagcaggcttagccccagagagacctagactcatatcttagctctgctacttagtagcttatcacctcaaggtctcatttgtaaaatggacatcaaaagaaggcttactaggattgttaaaaaaaaaaaaaagttgactgagataattcatatatacttgcctatgtacagctcagctgctatctgtgtctagggtctgccaccatgaatattaactattatttttacagtagatattcttttatctgatataaaatggcctggtagtaggtaggctaat

SEQ ID NO: 40658 - DNA, 454 bp, Homo sapiens
tcatttgcaacaacggatggatctggaggacagtgtgttaactaaaataagccaggcatagaaagcaaatactgtatgatctcattcatctgtggaatcttaaaaagctgaactcatacgtagagtatagagtggtagttaccagggccaggggccggggtgggggatgctggtgaaaggatgcacagcctgagctggcaggagggtgaggtcgggagcttggctatgcatgacggtgaccacagttgacaacaatgtattgcattcttaaaaaatactaagagagtggattttaagcattctcgccacaaaagatgacaagtatgtgaagtaatgcgtgttaaattagctcgacgttgctgttccacgatgtatacatattttaaagcatcatgttgtacacaataaatatatacggcttcatttgtcaattaaaacatgaattaaaaaagaa

SEQ ID NO: 40659 - DNA, 342 bp, Homo sapiens
cagcaaattactcagagataatatcataaagcccccacatttgtctggaagataatgcccagagccccctcactcatcactttgtggtgaatttaaagcctctgcacctggaacagtttgttttcctgtaaccatctgtctttttaagttttttgtctgttttttcttctgtaagtttattgcagctggaatcccccctcccctctctaaaccaatgtataaaagaaaatctagcccattctttagggccgagagtatttcctgtgttagccgtctctcagtcaccagctaataaaggactcctgaattcgtctcaaagtgtggcatttctctgtaactcgt

SEQ ID NO: 40660 - DNA, 371 bp, Homo sapiens
ccttcggaggtttcccatctctgagtaaaagccatgttcttttcagcggtcatttgcagcctaatctattctggtccctgccgaagctcttgggcctcctctgctgatttcctcttctcttgttaaattgaagtcacactggcttccttgttattctttaaagcagccagctggtccaactcctcttactcagcttggaagacactttcccagatattgttatgattcactcccttgccacctccaggaatttgcttaaatgccacctcaatgaggccgccttttacaaccctatttaaaattgtaccttcctcaagtatctggtacccatttcttgcctttatttttctctgtagcacttaccatctagc

SEQ ID NO: 40661 - DNA, 401 bp, Homo sapiens
aaactcttattttaagtaaaagttccatcaggtttttacaaaaatagattttaccctagtgctcaagtcaagggggcaatggcctgcgggtttaggatttaggatgaggtgagcaggaagcatgcgtggaagccagctcatgcccctcatgcatattcacgaagggcctgcttctgtgaaacagaaccccgactggagtgcctctggatgcccatgctcagctcaggctgggtgaagctccgcctcagccaggagctccaaggagtggcaggtgggtcgggggagagagaaggaggcagagctgggtcctacaacgttcagttgtccctctgtgtgacctatgctgagggttgccagtttgcaaagcaacagtgacctatgctgaggcttgccagtttgga

SEQ ID NO: 40662 - DNA, 228 bp, Homo sapiens
cgcacgcgcacacgcacgcacacatgaacaagcacgcacatgcacgcacgcacacatgaacacgcacgcgcgtgcctcaaggccagctgcgcagtgtccacgtggagcctcctgagggcaggaccgtgccccctggctccctcgtgctgccgggccggccgcagggccgcagcggacaccgatgagggaaggacagccccgcagagagcggaagtagcgggcgcggac

SEQ ID NO: 40663 - DNA, 274 bp, Homo sapiens
ggtaagaactttggtatgaatatcacagtttctccttgtttctttggagactgcatcagatgccaactaggaactgaatgtaccaggaacacagctatccttttacccacttcacccccgcccccttagaaggaagaggaataatagtaacaatcacaattgtagcaacaaccgtgaacatttactgagaatttgttatatgccagatattctaggcgacctcacctatgactgtttctcaaattttcatagtttacaaaaagtgattactttt

SEQ ID NO: 40664 - DNA, 376 bp, Homo sapiens
catattgcaaatatgcattatgtgactcttgttgaaatagaggttcaatcaatctaatgatcttccactgtgctttctgacttgatccctaattctgaggcttattcatctgaaatattcctcactttttggggggcagaggtagaggatcatgtttttccttataaattgcctttagtaattgttcaacaaaacatttaaagacattggcactaagtagcacaaaagtgatatcactgcaactgataggaaggtatctaactagaaatcaacagtttgacggttatttttcccccaggatgtatactttaccacctcctcttataatcatagtaaaggtcgtatacctggaatttaactatttaaaaagcactat

SEQ ID NO: 40665 - DNA, 391 bp, Homo sapiens
tttcagctaacagacagcagcaaaggccatcgcctccttctgacggaatcagaaggtggaaccaggccagtgtagggtgggaccagaactgatgtctggacacacgacccgtagactgtccctgccattggagagctggggaccgcgccacaggaggctgcgtggttatcgcctgtgagccacgaagaccttcatttcctcatctgtgtttactttgtgtctcctctgaatgtgatcctatgttctgggtggtggttgtttcccgaaatggctgcatttcaaatatgctgttcttttcccatcaatagtttcttgccagctgggtgcagtggctcacgcctgtaatcccagcactttgggaggccgaggcaggtggatcatgaggtcaaga

SEQ ID NO: 40666 - DNA, 330 bp, Homo sapiens
atactaaaaagtaaatctgacaagagatatgcaagacatgtgcactggaaactataaaacattgctgaaagaaattaaagaagactcgggaggccgagatgggtggatcgcctgaggtcgggagctcaagaccagcctgaacaacatggagaaaccccgcctctattaaaaatacaaaattagtcggtcatggtggcacatgcctgtaatcccagctccgcgggaggctgaggcaggagaatcacttgaacccagcaggcggaggttgcggtgaaccaagattgcgccactgcactccagcctgggcaacaagagtgaaactccgtctca

SEQ ID NO: 40667 - DNA, 1021 bp, Homo sapiens
ccctcaaccatgagtgtagggaaagggaccaggggccccaggctttcctgtcagtaatgcagaagttcctcagatttagggaagggggagcagaggcataactttgattctgacaaagaggcattcagagagactgaaaggtcatttaacaaacactggaatgcttccacatactaggtgctaggagatacaaaaccatataggtcctggaagggaggattgattttttcattttggtacgtagtagatattaggggcttaggaaatacacatcgaaatgaagagtgcatttgccatgttgaaccgttagccggtatcttatttccccattttaaaagttttagaatctgtggttgaggacttgtggccatcagttttccatagccaacagactgttcactactgccttcagagctccttggacctcagcgggccttctttggagatggcagagatggatttagatgtatactctactcgagccacccagagagcccacaaagtcagagatggaacagggtaaaggagtaagggtcatatgtgtgagatgccttgatttggaactttgagatttaggatgaggtggggaagggctaaagaggagcttgttcctgagccttgcttggccgaagcatttaggctcaagcgttttagaaagagtagcccttggtctgagaactcaaggaaacagctttctgatgagacgtgtagcaagcttctggttcacatccttacctgatagttcttcaaacactgcctggtctggttcacatccttacctgatagttattcaaacactgcctggaagcttctcctgagtttttgtctctaatcagctaactaacaggctgagtgagtttagttgtaagtcattaatgaagaaagcaaaggttggggccattgtcagggttgtgacctgggctagttaattacctggaactgatggtctgtgttacagagtggtggtatacttgtcaggcttagaaaagaaatcaggatgtgtatcaaaaatcatttgggg

SEQ ID NO: 40668 - DNA, 603 bp, Homo sapiens
  misc_feature (602)..(603): n is a, c, g, or t
gagaacatgttgttttccttgaagtacttgtttcttccgtaatttcatatctaatctcccagcttcacacataacagatttgcttgacaatgtcctaaaggatggggacagtcttggctttcacatgagaagagctaattagaacaactgattttactttgggagaaaccaagtttccagcatgcatctagtgataaattatgaaagctttcctcagtactcctgccctatgatccttccctcacttcattaagcctgctgcatcttgcatggatggaggtcacagatggcagagcagcttcttggatgaattgcagggtctcccaactcttcaagcagcatcctctgtgctcccactcctgtgctcatctctactcctgaactacagtgccatcttgtcatttgtctgtttcaatgtctgtttctccaactggacagtaaacccttggaaaagaagaaccaatcttatttaaatttggtatcctcagcaaccaggacagtgcctggtactttccaggtcctcattaaatgttttttggatggatggatgaatcaataaaagaaaaactccaaatgaaacagttgtggaaactaaaaaaaann

SEQ ID NO: 40669 - DNA, 395 bp, Homo sapiens
ccaataggatggatggatggattgatggatggatagacagagagagagggagaaagagagagagagagagagaggtgggaagagatttgttagggcgataggctcgtgtgattatggaggttgagaagtcccatgacaggctgtctatgagctggagaccctgggatgctggtagcttagtgcagtccaagttgaaagtccttggaactggggaagctgacagtggaactctcagtctgaggctgaagacccagagactggggggctgctggtgttaagtcctggagtccaaaggccaggtagcctggagttgttgtccgaggacaggagaggaagaatgcttgagcccaggaattcaagagcagcctgggcaacgttgtaagaccccatcttta

SEQ ID NO: 40670 - DNA, 1741 bp, Homo sapiens
gaacccgcctgtcagccagcctttcgagctaattagctcagcatacaacaaagataagtgagcctgggaagagggccccctgaggggtctttagattctgggaaatgtctgattggcagatgttaaaagggattccttggtaatccagtgcatcaatgagctgcagaaattcagcccaggactgcaagaattcaggcatgaggacactctgtacaggaggctcacacaggcagacccaagatggacagaaccttggaatctctgagacacatcattgcccaagtcttgcctcacagagatccggctctagtcttcaaagacttgaacgttgtgtcaatgttacaggaattttgggaaagcaagcagcagcagaaggctgcattcccaagtgaaggtgtggtggtctatgagtcactgccagctcctgggcctccctttgtgagttacgtgaccctcccagggggaagctgttttggcaactttcagtgctgcttaagtagagccgaggccaggcgggatgcagctaaagtggccctgatcaactccctcttcaatgagctgccctctcgcaggatcaccaaggaattcattatggaaagtgttcaggaagcagtagcctccaccagcggcaccttagatgatgcagatgaccccagcaccagtgttggggcctatcactacatgctggagtcaaacatggggaagactatgctggagtttcaggagctgatgaccattttccaactattgcactggaatggaagcctaaaagcccttcgtgaaacaaagtgttcccgacaggaagtcatctcctactattctcagtattctctagatgaaaagatgcgcagccacatggccctggactggatcatgaaggagcgggactcaccaggaattgtctctcaagagctacgaatggccctgaggcagttggaggaagccaggaaagcaggacaagaactacggttttataaagaaaagaaagaaatattgagcttagccctgactcagatctgcagtgaccctgacacttcctcacccagtgatgatcagctgagccttacggccctgtgtggctatcactagcaaggccaagccccgggtaccctcagtgatggcagaggccagattaacattaggaatctcagtgcagaggtcctcagaggctccagcatctctagtactacctgaaggctctcctaaccctctccacacattccatttacagagtatgagagtcgtaggacccttacaagacccaacaagccactcgatgcatttttctatcacattctcaatagttccagctcaggatgaaaggatagacacaaaattgtttgaaaaacattttccaggcctggctccaacctaaagcctgactgtcacgtgccttgcttgattttatatatattgtttcaagaatagtccaatatagcattccccaaatgaacagcagccagaattaggtgaagtagcatgatagcagtgtttaaaaatacttaggattaaataaataatatggattgttttaaaaaatatccaaggatcagagtctctttctaagctttgtaagctaagcaatagtttatgtcctactagatacactgcaaactacagtggggattttatctggacatcccaccatcaaagatcttgaaatagtaatagtatgaaaatactagataaaattaatgtttaaaatgtttttgtaacaataatttttaaaacccacactctt

SEQ ID NO: 40671 - DNA, 1534 bp, Homo sapiens
gaacccgcctgtcagccagcctttcgagctaattagctcagcatacaacaaagataagtgagcctgggaagagggccccctgaggggtctttagattctgggaaatgtctgattggcagatgttaaaagggattccttggtaatccagtgcatcaatgagctgcagaaattcagcccaggactgcaagaattcaggcatgaggacactctgtacaggaggctcacacaggcagacccaagatggacagaaccttggaatctctgagacacatcattgcccaagtcttgcctcacagagatccggctctagtcttcaaagacttgaacgttgtgtcaatgttacaggaattttgggaaagcaagcagcagcagaaggctgcattcccaagtgaaggtgtggtggtctatgagtcactgccagctcctgggcctccctttgtgagttacgtgaccctcccagggggaagctgttttggcaactttcagtgctgcttaagtagagccgaggccaggcgggatgcagctaaagtggccctgatcaactccctcttcaatgagctgccctctcgcaggatcaccaaggaattcattatggaaagtgttcaggaagcagtagcctccaccagcggcaccttagatgatgcagatgaccccagcaccagtgttggggcctatcactacatgctggagtcaaacatggggaagactatgctggagtttcaggagctgatgaccattttccaactattgcactggaatggaagcctaaaagcccttcgtgaaacaaagtgttcccgacaggaagtcatctcctactattctcagtattctctagatgaaaagatgcgcagccacatggccctggactggatcatgaaggagcgggactcaccaggaattgtctctcaagagctacgaatggccctgaggcagttggaggaagccaggaaagcaggacaagaactacggttttataaagaaaagaaagaaatattgagcttagccctgactcagatctgcagtgaccctgacacttcctcacccagtgatgatcagctgagccttacggccctgtgtggctatcactagcaaggccaagccccgggtaccctcagtgatggcagaggccagattaacattaggaatctcagtgcagaggtcctcagaggctccagcatctctagtactacctgaaggctctcctaaccctctccacacattccatttacagagtatgagagtcgtaggacccttacaagacccaacaagccactcgatgcatttttctatcacattctcaatagttccagctcaggatgaaaggatagacacaaaattgtttgaaaaacattttccaggcctggctccaacctaaagcctgactgtcacgtgccttgcttgattttatatatattgtttcaagaatagtccaatatagcattccccaaatgaacagcagccagaattaggtgaagtagcatgatagcagtgtttaaaaatacttaggattaaataaataatatggattgtttta

SEQ ID NO: 40672 - DNA, 323 bp, Homo sapiens
gacctcaggttatctgcctgcctcggcctcccacagtgctgggattacaggcctgagccaccatgcctgacccaaactttttcttatagttagttgatttctaaaacttaaaattgaagggagttagagataaatagtgttttttaataataccaaatagagtttttcaacacgtgtgaggcaaccaaatagaaaatatactgcctgatgtttctctttccacattgggagaggcagccgagagtggtagaaaggacctctctaacatcctcgcttattgactaaaaccataggaaatttacaggcatctctgggactcagtt

SEQ ID NO: 40673 - DNA, 154 bp, Homo sapiens
aagatttagagaattctggaggctctttgtcattgttgctacctgttttttgaaaaatcccatatcaaactccctggacttcttagggggtaatgtcacttatagtacctcagggcgagcttatggatgggcagctgccatattgaatctcggg

SEQ ID NO: 40674 - DNA, 1251 bp, Homo sapiens
gtcatggacaatatcctggagaaagtgctatgtaagctgagggataaaacaatgagtaatagtacctggccaggtgaaaagagaggaggagcatttcattccagaaagaacgttaagggaagtttaaagtaagaaggaatctagtgtcatcaataacttgaaaaaagacagttagtgtaactggagtataaaaacctcggggtggaatggtaggtctgatcatattgggccttgtaggggatgtcaggtgttgagatctttatcataacagcagtgaacaaacaaaagcattttgttttcattgtggcaagacatacgtaatgaaatttaccattttaatgatttttaagtgtacattcagtggcactaagtacattcacattgttgtgcaaccattgtaccatccatctccagaacattttcatcttcgcaaactgaaactctgtacccatgaaacagtaactccccattccctcctccctcctacccctgaaaaccactattctgtctctatgaattttactattctcaagtacaatcatatttatccttcatttgcattccaattgcaatgatttaaagaaatgtatttactataggatagcaatctttgatgactgcaacaaataatcaatggtatgtatgtgaaatttataataaaaaagatgtatggagtttataatgaaaatactggatggtgaagtgggtgatatagtggcattaacatttaacagttattagttacatggcttatatagaaaccaattatcaaagtgagaaatattgaaaagtaattcattaacaacatatagacaaagccttagcaggcacctatttggcatacaataaaagcatgtatcatgttattgttaaaaacaaaacagctctatatctatgtatcctcatcttcctgtctggtggtgtcaagtaatggtggaataatctatattgaggaatattgaggatgtctacagtttaggactagaatgtcctaaactagtctctaactagagactagtctctcagttaacagagctctaatagagtaagtcagttgtaaataatcttctataagaatgtacagttatttgtaactggaaaataattgacaattccatatcaacccaaattaatgctgaacaatattgcaaatgtcattttagttcatttatgcagtctaaatcataggttcttcttgactgcagattcagtttattaaatcctgatctatttgtaatttgctgaaatgac

SEQ ID NO: 40675 - DNA, 257 bp, Homo sapiens
caaacttccgaaatttggtggaagatacgcatctatacgtccaagaaactcaataaattcagggaggataatgtcaaagagatatacactgagacacattatagtataattgtcagaagtcaaagacagaatcttcaaagcagcaaaagataagtgactcatcacatacaagcactcctcaataagatttacaactgttttatcatcagaaactatggaagccagaaagctgtgggctaacaatatttaaagtgtcg

SEQ ID NO: 40676 - DNA, 547 bp, Homo sapiens
ataagaataagaataataaagtaggacagtccaaagtagactctaaggaaacaaggaccccgggaagttttgttgttgtgcttagttgatatatattttttgaatttttttggttattgttttattttggttattttttcctcctctcctggctatttatttgtttggtatgaatagatgttttaaataatatgaaccggaccttcaagagccttaaatagtttgtttcttggataatttattatgatcatgtgaactgtactcacgggggaaagattattttgtgaggccaagcaacctgctcagagtctatttttctacatgtccctcgtcccggctgtcagaaagcaaacctctgtccccgccatccctcccttccatctcctgcttctcagcaagtgcaaactcaaacgtgcttcatgggggtccacaaattatatttttatacacagaattgtaaattagattttttgagagatcaatacttaactgaattacatttcatttttgaaatagtgtaaaatatgaaaatatattattttaattt

SEQ ID NO: 40677 - DNA, 273 bp, Homo sapiens
taatagaatttaattacaaacatctccagtgagaaagaaagaaaaaaaaataaaagaaagcattgatcaaggggtcttcctagaacacgttttagctaattctggaaaagtttacattagttctggtaagattgggaatcatattaaaattaaatggccacctatacttttcgaactttcctaattttttatgtatgtggtagtccattatcagagagtgtttacaaatgcaaggtattcagtttatcagttataattatattttggaaactt

SEQ ID NO: 40678 - DNA, 400 bp, Homo sapiens
aggcatgagccaccgtgcccagccagcttctggctgtattttcgttttcatttttgtacgtttaaatattgaaggttaacatttaatttttatttttatttatttattttttttgagacgttgtctcactctgtcgccgaggctggagtgcagcggtgctcactgaggccttgaacccctaggctcaagagagctcccacctcaggctccgaaaatgctgggattacaggtggtgtgagataccacaccagacctagagtttttattttttaatttttaaaaaaatttttatttatttttttgagacggagtctcactcttttgctcaggctggagtgaagtggtgcaatctcggctcactgcaacctccgccccctgggttcaaacaattctcctgcct

SEQ ID NO: 40679 - DNA, 626 bp, Homo sapiens
agttgtggtatggtgacttctgtgtttatctgcaggggtgtgaatagctgtaatatccactgcacctgctgccttaacagtggagttggccaggcgcagtggctcacacctgtaatcccagcactttgggacaccaagttgggtgggtcatctgaggtcaggagtttgagaccagcctgaccaatatggtgaaaccccttctctactaaaaaaatacaaaattagccaggcatggtggtgcatgcctgtaactccagatacttgggatgctgaggcaggagaatcgcttgaatatgggaggcagagccaagatgacaccattgcactccagcctgggcaacaagagagaaggtccttctcaaaaaaaaaaaaaaaaaattcccaaaataccccaaataagctagttacctcttaggctttgtggtgcacagtgccctcctaatcatgactactgcaaaatccagtccattaaagtgtaaaatgaggccaggtgcagtggttcatgcctgtaatcccagcactttgggaggctgagttgggaggattgcttaaggccaggagtttgataccagcctgggcaacatagcaagaactccgtctctacaaaaaaataaaaagtgtaaaat

SEQ ID NO: 40680 - DNA, 435 bp, Homo sapiens
gagggatgactttctaagccacagttccttctgataacggtcttaaaagagaagcaccatgaagtgataaacacatcagtccaggaagatttagagacagcctagtagaggaggattggaaacagtgtggctgtgtccctgagggtgctggtgctaaacccacggcacagtccatatcagtcaaagcttcattctccttgtgcccacactatgctgatctgccccagtgcaacagggagacgcatatggtcaagagaatgtgtctttcacgaatagattttctccttcgaccatggtgagaagtccttgtaaagaagcatacatgaatatatggatgtgttgggcatcagctgtgcgtgtggccctcagccaggtgagtggaggaagttggaggcattcagtgttcacctccatgtgcttttcagagacatacct

SEQ ID NO: 40681 - DNA, 1043 bp, Homo sapiens
catctgtttaatagtcagtgtaagaacataggcagcatttctggtgcatactgatggaaaggcagttgtcctgtggaaaagccattatgtaattgcatgagttgtgagtgaagttaaacattttttttttagtgggtcatcattttccttgaaagaatgactgaaaggcacactgtgattattcagacttgggtatttggtagaaattttctcaaaaataaacaaaatgagcctatcccatcagagaaaataatattgacagtggaaattggaatttcaagagaaaattaaaattttggaaaacttacgtgtgccgcagcttctcactacttaaagatgtttctgatgagattggtggtgatattaacaaatatggtttaaaaaatattgtttaataaaatatgtcaacattttaaaaaactgcgtaaacccatgaatcaataatttacaaataatcaatgcatgatattgcaaagtcatgcatagaggaaaagatccatttaaagatagactagtgaattttaacacaacagaatatgaaaagttaatttataaggtttcagattccacactgcaactaacctttaagaatctgccatttcttgagttttggtgtcttatcaaggaagaacagttacaatagctgaaatggttattgaaactttccttcttttcccaactgtgtataagagtgaggccagattttcctcttgtactttagccaaaacaacatattgttacagcttgaatgtagaagaatatataaccaagctagctttattaagccagacattaaagagatttttacaaatgtaaaataattccttttttttcactatttttttgtgctggagaagacagctattttccataaaagtatgttgtttatgttaacatgtaatgggtttgttattgttatttaataacaaataaattaatataaatgtcactttacataacccatgtaaactaaagcttcttggtgttctcaacaattttacgaataaaaagggatcctgataccaaaagaattataagctact

SEQ ID NO: 40682 - DNA, 634 bp, Homo sapiens
cccaagctccgaatttggccaaacttttttttttttctcggaaaccgcgcctttgtgttggtaccgggaaatccggccattatggccgggaatcagtgttaatttaaatgatcttatcctggtggatgtgctattttcttaaaggagtatgaagcccttttcaaactatcatcccagtggagcggagtactcagtgaacagttactccatagtgcaatccatattaataggcttcttctcttaagtcttcatctcttcttttgcttaattactgaaccgtaaattacttcagagaaatttaaatgctggtatttgaactttatacatgatactttttgtagtttcttttaatttttgaaagatgaactgcttccttttaataaattaatatctatttatacttttctcttgatttgggtcaagatgtttgatcatgagtgctttgagtggtatgtggaataggagaatataaaaacaaatctgccaaatacactagaaagcattttagtaagaaatgctggccctttcttaaaacatttctcttgcatataccaggatgggagtaaaagatgccttaatatttagtttttgtattgttggagacattgattttaataaaatcctatttatctgc

SEQ ID NO: 40683 - DNA, 2622 bp, Homo sapiens
agcggagacgctgcacttcccaggccccaccagccgcggctccggctcgtagcccacagcccactgccggcggctgggcgctgccgaggctcggggcgcgcgcagttggcgtctgccagtgccaagactgtgccgcccccacagccgaggcgcgaaagggggacgcccggcctctgggccgctgccttcgctttctcttcgttgttgcgaacgccgtccgctcaggaggcgccccgcgaccggcgcgatgagtgccaacgaggaccaggagatggaactagaagcattacgctctatttatgaaggagatgaaagtttccgggaattaagtccagtttcttttcaatataggataggtgaaaatggtgatcccaaagccttcttaatagagatttcctggacagaaacatatccccaaacacctccaattctatctatgaacgctttttttaacaacaccatatcatcagctgtaaagcagagtatattagccaagctacaggaagcagtagaagctaatcttggaaccgctatgacctatacattgtttgaatatgccaaagacaataaagagcagttcatggagaatcacaatcccatcaattccgcaacatcgataagcaatatcatctcaattgaaactcctaatacagccccatcaagtaagaaaaaagacaaaaaagaacaactttcaaaagcccagaagcgtaagctggcagacaaaacagatcacaaaggagaacttcctcgaggctggaactgggttgatgttgtgaagcatttaagcaaaactggctctaaggatgatgagtagcacttggaatttgagacaaggaaagagcattctttaaagagtaaaactgggttcaaaatctttcattactattttctggtattgaggcgactttttataaaacacaattttttgtatgtttcttacattaaaaaggttgtaagttgaaagttcatgaagagatcttgttgtattaaattattttcacaaacttgccttaataaaaggtgaaaatgttactgtttagtatactttatgaagccccttgagctttataaatggacaggcatggggaataagaatcagtgttaatttaaatgatcttatcctggtggatgtgctattttcttaaaggagtatgaagcccttttcaaactatcatcccagtggagcggagtactcagtgaacagttactccatagtgcaatccatattaataggcttcttctcttaagtcttcatctcttcttttgcttaattactgaaccgtaaattacttcagagaaatttaaatgctggtatttgaactttatacatgatactttttgtagtttcttttaatttttgaaagatgaactgcttccttttaataaattaatatctatttatacttttctcttgatttgggtcaagatgtttgatcatgagtgctttgagtggtatgtggaataggagaatataaaaacaaatctgccaaatacactagaaagcattttagtaagaaatgctggccctttcttaaaacatttctcttgcatataccaggatgggagtaaaagatgccttaatatttagtttttgtattgttggagacattgattttaataaaatcctatttatctgctgttgtgtgcttttagttgttggataactgaggtctcctaaatggttcaacataaaaccacatttcaagtcttgtttctttttggagtgtcttttcaagtattcaaatgtatttctcaacctgagcatctttttaatcatatacatgggagtcttttaaatgctgaactgttacacatgcttgatttaaaaataataataatagaggaaactattggtctagttgtgccaagaaaagtttctgatgtttatgtgtgatgtacagtgattttgtatatgcgcccagctttaagaacacataaaactattacgtctggtaggaagattgttagtgcctcaagttacacctgtgcagcttgggtctgagttttgatagaacagtaaacatttaaagaagttaagagcagtttgagctgtatccgcggtttttactcgttaactgacttcagctaaatagtttgaattatagagtaagtataattacagcaaaggagttaatctcattttcaaagctgtttctcattttatttcttgaattaatgtagagcaaaacatgttaaaattcaggaccactggaatatggcaacttatgtttcagggttgtgtgtgggtagtatttgtggttgtattggtttgttttttgtttttggagaaacatctgctagtggaataaaatactttgttttgctctgaagagactgaaattgttcaggcttattatggctcatagattacagagaatgatgctagttacatgccaatgaactatttttactctttttatatgaaatgtaaaaatttgtaggggttctggtgatggtggtacctcttattaccttatgtaaaacacttgaacagcctcatcaatattgccgtcatctgtttaacactcccagtatattttctcaatgtctgtttacttaaaattttgtggagtgacataattaataagcaataaagtctgaattatacacaaaaaaaaaaaa

SEQ ID NO: 40684 - DNA, 1637 bp, Homo sapiens
agcggagacgctgcacttcccaggccccaccagccgcggctccggctcgtagcccacagcccactgccggcggctgggcgctgccgaggctcggggcgcgcgcagttggcgtctgccagtgccaagactgtgccgcccccacagccgaggcgcgaaagggggacgcccggcctctgggccgctgccttcgctttctcttcgttgttgcgaacgccgtccgctcaggaggcgccccgcgaccggcgcgatgagtgccaacgaggaccaggagatggaactagaagcattacgctctatttatgaaggagatgaaagtttccgggaattaagtccagtttcttttcaatataggataggtgaaaatggtgatcccaaagccttcttaatagagatttcctggacagaaacatatccccaaacacctccaattctatctatgaacgctttttttaacaacaccatatcatcagctgtaaagcagagtatattagccaagctacaggaagcagtagaagctaatcttggaaccgctatgacctatacattgtttgaatatgccaaagacaataaagagcagttcatggagaatcacaatcccatcaattccgcaacatcgataagcaatatcatctcaattgaaactcctaatacagccccatcaagtaagaaaaaagacaaaaaagaacaactttcaaaagcccagaagcgtaagctggcagacaaaacagatcacaaaggagaacttcctcgaggctggaactgggttgatgttgtgaagcatttaagcaaaactggctctaaggatgatgagtagcacttggaatttgagacaaggaaagagcattctttaaagagtaaaactgggttcaaaatctttcattactattttctggtattgaggcgactttttataaaacacaattttttgtatgtttcttacattaaaaaggttgtaagttgaaagttcatgaagagatcttgttgtattaaattattttcacaaacttgccttaataaaaggtgaaaatgttactgtttagtatactttatgaagccccttgagctttataaatggacaggcatggggaataagaatcagtgttaatttaaatgatcttatcctggtggatgtgctattttcttaaaggagtatgaagcccttttcaaactatcatcccagtggagcggagtactcagtgaacagttactccatagtgcaatccatattaataggcttcttctcttaagtcttcatctcttcttttgcttaattactgaaccgtaaattacttcagagaaatttaaatgctggtatttgaactttatacatgatactttttgtagtttcttttaatttttgaaagatgaactgcttccttttaataaattaatatctatttatacttttctcttgatttgggtcaagatgtttgatcatgagtgctttgagtggtatgtggaataggagaatataaaaacaaatctgccaaatacactagaaagcattttagtaagaaatgctggccctttcttaaaacatttctcttgcatataccaggatgggagtaaaagatgccttaatatttagtttttgtattgttggagacattgattttaataaaatcctatttatctgc

SEQ ID NO: 40685 - DNA, 2048 bp, Homo sapiens
gagtttcaattgagatgatattgcttagcgatgttgcggaattgatgggattgtgattctccatgaactcctaatacagccccatcaagtaagaaaaaagacaaaaaagaacaactttcaaaagcccagaagcgtaagctggcagacaaaacagatcacaaaggagaacttcctcgaggctggaactgggttgatgttgtgaagcatttaagcaaaactggctctaaggatgatgagtagcacttggaatttgagacaaggaaagagcattctttaaagagtaaaactgggttcaaaatctttcattactattttctggtattgaggcgactttttataaaacacaattttttgtatgtttcttacattaaaaaggttgtaagttgaaagttcatgaagagatcttgttgtattaaattattttcacaaacttgccttaataaaaggtgaaaatgttactgtttagtatactttatgaagccccttgagctttataaatggacaggcatggggaataagaatcagtgttaatttaaatgatcttatcctggtggatgtgctattttcttaaaggagtatgaagcccttttcaaactatcatcccagtggagcggagtactcagtgaacagttactccatagtgcaatccatattaataggcttcttctcttaagtcttcatctcttcttttgcttaattactgaaccgtaaattacttcagagaaatttaaatgctggtatttgaactttatacatgatactttttgtagtttcttttaatttttgaaagatgaactgcttccttttaataaattaatatctatttatacttttctcttgatttgggtcaagatgtttgatcatgagtgctttgagtggtatgtggaataggagaatataaaaacaaatctgccaaatacactagaaagcattttagtaagaaatgctggccctttcttaaaacatttctcttgcatataccaggatgggagtaaaagatgccttaatatttagtttttgtattgttggagacattgattttaataaaatcctatttatctgctgttgtgtgcttttagttgttggataactgaggtctcctaaatggttcaacataaaaccacatttcaagtcttgtttctttttggagtgtcttttcaagtattcaaatgtatttctcaacctgagcatctttttaatcatatacatgggagtcttttaaatgctgaactgttacacatgcttgatttaaaaataataataatagaggaaactattggtctagttgtgccaagaaaagtttctgatgtttatgtgtgatgtacagtgattttgtatatgcgcccagctttaagaacacataaaactattacgtctggtaggaagattgttagtgcctcaagttacacctgtgcagcttgggtctgagttttgatagaacagtaaacatttaaagaagttaagagcagtttgagctgtatccgcggtttttactcgttaactgacttcagctaaatagtttgaattatagagtaagtataattacagcaaaggagttaatctcattttcaaagctgtttctcattttatttcttgaattaatgtagagcaaaacatgttaaaattcaggaccactggaatatggcaacttatgtttcagggttgtgtgtgggtagtatttgtggttgtattggtttgttttttgtttttggagaaacatctgctagtggaataaaatactttgttttgctctgaagagactgaaattgttcaggcttattatggctcatagattacagagaatgatgctagttacatgccaatgaactatttttactctttttatatgaaatgtaaaaatttgtaggggttctggtgatggtggtacctcttattaccttatgtaaaacacttgaacagcctcatcaatattgccgtcatctgtttaacactcccagtatattttctcaatgtctgtttacttaaaattttgtggagtgacataattaataagcaataaagtctgaattatacacaaaaaaaaaaaa

SEQ ID NO: 40686 - DNA, 2171 bp, Homo sapiens
acttttgaagagtgtcattcattttatagatggtaccttctatttgtatattcttggttccagtttacttcctagaaagcttcaagagtgtcccgctcacccacccacacaccaccttgttctgttgagtttagatttttgtcaaggttacattttgagacccgtttgaagtagctgagcttgaagttgaaaagtagctacatgtggtaaaaactgtaggtgatttaagttacttaagcctcgttgcctatagtttaattttgatactccatggaaatagtgaactcagaaaataccacttgttgactattttctctcttttttttatatttaagcaaaactggctctaaggatgatgagtagcacttggaatttgagacaaggaaagagcattctttaaagagtaaaactgggttcaaaatctttcattactattttctggtattgaggcgactttttataaaacacaattttttgtatgtttcttacattaaaaaggttgtaagttgaaagttcatgaagagatcttgttgtattaaattattttcacaaacttgccttaataaaaggtgaaaatgttactgtttagtatactttatgaagccccttgagctttataaatggacaggcatggggaataagaatcagtgttaatttaaatgatcttatcctggtggatgtgctattttcttaaaggagtatgaagcccttttcaaactatcatcccagtggagcggagtactcagtgaacagttactccatagtgcaatccatattaataggcttcttctcttaagtcttcatctcttcttttgcttaattactgaaccgtaaattacttcagagaaatttaaatgctggtatttgaactttatacatgatactttttgtagtttcttttaatttttgaaagatgaactgcttccttttaataaattaatatctatttatacttttctcttgatttgggtcaagatgtttgatcatgagtgctttgagtggtatgtggaataggagaatataaaaacaaatctgccaaatacactagaaagcattttagtaagaaatgctggccctttcttaaaacatttctcttgcatataccaggatgggagtaaaagatgccttaatatttagtttttgtattgttggagacattgattttaataaaatcctatttatctgctgttgtgtgcttttagttgttggataactgaggtctcctaaatggttcaacataaaaccacatttcaagtcttgtttctttttggagtgtcttttcaagtattcaaatgtatttctcaacctgagcatctttttaatcatatacatgggagtcttttaaatgctgaactgttacacatgcttgatttaaaaataataataatagaggaaactattggtctagttgtgccaagaaaagtttctgatgtttatgtgtgatgtacagtgattttgtatatgcgcccagctttaagaacacataaaactattacgtctggtaggaagattgttagtgcctcaagttacacctgtgcagcttgggtctgagttttgatagaacagtaaacatttaaagaagttaagagcagtttgagctgtatccgcggtttttactcgttaactgacttcagctaaatagtttgaattatagagtaagtataattacagcaaaggagttaatctcattttcaaagctgtttctcattttatttcttgaattaatgtagagcaaaacatgttaaaattcaggaccactggaatatggcaacttatgtttcagggttgtgtgtgggtagtatttgtggttgtattggtttgttttttgtttttggagaaacatctgctagtggaataaaatactttgttttgctctgaagagactgaaattgttcaggcttattatggctcatagattacagagaatgatgctagttacatgccaatgaactatttttactctttttatatgaaatgtaaaaatttgtaggggttctggtgatggtggtacctcttattaccttatgtaaaacacttgaacagcctcatcaatattgccgtcatctgtttaacactcccagtatattttctcaatgtctgtttacttaaaattttgtggagtgacataattaataagcaataaagtctgaattatacacaaaaaaaaaaaa

SEQ ID NO: 40687 - DNA, 2540 bp, Homo sapiens
agcggagacgctgcacttcccaggccccaccagccgcggctccggctcgtagcccacagcccactgccggcggctgggcgctgccgaggctcggggcgcgcgcagttggcgtctgccagtgccaagactgtgccgcccccacagccgaggcgcgaaagggggacgcccggcctctgggccgctgccttcgctttctcttcgttgttgcgaacgccgtccgctcaggaggcgccccgcgaccggcgcgatgagtgccaacgaggaccaggaataggtgaaaatggtgatcccaaagccttcttaatagagatttcctggacagaaacatatccccaaacacctccaattctatctatgaacgctttttttaacaacaccatatcatcagctgtaaagcagagtatattagccaagctacaggaagcagtagaagctaatcttggaaccgctatgacctatacattgtttgaatatgccaaagacaataaagagcagttcatggagaatcacaatcccatcaattccgcaacatcgataagcaatatcatctcaattgaaactcctaatacagccccatcaagtaagaaaaaagacaaaaaagaacaactttcaaaagcccagaagcgtaagctggcagacaaaacagatcacaaaggagaacttcctcgaggctggaactgggttgatgttgtgaagcatttaagcaaaactggctctaaggatgatgagtagcacttggaatttgagacaaggaaagagcattctttaaagagtaaaactgggttcaaaatctttcattactattttctggtattgaggcgactttttataaaacacaattttttgtatgtttcttacattaaaaaggttgtaagttgaaagttcatgaagagatcttgttgtattaaattattttcacaaacttgccttaataaaaggtgaaaatgttactgtttagtatactttatgaagccccttgagctttataaatggacaggcatggggaataagaatcagtgttaatttaaatgatcttatcctggtggatgtgctattttcttaaaggagtatgaagcccttttcaaactatcatcccagtggagcggagtactcagtgaacagttactccatagtgcaatccatattaataggcttcttctcttaagtcttcatctcttcttttgcttaattactgaaccgtaaattacttcagagaaatttaaatgctggtatttgaactttatacatgatactttttgtagtttcttttaatttttgaaagatgaactgcttccttttaataaattaatatctatttatacttttctcttgatttgggtcaagatgtttgatcatgagtgctttgagtggtatgtggaataggagaatataaaaacaaatctgccaaatacactagaaagcattttagtaagaaatgctggccctttcttaaaacatttctcttgcatataccaggatgggagtaaaagatgccttaatatttagtttttgtattgttggagacattgattttaataaaatcctatttatctgctgttgtgtgcttttagttgttggataactgaggtctcctaaatggttcaacataaaaccacatttcaagtcttgtttctttttggagtgtcttttcaagtattcaaatgtatttctcaacctgagcatctttttaatcatatacatgggagtcttttaaatgctgaactgttacacatgcttgatttaaaaataataataatagaggaaactattggtctagttgtgccaagaaaagtttctgatgtttatgtgtgatgtacagtgattttgtatatgcgcccagctttaagaacacataaaactattacgtctggtaggaagattgttagtgcctcaagttacacctgtgcagcttgggtctgagttttgatagaacagtaaacatttaaagaagttaagagcagtttgagctgtatccgcggtttttactcgttaactgacttcagctaaatagtttgaattatagagtaagtataattacagcaaaggagttaatctcattttcaaagctgtttctcattttatttcttgaattaatgtagagcaaaacatgttaaaattcaggaccactggaatatggcaacttatgtttcagggttgtgtgtgggtagtatttgtggttgtattggtttgttttttgtttttggagaaacatctgctagtggaataaaatactttgttttgctctgaagagactgaaattgttcaggcttattatggctcatagattacagagaatgatgctagttacatgccaatgaactatttttactctttttatatgaaatgtaaaaatttgtaggggttctggtgatggtggtacctcttattaccttatgtaaaacacttgaacagcctcatcaatattgccgtcatctgtttaacactcccagtatattttctcaatgtctgtttacttaaaattttgtggagtgacataattaataagcaataaagtctgaattatacacaaaaaaaaaaaa

SEQ ID NO: 40688 - DNA, 913 bp, Homo sapiens
agcggagacgctgcacttcccaggccccaccagccgcggctccggctcgtagcccacagcccactgccggcggctgggcgctgccgaggctcggggcgcgcgcagttggcgtctgccagtgccaagactgtgccgcccccacagccgaggcgcgaaagggggacgcccggcctctgggccgctgccttcgctttctcttcgttgttgcgaacgccgtccgctcaggaggcgccccgcgaccggcgcgatgagtgccaacgaggaccaggagatggaactagaagcattacgctctatttatgaaggagatgaaagtttccgggaattaagtccagtttcttttcaatataggataggtgaaaatggtgatcccaaagccttcttaatagagatttcctggacagaaacatatccccaaacacctccaattctatctatgaacgctttttttaacaacaccatatcatcagctgtaaagcagagtatattagccaagctacaggaagcagtagaagctaatcttggaaccgctatgacctatacattgtttgaatatgccaaagacaataaagagcagttcatggagaatcacaatcccatcaattccgcaacatcgataagcaatatcatctcaattgaaactcctaatacagccccatcaagtaagaaaaaagacaaaaaagaacaactttcaaaagcccagaagcgtaagctggcagacaaaacagatcacaaaggagaactacatattcaaagaacatagtgaggtataaaaaagtattctttcttttaaatgtgtatataatatgtttgtatagttagtattacctcttcatcttgctatagagttcctctactagtaaatatagcaataagccaggcctcatgaactgcttgggctgtttggggatcc

SEQ ID NO: 40689 - DNA, 870 bp, Homo sapiens
gtggatttactaggaaggtgggacgttggaggggtggccgcatggagtgagtactgtctctggccaccgagcagagccagtgacagcagcgtcctggtaggcaggcaggcgtatcaggtttcagaggatgcggctgggaacgggagtagaggtgaggggtcgttgcatctgtcgcggtgtgtatcttttgggggttcagcgccaccagcgacttgggcctcattcatcgcgcttacatttctccacctcatttgaagaacgagcttcgtagcccacggagctgaggtatatgagctccctgaaagcacaaagcagttatttccatcttcagatcattcagagattatgaaggcacaaaccctgccttcaatttgcttatagtcaagtggagcagacacaagtcaatgattgcagtatagccactgaagtaatctaaaagagacttatcagcaggttgcaggtgaacatggccttgaggtaaatctgtcccttgctgaatacagtttcagtagattgtttatagtagtttcaggaattgagattttttacaaaaatacaaaagttttgcttggttctgttctagatgttttcttctaaataaatgagaaagatgtttcaacaaaggctctttatgctgaataattgtgatgcttgaagttgctaatctgctttaagtggattttaaatgtcaggcaattctagacagttttttcttggtcaaataaaaatttaattaaaactttaaaaatgttgagtttttaatccatttatccgtgttcatactaacgtgtagtattccataaagcctattagaaccctgaattcaaacttgccttctctgtgatatcctgtttcttacttggtagtttc

SEQ ID NO: 40690 - DNA, 800 bp, Homo sapiens
gtggatttactaggaaggtgggacgttggaggggtggccgcatggagtgagtactgtctctggccaccgagcagagccagtgacagcagcgtcctggtaggcaggcaggcgtatcaggtttcagaggatgcggctgggaacgggagtagaggtgaggggtcgttgcatctgtcgcggtgtgtatcttttgggggttcagcgccaccagcgacttgggcctcattcatcgcgcttacatttctccacctcatttgaagaacgagcttcgtagcccacggagctgaggtatatgagctccctgaaagcacaaagcagttatttccatcttcagatcattcagagattatgaaggcacaaaccctgccttcaatttgcttatagtcaagtggagcagacacaagtcaatgattgcagtatagccactgaagtaatctaaaagaggtggggaggccacagcttatgtgaatgactttctcaggagttataaagtgatacagacttatcagcaggttgcaggtgaacatggccttgaggtaaatctgtcccttgctgaatacagtttcagtagattgtttatagtagtttcaggaattgagattttttacaaaaatacaaaagttttgcttggttctgttctagatgttttcttctaaataaatgagaaagatgtttcaacaaaggctctttatgctgaataattgtgatgcttgaagttgctaatctgctttaagtggattttaaatgtcaggcaattctagacagttttttcttggtcaaataaaaatttaattaaaacttta

SEQ ID NO: 40691 - DNA, 1242 bp, Homo sapiens
gtccttgaaatcaagctgactctgcttttagcctcctaaatgaaaaggtagatagaacaggtcttgtttgcaaaataaattcaagacctacttatctaccaacagcaattacacgctttccattgtcttcctatagaaaataggagtagtacacttatagatgagaaaactggagaaagacatagtgaacatgtgagaatcttgctctactaattgataggaaggtgactagaaattggcgaagttttcttggtaagttgaggagaggacttttcttatagtgcagtctggtagctgaaccgccttgcatcaagaccaatgtagtcttatttacagaatgccacatcacagtgaattgtgctgtggacagcttccagtgtgtgagttgtggaagatgatgattttaacagattttggaggatgagaagtattaagaagaaggccccactgtccatgcatttgctctgctttttacttttgaccaagtatacacttcagaaatatcttattggatgtatacaaagtgattgtgtgtcatttgaaccagcaggaagtaatttattaaacacacttttctaaataaaagtcatttaattttatcagaaatcagtgtcattttagattgcaagtctcaaaccaactttccaattctgacttgtaagggtgccttaaatcctgaatactgtactctgtattactaaacccatgttagtttacgccaagattctgtggtggttttacatattctttttcccctttgttaaggtggggaggccacagcttatgtgaatgactttctcaggagttataaagtgatacaggtaaagctaagaaaagaacagattttgataacttttgttttaactgtccagtgttagggattgtggctacagtggtctaatttttaaaaactcttttttttgctttgttttttaacagacttatcagcaggttgcaggtgaacatggccttgaggtaaatctgtcccttgctgaatacagtttcagtagattgtttatagtagtttcaggaattgagattttttacaaaaatacaaaagttttgcttggttctgttctagatgttttcttctaaataaatgagaaagatgtttcaacaaaggctctttatgctgaataattgtgatgcttgaagttgctaatctgctttaagtggattttaaatgtcaggcaattctagacagttttttcttggtcaaataaaaatttaattaaaacttta

SEQ ID NO: 40692 - DNA, 881 bp, Homo sapiens
gtggatttactaggaaggtgggacgttggaggggtggccgcatggagtgagtactgtctctggccaccgagcagagccagtgacagcagcgtcctggtaggcaggcaggcgtatcaggtttcagaggatgcggctgggaacgggagtagaggtgaggggtcgttgcatctgtcgcggtgtgtatcttttgggggttcagcgccaccagcgacttgggcctcattcatcgcgcttacatttctccacctcatttgaagaacgagcttcgtagcccacggagctgaggtatatgagctccctgaaagcacaaagcagttatttccatcttcagatcattcagagattatgaaggcacaaaccctgccttcaatttgcttatagtcaagtggagcagacacaagtcaatgattgcagtatagccactgaagtaatctaaaagaggtgagtgtggcacttaacctctcctgggagggggaggaataaggcagtgtttccaagaggtgattttggagctatacaggcattaggtagacaaggaaggggaggtccattctgggtgcctaggactctgtggctgatttataaatcgtaaatggtacaaaaaacagtgttgagtatcttttacctttctccagagtactgttcttacttttggatagtgcttcttgttttttccttccctctccctgtccctgtcacctttaaattaaatgaatgtttggaaggaagtaggagggtaagaatctttctgggtggcagaataatagatgggtctaccaagagcgatgtatatacccagtaaagccatctctaaaactgtgtttctgcattgttacagtgcatagttgggaaatctcagttttgttggctgtgtactttcc

SEQ ID NO: 40693 - DNA, 928 bp, Homo sapiens
gtggatttactaggaaggtgggacgttggaggggtggccgcatggagtgagtactgtctctggccaccgagcagagccagtgacagcagcgtcctggtaggcaggcaggcgtatcaggtttcagaggatgcggctgggaacgggagtagaggtgaggggtcgttgcatctgtcgcggtgtgtatcttttgggggttcagcgccaccagcgacttgggcctcattcatcgcgcttacatttctccacctcatttgaagaacgagcttcgtagcccacggagctgaggttagtataaatgtggaagggagaagtatgcactcaccagactaaagtttacagttttcacataggttgtgctgttctgtgtcccataagggcctgcgagaacccagacattctgaatcggtgacgcctgctggaggcagcaacacctgttgcattaattttagaacacacacacacggagttggtaattcttaagcttcctgaatctgctggcggtcatttggtgtcagaagcagagcaaagccatcttggtcatctccctccttttagcttaaaccgaagcatgatgggggagataggccgaaagttatacagcttgttaataacagagccgagagtgaaagcgcgatttcttcatttttagcccggaattatttgttgtacaccatactgtttctttgcattgctagacaattcgtctttttttacgaggttgacggggagttgcaaggaggagtgaaaagggtggtaatgtacatctacatacagtataaatccatgaaaggcaaaatccgtgtgtgttaggagttagaactgtgtcagtcatctacatcttccatagtttgtagatggagatgagtctgtcacgtcgctctgtcatttcccttttagcaacagatgtgtagtaacaatatgtgaagaa

SEQ ID NO: 40694 - DNA, 910 bp, Homo sapiens
caagccgaagccccagcaatagcgtcccaggtcttacacgatctgtaccgatcccagcccagcaaggctccctggcctcctcgctgacttcgctcgcctctatctctttgccccactgtccatgcatttgctctgctttttacttttgaccaagtatacacttcagaaatatcttattggatgtatacaaagtgattgtgtgtcatttgaaccagcaggaagtaatttattaaacacacttttctaaataaaagtcatttaattttatcagaaatcagtgtcattttagattgcaagtctcaaaccaactttccaattctgacttgtaagggtgccttaaatcctgaatactgtactctgtattactaaacccatgttagtttacgccaagattctgtggtggttttacatattctttttcccctttgttaaggtggggaggccacagcttatgtgaatgactttctcaggagttataaagtgatacaggtaaagctaagaaaagaacagattttgataacttttgttttaactgtccagtgttagggattgtggctacagtggtctaatttttaaaaactcttttttttgctttgttttttaacagacttatcagcaggttgcaggtgaacatggccttgaggtaaatctgtcccttgctgaatacagtttcagtagattgtttatagtagtttcaggaattgagattttttacaaaaatacaaaagttttgcttggttctgttctagatgttttcttctaaataaatgagaaagatgtttcaacaaaggctctttatgctgaataattgtgatgcttgaagttgctaatctgctttaagtggattttaaatgtcaggcaattctagacagttttttcttggtcaaataaaaatttaattaaaacttta

SEQ ID NO: 40695 - DNA, 918 bp, Homo sapiens
gtggatttactaggaaggtgggacgttggaggggtggccgcatggagtgagtactgtctctggccaccgagcagagccagtgacagcagcgtcctggtaggcaggcaggcgtatcaggtttcagaggatgcggctgggaacgggagtagaggtgaggggtcgttgcatctgtcgcggtgtgtatcttttgggggttcagcgccaccagcgacttgggcctcattcatcgcgcttacatttctccacctcatttgaagaacgagcttcgtagcccacggagctgaggtatatgagctccctgaaagcacaaagcagttatttccatcttcagatcattcagagattatgaaggcacaaaccctgccttcaatttgcttatagtcaagtggagcagacacaagtcaatgattgcagtatagccactgaagtaatctaaaagaggtggggaggccacagcttatgtgaatgactttctcaggagttataaagtgatacaggtaaagctaagaaaagaacagattttgataacttttgttttaactgtccagtgttagggattgtggctacagtggtctaatttttaaaaactcttttttttgctttgttttttaacagacttatcagcaggttgcaggtgaacatggccttgaggtaaatctgtcccttgctgaatacagtttcagtagattgtttatagtagtttcaggaattgagattttttacaaaaatacaaaagttttgcttggttctgttctagatgttttcttctaaataaatgagaaagatgtttcaacaaaggctctttatgctgaataattgtgatgcttgaagttgctaatctgctttaagtggattttaaatgtcaggcaattctagacagttttttcttggtcaaataaaaatttaattaaaacttta

SEQ ID NO: 40696 - DNA, 926 bp, Homo sapiens
gtggatttactaggaaggtgggacgttggaggggtggccgcatggagtgagtactgtctctggccaccgagcagagccagtgacagcagcgtcctggtaggcaggcaggcgtatcaggtttcagaggatgcggctgggaacgggagtagaggtgaggggtcgttgcatctgtcgcggtgtgtatcttttgggggttcagcgccaccagcgacttgggcctcattcatcgcgcttacatttctccacctcatttgaagaacgagcttcgtagcccacggagctgaggtatatgagctccctgaaagcacaaagcagttatttccatcttcagatcattcagagattatgaaggcacaaaccctgccttcaatttgcttatagtcaagtggagcagacacaagtcaatgattgcagtatagccactgaagtaatctaaaagaggtggggaggccacagcttatgtgaatgactttctcaggagttataaagtgatacagacttatcagcaggttgcaggtgaacatggccttgaggtaaatctgtcccttgctgaatacagtttcagtagattgtttatagtagtttcaggaattgagattttttacaaaaatacaaaagttttgcttggttctgttctagatgttttcttctaaataaatgagaaagatgtttcaacaaaggctctttatgctgaataattgtgatgcttgaagttgctaatctgctttaagtggattttaaatgtcaggcaattctagacagttttttcttggtcaaataaaaatttaattaaaactttaaaaatgttgagtttttaatccatttatccgtgttcatactaacgtgtagtattccataaagcctattagaaccctgaattcaaacttgccttctctgtgatatcctgtttcttacttggtagtttc

SEQ ID NO: 40697 - DNA, 744 bp, Homo sapiens
gtggatttactaggaaggtgggacgttggaggggtggccgcatggagtgagtactgtctctggccaccgagcagagccagtgacagcagcgtcctggtaggcaggcaggcgtatcaggtttcagaggatgcggctgggaacgggagtagaggtgaggggtcgttgcatctgtcgcggtgtgtatcttttgggggttcagcgccaccagcgacttgggcctcattcatcgcgcttacatttctccacctcatttgaagaacgagcttcgtagcccacggagctgaggtatatgagctccctgaaagcacaaagcagttatttccatcttcagatcattcagagattatgaaggcacaaaccctgccttcaatttgcttatagtcaagtggagcagacacaagtcaatgattgcagtatagccactgaagtaatctaaaagagacttatcagcaggttgcaggtgaacatggccttgaggtaaatctgtcccttgctgaatacagtttcagtagattgtttatagtagtttcaggaattgagattttttacaaaaatacaaaagttttgcttggttctgttctagatgttttcttctaaataaatgagaaagatgtttcaacaaaggctctttatgctgaataattgtgatgcttgaagttgctaatctgctttaagtggattttaaatgtcaggcaattctagacagttttttcttggtcaaataaaaatttaattaaaacttta

SEQ ID NO: 40698 - DNA, 1216 bp, Homo sapiens
tatttttagtagagacagggtttcaccatattggtcagactggtcttgaactcctgacctctggtgatccactcgcctcggcctcccaaagtgctgggattacaggcgtcagctaccgtgtccagccgaaacatgaagtttcaaaatgccaagatgtatcacagaagacactcagcagtcagccacatttatcttggagaagagttccaggacttaaatgtttgaatagtataaactagttttttaaaaagtctgcctgaagccgaagattaaatactttaaaaagttcactgggtgatcttggcatgttgacattatcttaacagtctaagcttgttaccttacaccaacctgacaggttcattagaagcacatgaatacatataaaaggcataaaagactgggtcaatgaatatgagctctgaattctaaaattcctttgcatttctaggcagtacttaccatagtatgtttacgtacctggtgagtgacaatgctcaaaaatttctgaagtattcatccacattatgctagcgaaatgtcaacattgtcctttaatattcaaatgcatgaaccatcactccttggcctttgggccaagatcaagtgtagtatccaaatgcatgaaccatgaaagctatcttaaaaggaaagttacatttaaaggaattgaatataaaccttcggttaatcttgctagcacgtagtcaatacatcagtatttttctgccccttttatagtcttactggaaatgactgtaaaacagaaacaaagctaagccatggtaaatagaacattaaatgcccaacctaatttattttgctaagagaaactgatgaactaaaagagaaacaactattgtctacattttagatatgggggaaaaaaccctgagattactaattatgtatcaccatcctcttaatgtagatcctgaaaatgatggtatcaatataatacatacagtggattcaccttttaaactggatctattacctttgatatttgtcttacactgaaaaattctgacatcttcaggaaaccaatatgatggataagctaaatgttgacttaaaatagttaaaccccttaataacatcctttagtttctattatttcactgcttaagttcagcatctgaataacaaaggtaacataagtagtacttaagatcccaaaggcccattacattctatcaataaagacaaaacaaaa

SEQ ID NO: 40699 - DNA, 375 bp, Homo sapiens
tttattttttaagctttattgaagtataattgatacaccataaattcatccattataggtgaacaattccacgactgttagtataacagaattgtacaatcatccccactatctaattttggaacattttttgttacccaaaaaagaaactttatgtctatttccagtcactccccattactattcccggccttaggccgcaactaatctatggtttgtctctatagatttgtgttttctggacacttcatataagagaactcatatggccaggcacagtggctcgcgcctgtaatcccagcactttgggaggccaaggcaggtggatcatgaggtcagagagatcgagaccatcctggctaacacggtgaaacc

SEQ ID NO: 40700 - DNA, 1499 bp, Homo sapiens
tatttttagtagagacagggtttcaccatattggtcagactggtcttgaactcctgacctctggtgatccactcgcctcggcctcccaaagtgctgggattacaggcgtcagctaccgtgtccagccgaaacatgaagtttcaaaatgccaagatgtatcacagaagacactcagcagtcagccacatttatcttggagaagagttccaggacttaaatgtttgaatagtataaactagttttttaaaaagtctgcctgaagccgaagattaaatactttaaaaagttcactgggtgatcttggcatgttgacattatcttaacagtctaagcttgttaccttacaccaacctgacaggttcattagaagcacatgaatacatataaaaggcataaaagactgggtcaatgaatatgagctctgaattctaaaattcctttgcatttctaggcagtacttaccatagtatgtttacgtacctggtgagtgacaatgctcaaaaatttctgaagtattcatccacattatgctagcgaaatgtcaacattgtcctttaatattcaaatgcatgaaccatcactccttggcctttgggccaagatcaagtgtagtatccaaatgcatgaaccatgaaagctatcttaaaaggaaagttacatttaaaggaattgaatataaaccttcggttaatcttgctagcacgtagtcaatacatcagtatttttctgccccttttatagtcttactggaaatgactgtaaaacagaaacaaagctaagccatggtaaatagaacattaaatgcccaacctaatttattttgctaagagaaactgatgaactaaaagagaaacaactattgtctacattttagatatgggggaaaaaaccctgagattactaattatgtatcaccatcctcttaatgtagatcctgaaaatgatggtatcaatataatacatacagtggattcaccttttaaactggatctattacctttgatatttgtcttacactgaaaaattctgacatcttcaggaaaccaatatgatggataagctaaatgttgacttaaaatagttaaaccccttaataacatcctttagtttctattatttcactgcttaagttcagcatctgaataacaaaggtaacataagtagtacttaagatcccaaaggcccattacattctatcaataaagacaaaacaaaactacatgtttactgaaaatagtctttttttctttgctttccagttttacacttttgttgaacacaaaaaagtggacaagatcaaataactagatggtaaaacactgattttttaaaaatcacatctttaaacccgtgagaatcacaattcaaagtatggccactgggggcaacctgtaaacctacaaccttttcttaacactgacactatgtgactgatttttcttaaaacacaaatgccattaagaaagtattttttgttgacacattctgcaaaaaaaaaa

SEQ ID NO: 40701 - DNA, 1391 bp, Homo sapiens
tttattttttaagctttattgaagtataattgatacaccataaattcatccattataggtgaacaattccacgactgttagtataacagaattgtacaatcatccccactatctaattttggaacattttttgttacccaaaaaagaaactttatgtctatttccagtcactccccattactattcccggccttaggccgcaactaatctatggtttgtctctatagatttgtgttttctggacacttcatataagagaactcatatggccaggcacagtggctcgcgcctgtaatcccaccgaaacatgaagtttcaaaatgccaagatgtatcacagaagacactcagcagtcagccacatttatcttggagaagagttccaggacttaaatgtttgaatagtataaactagttttttaaaaagtctgcctgaagccgaagattaaatactttaaaaagttcactgggtgatcttggcatgttgacattatcttaacagtctaagcttgttaccttacaccaacctgacaggttcattagaagcacatgaatacatataaaaggcataaaagactgggtcaatgaatatgagctctgaattctaaaattcctttgcatttctaggcagtacttaccatagtatgtttacgtacctggtgagtgacaatgctcaaaaatttctgaagtattcatccacattatgctagcgaaatgtcaacattgtcctttaatattcaaatgcatgaaccatcactccttggcctttgggccaagatcaagtgtagtatccaaatgcatgaaccatgaaagctatcttaaaaggaaagttacatttaaaggaattgaatataaaccttcggttaatcttgctagcacgtagtcaatacatcagtatttttctgccccttttatagtcttactggaaatgactgtaaaacagaaacaaagctaagccatggtaaatagaacattaaatgcccaacctaatttattttgctaagagaaactgatgaactaaaagagaaacaactattgtctacattttagatatgggggaaaaaaccctgagattactaattatgtatcaccatcctcttaatgtagatcctgaaaatgatggtatcaatataatacatacagtggattcaccttttaaactggatctattacctttgatatttgtcttacactgaaaaattctgacatcttcaggaaaccaatatgatggataagctaaatgttgacttaaaatagttaaaccccttaataacatcctttagtttctattatttcactgcttaagttcagcatctgaataacaaaggtaacataagtagtacttaagatcccaaaggcccattacattctatcaataaagacaaaacaaaa

SEQ ID NO: 40702 - DNA, 408 bp, Homo sapiens
atactttccctgtgacatttttaaacttcttccctatattacagtcatccttgtacatgactaatattccacaatggatcataaattgagggtaaagcctgtgtataatttgtatgttaattttccaatgtacctaccatagtgccttacacagagcagatatccagtaggtcttggaatacatatatgaaacatataaaatgcatctgtggaaagacaaataagaaacaaaactcatacttttcagaacttactatcccaggaaattcacttttttcaagaagttttcagcagtatttcttgccctttggcttgttttcctgtgcagagatttgggacctctatcttttcctactaacttaccctacctccccatgataggccattaaattatagttgcactttctc

SEQ ID NO: 40703 - DNA, 415 bp, Homo sapiens
agtagccacacactggagctgtttcagcccctatttggtaacaacagtagagatcacttttttagcttaacgagggtcatctttctcaataatgtgtaaatagtcctaagggtgattatgtaataaatatatacccttcacatgttagtacataaaaacccattatatctttcctgagagaggatttaaataggcaggagagaattaatagtcatacttacccgggtagagtttttgacaatggcaatgtaagaaatgcacagtgttgaagattagacaatgaactctagaacattttgtctacgcctcccccatacttcccatatctaaaatttgtggaaaaggttaaaatactattacattttatttaaataattttaaaaagtattattttagtacgattgagtgtcttctc

SEQ ID NO: 40704 - DNA, 408 bp, Homo sapiens
ctcagatagcctcctctcctatcctcagactccacagccatgccccttggcctctccctaccccagcagggaggtgtctttagtcccgggcagccagatgctccaaggcagggcctccgaccccacaaagggtgagaggattcacctggagctgggctggaagatgcaggaaaagcccctgcccccggggcctactcaacccagcccatgctcatgcatgccaggtcactgcagcagatcccatgaaaaaccaagacggccatgtcaccagcccgtcctctcctgaacacccagctcactctcgccttcttcctctggagagaggaccagaggccagagtcagctctggggtatagagattccctgctctgtcctgggaggcaggaccaggactagggtgagcaagtg

SEQ ID NO: 40705 - DNA, 601 bp, Homo sapiens
tgaccttctgggctcaagcaatcctctcagcctcccaagtagccgggaccacaggcacatgccaccacacccagctaatttttggtagaggcagagtctcaccttattgttcaggctggtctcaaattcctgggttcaagtgatccttccacctcagtactgggattacaatgattctgtttttaaatgattattttggcgtttgtgtggagaagctattgaagggggcaattctagggaggtgatgatgcagctgtaactagagtgatggtaatagattgcaaaggggattattaaaggtttatttggagggagaaagaaagtctaagaattattgatgttaggagtaaaggagtgtgagggaaactagggtaattgtttgatcaatggaaccatgcccaatgatatgaaatatcaagagagaaaccagtttggaatggataaatctgaaattttgttttacaaatggtaaacttggcatggctgttaaatcccaaatgttggcatcattggaacatggggacgagtgacggcaggaggaccacgaggaaatacccatcaaaactaacttgtttacaacaaaataaagtattcactacca

SEQ ID NO: 40706 - DNA, 911 bp, Homo sapiens
ccacagaaagtaaagcaaatccaggcttagaattagacctgtttgtggggagcagaaaggattgggatggggaggcatagtggagcaacacatctgagacaggaagtacggcccctgttctgttggcagtggacctcttcagtcagtagccaaggtcacagccctgagccgatgatgctccatgctgctgcctggatggaaagcattcgaggggaccttttggccaccagcattatgctgacagtcccagctcagacagaaggccttcttgtggcctcttttctgaggtaggaaggaaggttccgggtcaggaagtacatggtttgttgtaggtctgatgtgaacagtttgttgtcactaaccagccctggctagcaagaattccagaagagggatttggcagggacccatgtggtattgcaacctgtcaatacatcttgacaagtttgtaaatcagtcttcctggcagccagcttcacatagtatctaacacagacaggatttgctcaccaaaaacagagatgagtttgtttttggaggcctctgctgttacttctggccatttacctcttgcataatgtaaggtagccttttctcatctttgccctccaatgcccatctggttctcagacaatccccaaaccccacaaaaatggctgtttagaagaggaaggataaacagttggcccttggtatctgcaggttccacattcatggagtcaacaaaccataaatcaaaaacattttggggaaaaaaaaacagtgaaaattaacaatacaattagtctgggaacggtggttcacacctataatcccagtactttgggaggctgaggtaggcagattttttagcccagaaatttgagaccagcttaggcaacatggtgaaaccctgtctctacaaaacaaaa

SEQ ID NO: 40707 - DNA, 2540 bp, Homo sapiens
tcccattttggatgtttcatataaatggaattatacactatgtgttctgtgactgacttctttcctgtaacacagtttttccaaggtttcaccatggggtgggcagggtgtggtggctcacatgtatactaatcccagcgtgttggttgggaggccaaggtggaaggatcgcttgaggccaggagttcaagaccagcttgacaacatagcaaaaccccatctctgtaaaaaaaaataaaaataaaccaggcatgggtgtgtgcctgcctcagcctcccgagtagctgggattacaggcatgggccaccacacccagctaattttttgtgttttctttttagtagagacggggttttaccatgctggccaggctggcctcaaactcctgaccttgtgatccacccacctcagcctcccaaagtgctgggattacaggcgtgagtcaccgggcaggctgttctgaagcttttagatctcaggtctaaggcttcctttccctccctctcccagctagtttgtgctaattaagagaccttttatactgttttattgcctgtttgaagaaataatttttatcacgtttttgtaagatatctataattttaaatgtttataaattgtttaatttattagcatcttaatgtaccccatttttatatactgaatgtggccttttgagtgaaataggaagcttcatggtgttggagccacctttgtacagttgtttaaagtttcccattgtcacggaaaacattggttgcaaagcccctcaaagccctcaagtgccttctgtgagtttaaatgtgctggtgccctccagaaaagcctcggcctcagctccgtttccgcctgttccctcccccaggataatgaatggttactgcactgtaaagaccgtggtctcttttcactaaataggagattcgagtttcccagtttacatgaatgaagtctgaatttaagacggtgatgaaactgaggttcagtactctcgggactcgaggaaattattcctgagacatggagtaattcttacaaatttaaactattgtacagatccacatacatgttgttaagtacctaatgttttgctgaacttttaaaagttaatttccaaaatgtatagggattcatgataattaaacctttttattgctcatttttttagtagaagaatatcacttatttttagacttgtaaaatgtatgaactggtgagcggacatctgttaagagagtcactagtcagaatgttaaaggagtgcatgcaggatgccccaaatgtcgtgaactcttgttactcctgtatgtagtagtgtaagcatgtgacttttaacaccatttggtttgaaactaatgtagagatgcctgattccaaacaggtgtggagaatattgaacggctcagaagccgcgtcccttacttaacacaattccgaatctccctcatccatgatgcgtccattggatcactcgctggtggtcactgtgtggcagttactaggggaattctgcctctgactgttctttttcttttggtctttaaacaccctgtcgtgggatgtgctcactgatttgtggctatgttgaaggtatcacttgtcttgagggttttcaatatttcaggatcatgctggtggcaaaaggactccatgcctctgtggaatcatgtccacagggggacctgcctcccgtgatgtcccacctttccttcaaggtctgtcatatgagtcctccccttttacaacacttattatggtatttttcaagttattcttcttagatttgcagtacctactgaaatttgtgtttttatagttgaagttaggaaaatgctatttgatttgtaattagatatttaagtcacttgtccaatgatgtgtatgtctaagcctcatgtaccgatttgaagtcagacttaaaaatgtatttacagattcacttgagactttttaatcggttcttcaaatatttcatgtttacattaaaaatttccagagaagcataaaagtattcactttcctgccttgtcatttctggaaagattttggggagatattttattgcatattaattaataaattgttctactaggaaaaaaaaaaaaaaaaaaaaaaaaaaaaaaaaaaaaaaaaaaaaaaaaaaaaaaaaaaagagaggccaacaaaaaaaaaaactcaccaccaaagagaagagaccccaaaaaaacaacacccacaattaccaaacaaaaagaggaccccgaggaccccttttttaacccccggccaggccccttcaaaccacacccgcccactgtggcgaacaacgggccgcccagcagagcaaccttccgggcgaaaaagacaccctccacagtcgggggggcggacacacaaaaggggaccaacgtacactcaaagaaaatattacacgccacatcgagggaagaacacacacccacagccgggtgacgggacgtcaaccagccgcaccatcaactgaccagcttcgacgcgcggacacagaatcatctgagcaacttttcacacacggaagaaaa

SEQ ID NO: 40708 - DNA, 1999 bp, Homo sapiens
tcccattttggatgtttcatataaatggaattatacactatgtgttctgtgactgacttctttcctgtaacacagtttttccaaggtttcaccatggggtgggcagggtgtggtggctcacatgtatactaatcccagcgtgttggttgggaggccaaggtggaaggatcgcttgaggccaggagttcaagaccagcttgacaacatagcaaaaccccatctctgtaaaaaaaaataaaaataaaccaggcatgggtgtgtgcctgcctcagcctcccgagtagctgggattacaggcatgggccaccacacccagctaattttttgtgttttctttttagtagagacggggttttaccatgctggccaggctggcctcaaactcctgaccttgtgatccacccacctcagcctcccaaagtgctgggattacaggcgtgagtcaccgggcaggctgttctgaagcttttagatctcaggtctaaggcttcctttccctccctctcccagctagtttgtgctaattaagagaccttttatactgttttattgcctgtttgaagaaataatttttatcacgtttttgtaagatatctataattttaaatgtttataaattgtttaatttattagcatcttaatgtaccccatttttatatactgaatgtggccttttgagtgaaataggaagcttcatggtgttggagccacctttgtacagttgtttaaagtttcccattgtcacggaaaacattggttgcaaagcccctcaaagccctcaagtgccttctgtgagtttaaatgtgctggtgccctccagaaaagcctcggcctcagctccgtttccgcctgttccctcccccaggataatgaatggttactgcactgtaaagaccgtggtctcttttcactaaataggagattcgagtttcccagtttacatgaatgaagtctgaatttaagacggtgatgaaactgaggttcagtactctcgggactcgaggaaattattcctgagacatggagtaattcttacaaatttaaactattgtacagatccacatacatgttgttaagtacctaatgttttgctgaacttttaaaagttaatttccaaaatgtatagggattcatgataattaaacctttttattgctcatttttttagtagaagaatatcacttatttttagacttgtaaaatgtatgaactggtgagcggacatctgttaagagagtcactagtcagaatgttaaaggagtgcatgcaggatgccccaaatgtcgtgaactcttgttactcctgtatgtagtagtgtaagcatgtgacttttaacaccatttggtttgaaactaatgtagagatgcctgattccaaacaggtgtggagaatattgaacggctcagaagccgcgtcccttacttaacacaattccgaatctccctcatccatgatgcgtccattggatcactcgctggtggtcactgtgtggcagttactaggggaattctgcctctgactgttctttttcttttggtctttaaacaccctgtcgtgggatgtgctcactgatttgtggctatgttgaaggtatcacttgtcttgagggttttcaatatttcaggatcatgctggtggcaaaaggactccatgcctctgtggaatcatgtccacagggggacctgcctcccgtgatgtcccacctttccttcaaggtctgtcatatgagtcctccccttttacaacacttattatggtatttttcaagttattcttcttagatttgcagtacctactgaaatttgtgtttttatagttgaagttaggaaaatgctatttgatttgtaattagatatttaagtcacttgtccaatgatgtgtatgtctaagcctcatgtaccgatttgaagtcagacttaaaaatgtatttacagattcacttgagactttttaatcggttcttcaaatatttcatgtttacattaaaaatttccagaga

SEQ ID NO: 40709 - DNA, 1692 bp, Homo sapiens
tcccattttggatgtttcatataaatggaattatacactatgtgttctgtgactgacttctttcctgtaacacagtttttccaaggtttcaccatggggtgggcagggtgtggtggctcacatgtatactaatcccagcgtgttggttgggaggccaaggtggaaggatcgcttgaggccaggagttcaagaccagcttgacaacatagcaaaaccccatctctgtaaaaaaaaataaaaataaaccaggcatgggtgtgtgcctgcctcagcctcccgagtagctgggattacaggcatgggccaccacacccagctaattttttgtgttttctttttagtagagacggggttttaccatgctggccaggctggcctcaaactcctgaccttgtgatccacccacctcagcctcccaaagtgctgggattacaggcgtgagtcaccgggcaggctgttctgaagcttttagatctcaggtctaaggcttcctttccctccctctcccagctagtttgtgctaattaagagaccttttatactgttttattgcctgtttgaagaaataatttttatcacgtttttgtaagatatctataattttaaatgtttataaattgtttaatttattagcatcttaatgtaccccatttttatatactgaatgtggccttttgagtgaaataggaagcttcatggtgttggagccacctttgtacagttgtttaaagtttcccattgtcacggaaaacattggttgcaaagcccctcaaagccctcaagtgccttctgtgagtttaaatgtgctggtgccctccagaaaagcctcggcctcagctccgtttccgcctgttccctcccccaggataatgaatggttactgcactgtaaagaccgtggtctcttttcactaaataggagattcgagtttcccagtttacatgaatgaagtctgaatttaagacggtgatgaaactgaggttcagtactctcgggactcgaggaaattattcctgagacatggagtaattcttacaaatttaaactattgtacagatccacatacatgttgttaagtacctaatgttttgctgaacttttaaaagttaatttccaaaatgtatagggattcatgataattaaacctttttattgctcatttttttagtagaagaatatcacttatttttagacttgtaaaatgtatgaactggtgagcggacatctgttaagagagtcactagtcagaatgttaaaggagtgcatgcaggatgccccaaatgtcgtgaactcttgttactcctgtatgtagtagtgtaagcatgtgacttttaacaccatttggtttgaaactaatgtagagatgcctgattccaaacaggtgtggagaatattgaacggctcagaagccgcgtcccttacttaacacaattccgaatctccctcatccatgatgcgtccattggatcactcgctggtggtcactgtgtggcagttactaggggaattctgcctctgactgttctttttcttttggtctttaaacaccctgtcgtgggatgtgctcactgatttgtggctatgttgaaggtatcactggatgagggcatgccactggatgagggcatggcgttggattgttcacccactggatgagggcatgccactggactgagggcatggggtaccgag

SEQ ID NO: 40710 - DNA, 710 bp, Homo sapiens
  misc_feature (83)..(83): n is a, c, g, or t
aagtcaggcagagaggtttttgacttggctaggcactgtggctcacgcccataatctcagtgttttggtaggctggggtgggnaggatcacttgaggccaggagtatgagaccagatcccgtctctacaaaaagtaaaaaataaattagttgggcgcgatggcacacacctgtagtctcaactactcagaaggctgaggcaggaggattgcctgagcccagcagttcaaggctgcagtgagctatgatcacatgccactgcattccagcctgggtgacagagcaagtcaaaaaagtggggtgggtgtgcaagtggggttgttagactagaaacctaaaacacaaatctaacaaagaaacaaatcagtaaatgagacttcctcaaaattaaacattttgttctatgtaaaaagatcctattaagaagacaagccaggcgcagtggcatgcatctgtagtcccagctactcaggaggctgaggcaggagggctgctcgagcccaggaatttgagattaaggtaaactataatcactcttgtgaacagccactgcactgcagcctgagcaacacagtgagatcccatgtcaaaaacaaacaaggaaacaaacaaaaaaaaagacaagttacaccacaggagaaaagatctgcaaaccacaaacccaacgaaggactagaatctagaatctagaaagaactctgaaaactcata

SEQ ID NO: 40711 - DNA, 983 bp, Homo sapiens
cattgtctttaggacaatatccttccaatcttagctgatcaagtactctgtgttttcctatccggttttactacccatgacttcttggcggtaattcctatctaccttcctaatcatttctcttcattcacttaatacttcaactactgactcactgccttcctgtacatcttcattcctgtcattgttcttagtgattccaagaaccatgtagaagaaacactctgaactttagcttctctattccttgacctctcctctttcaatgttttcctctatcccacctttgccacctatcacaagaccactggaacttatcaccactaatgaaaccacctggtaattctttatttgaagcatcctactttatgaccatcacctcctgttcttctaattcatttacctgagtcttccattgctgcagttctttagccctattgtaatctgcaaactactgttttccttgtttgaacttcagtagcttaacattggtagaaaatactagggtgactgataacacttgaaattcatcacaaaaacttcaactagccattcaatactgcctaccattcttgtatgtttttctagcagatttgcttttgactttctcagatgacagttgaaaacctgcacttcacccttcacacaccttccctgcttaactgagaaaacagaaggtatccgctgggcacagtgactcaagcctgtgatcccagcattttgggaggctaaagtgggaagattgcttgagcctaggagttccagacctgcctggtcaacatagcatgatcatgtccctatttaaaaaaaaaaaaattagccaggcatggtgaagcatgcctatagtcccagctactctggaggctgaggcaggaggattgcctgaacctaggagtccaaatgactgggtttgtgaaggctacagtgagccatgactgtaccactgtacttcaacctgtgcagcaaagtgataccttgtctca

SEQ ID NO: 40712 - DNA, 689 bp, Homo sapiens
gatgcacccatcttccgggccctccacatgcaggtcccaatctaccaattgcctttttaaagaaactatgacgtacagttccctgttgtaaccacgggcaggtatttgctgacttgcctacaacctggagggttatgagctggcgtcgccccatttcacagagggagagccgaggtgcagagagacgaagctgctgactggaggagacatagacccaagcagcgagcccgcgcggcaatttagggaaccaactgtgtgtgctgcgggggtcccttgccacccaaactgggatataggctgctgttcgtacacttgcagaagtttctccctgcagctaccgccaccaataatattcacacagccttcccacatgctatgtaaagactccaaccttccccacctcccaagatgcatcctgttactatagccattttacagatgaggaaaccgaggttccaagaggggcagtctctgctctctaaacttcaccttccaaaggattctaagctgctgaatgaaggctgcaggcagggtggtctgtacaggggagggagggtggaaggcacggggtctggaagtctaggaggagtgtctgaagtcaactgcaacttttaaatatctgtgaattttagatttcaccctgtatgtgtccctagcgtgttttaataaaataaattgcttcacgttaa

SEQ ID NO: 40713 - DNA, 441 bp, Homo sapiens
ggcaaaaaaataaatattcttttgaaaacagataatatttatgagaacctattgctatgtgccatccatgtgtcttgctatcttccaattctgcctatgaaatgctccattgaaaggtgacccaaaagtgttacatgtgtaaacagactatcagaaaatgatagagacagagagggagagagatatgaactcgtattgctaactattgctaaattattgccaactattgctaaattatttggaaattcttcatataagattacttatcatccacctaacttaaaaagcattttcccagttattataaagttcaaattaatttgatttgttcctaaaaaaatgtcagtttgcttacaatttaaacttttatttaaggtagaaagtttcccttctgagcaacaagttacgggctggaagtggtaaaaaaaatctctaggagag

SEQ ID NO: 40714 - DNA, 821 bp, Homo sapiens
acggggtttcaccatgttagccaggatggtctcgatctcctgacctcgtgatctgccagcctcggcctcccaaagttctgggattacaggcatgagccacagcgcccggccaaaatccgcacatcttaaaggacaagaagaggtatttacgcctcctggagattcacaaaataatgcggacgctaccgactgccagatctttacactcacccctccacctgccccgaggagtccggtcacaagggcccagcccatcacaaagacacccaggtgtcccttccatttttttccacgaaggcccagaatccattttaggtttccaaacagacctttcgtcccttcaaggtgtaaccaccgttttccattccagccattttattggccacaccgttaccttacttataggtatttccccagaagaagactccagagaggaagctcatctgaggaaagctgagagggaagagaaacccaaacatactgaagcaaaaaaaagcctatccttcagaaaaaagcaacaaaaagatttctgttttatctttcgaaactaaaactattggatttgaagattaagtatcctaaacatcactgactagaaactgttctctttgtcagcagtgaagatattggatcataggttattgatggttgcaaaattggacaataaccacgttatttttatcctcaacctcttatggtcacaggatatttatgcaaataaaatctttaaatgggtggatctagtaattcctatccatactaagatgctgagagaatccatctcctcctctaaattaaacaggatttaaataaattgagat

SEQ ID NO: 40715 - DNA, 777 bp, Homo sapiens
gtgactgctcagtagaagccatggctcgcagacactgcttctcctactggttactggtatgctggttggtggtaactgtggcagaaggacaagaagaggtatttacgcctcctggagattcacaaaataatgcggacgctaccgactgccagatctttacactcacccctccacctgccccgaggagtccggtcacaagggcccagcccatcacaaagacacccaggtgtcccttccatttttttccacgaaggcccagaatccattttaggtttccaaacagacctttcgtcccttcaaggtgtaaccaccgttttccattccagccattttattggccacaccgttaccttacttataggtatttccccagaagaagactccagagaggaagctcatctgaggaaagctgagagggaagagaaacccaaacatactgaagcaaaaaaaagcctatccttcagaaaaaagcaacaaaaagatttctgttttatctttcgaaactaaaactattggatttgaagattaagtatcctaaacatcactgactagaaactgttctctttgtcagcagtgaagatattggatcataggttattgatggttgcaaaattggacaataaccacgttatttttatcctcaacctcttatggtcacaggatatttatgcaaataaaatctttaaatgggtggatctagtaattcctatccatactaagatgctgagagaatccatctcctcctctaaattaaacaggatttaaataaattgagat

SEQ ID NO: 40716 - DNA, 642 bp, Homo sapiens
gtgactgctcagtagaagccatggctcgcagacactgcttctcctactggttactggtatgctggttggtggtaactgtggcagaaggacaagaagaggtatttacgcctcctggagattcacaaaataatgcggacgctaccgactgccagatctttacactcacccctccacctgccccgaggagtccggtcacaagggcccagcccatcacaaagacacccaggtatttccccagaagaagactccagagaggaagctcatctgaggaaagctgagagggaagagaaacccaaacatactgaagcaaaaaaaagcctatccttcagaaaaaagcaacaaaaagatttctgttttatctttcgaaactaaaactattggatttgaagattaagtatcctaaacatcactgactagaaactgttctctttgtcagcagtgaagatattggatcataggttattgatggttgcaaaattggacaataaccacgttatttttatcctcaacctcttatggtcacaggatatttatgcaaataaaatctttaaatgggtggatctagtaattcctatccatactaagatgctgagagaatccatctcctcctctaaattaaacaggatttaaataaattgagat

SEQ ID NO: 40717 - DNA, 545 bp, Homo sapiens
  misc_feature (533)..(533): n is a, c, g, or t
ctactactactaaattcgcggccgcgtcgacgatggattgcttaatagataatgttaggagaattgactaattaaaatggagaaacattaactggatctgcacagactatcatacacaatggtagactctagaagggctaaagacctaaatgagaatggtaacaccacaaaattaatacgtctcttatctacaaatctgaaatccagaacactctgaaaattaaatgctttttcttaacccacatggcagcaaaacttgagctgaggtgaagctatttataatcatgtatttatcctgcttaatgtgaatatcctataattcactgcagttttaaaaaactattattataaaaactttcaaacattcagaaaaatttaaaaatagtattagagggccgggcgtggtggctcatgcctgtggtccaggcatttggggaggcttgggtgggagtatcacttggggccgggagttcgggaccagcctggtgaaaaagagcgagaccttgtcttaaaagtcgacgcggccgcgaatntagtagtagtag

SEQ ID NO: 40718 - DNA, 460 bp, Homo sapiens
gctaagtgatttctataatttgcagatttggtctcagctaagagctaaaactgttcatagcagcactaaggaggcctatacccctacagggaaattataaaattttatatattttaactctttcactactgccaacattcagcacatagtgttttcttccaatcttaatggtttatttcatttcattgtgtttgttgtggggattattaaagcagtcacaacagagcctagcacatagtatatgcttttgcaacttttttttgagggggagtctccctctgtcacccaggctggagtacaatagggcaatctcagctcactgcaaactccgcttcccagattcaagtgattctcgtacctcagcctcctgaatagctgggattacagcatctgccagcacgcctggctaatttttgtatgtttagtagagatgaggtttcaccatgttggccaggctggt

SEQ ID NO: 40719 - DNA, 321 bp, Homo sapiens
aactcttcagacagtacctggcacagagggactgctcagtctgagctagcaattatgatgctcaaaatcctgcagacactgcccatagcctctggcattaaactcaagcctccttgacaaggctcagtgcactggacttcccctggttcagagacactggcctgtgtgtgggttctccctcctccaccagtgtttcatgcttccatgcctttgcccaacttaacttcccttgtgatatccttttcccaacctgaatgcccctcccttcctcatgtctctggcatttctaaccatctttctttttttttgagatggagtctc

SEQ ID NO: 40720 - DNA, 275 bp, Homo sapiens
atgtaaaacaaccagaattttcacacattgttagtagaatatactcctatcctatcacccaacagttttactcctaggtatttacctaagagaactgaaaatacatatccacacacaaaaatacagcttgtataaaaaagttcttggcagctttattccaaatagccaaaaactggaaaaagtgttaaatgtccatccacagaagcatggataaacaaattaccatatatctgacaaaatggaatactactcagcaaaaaacaacaacaaaacag

SEQ ID NO: 40721 - DNA, 488 bp, Homo sapiens
ctggaagggccctgggaattcagccagcccaaccccttggtgcacagacaggagacgggcccatgagggtgttggtctcttccaggcctaggagcacctggggcagacccaggctcagaactcagcgcacctgaggcccatggagctccacccagcttccatctcagacagtcataggctaggcctggaagagctaaagaaacctcttggcatagaacccctgtcctactttacagagaggcaattgaggtctgcagcagcaactccgtttacttagtgagaggaaaatgcttctaagaggcctggcctcccagaacaaacccagcaacctggttggtgtccatccctatgccaagggccatgacagccatccacacaagagaggatgggcgccgctcgcctcaccagaaggtctaggcacttctttttttgttttttatttttgtttttttttttctgggcaacaagagcaaaactcctccatctca

SEQ ID NO: 40722 - DNA, 1095 bp, Homo sapiens
gaggcggaggttgcagtgagccgagatcgcgccactgcactccagcctggaagacagagtgagactccttctcaaaaaaaaaaaaccttaaaattgatttgaagttgattatctttcataatcttctaattctcctttagaatgatccagtccattaaacactttgcagatgccagacctatgctctataaatccataaattaattcaatttattgaaagaagtagatatctataaaccccacactgaactggttaagcttaattgcaatcctagtccatcctagagagaaatcaaaataattgagaggttagggcattgtcgctgtgagaaagcttagaggtaacacattatatgttatctggagagaagaatgttaaatggaaacaaagtttatgaagaatttcttcaagtacctgaaggactttctgggaaattacaagatagcattcttaggttccatatgtctagaagacttttcataactgtaagcaacttttgcaaatggtttgggaacataaaactcttccagcatagaagaaaatgggtactattaacattcagatggttatgggaccatcataacagtttgatgtgatatgcaaaatgctgcatccccaactatgaccctcagtatgacttttaagggaattataagctccaaatactttttggagtataaacagtacttgactttttcacacatttgctaatacccttctcataagttttatttctttctgatgtttcagctaacactgagttaacagaagctaaataataataaaatgaagaacagatagtaaatatattgaaattgtcattcctggccgggtgtggtggcttacgcctataatcccagcactttgggaggccaaggcaggcagatcacgaggtcaggagatcgaggccatcctggccaacatggtgaaaccctgtctccactaaaaatacaaaaattagctgggtatggtgacgcatgcctataatcccagctactcgggagactgaggcataagaatcacttgaacccaggaggtcgcgccgctgcactccagcccggtgacagagcaagactccgtctcaaaaaaaaaaa

SEQ ID NO: 40723 - DNA, 340 bp, Homo sapiens
gttgcagtgagccaagatcgcaccactgcactccagcccgggcgacagagcgaaactctgtcttggggaaaaaaaaaaaaaaggatgacattttaatatttcttatgcatttgtctcttccacaagtggaaagacaaagtatagaacaagacatccacacttttcaagaaaaatgggagagagcctatttttttttgtggaagtaaagaatgttcctacatgttgaatatgcaaagtctgtctgtgttgaaagagcataccctaagacactattatgaaacaaaccatagcaagaaccacgatggatatacagaaaagatgcgtgacaaaaaacttaaca

SEQ ID NO: 40724 - DNA, 465 bp, Homo sapiens
gagctatctccactgcccctgcctcttcagaacccgcatcgtggttttccggggtcactccagcagcttcccacaggtctcccggtgtctgcacttgctccctgcagtctgttgtaacacaaaggcagaaaaatcttattaaaagacaagccaagtcaagccatgtctctcctcttgtcacagaggagtgacaagccatgtcactcctctgctcaaaacccctcattcactccctgctcttctcagaataaaagcctacgtccttcaatggcagctaaggtcttccatgacctgctctcatttcctccttggtctcatttcctattactttcacctgtggactcatctctagctgcatttgtctcctttgtttcctcaaacacataggcatgtccccagcctcagtagcctctacctgcctggaatgttcttcctccaggtatctgaggcactgtctccttcacc

SEQ ID NO: 40725 - DNA, 496 bp, Homo sapiens
tgtttttaagctctgttttcaggtgcatatatatttataattgttatgtcttctaggtggattaagccttttgtcattctttgcctttatgtatgctgttctctttcccaggaatgtctggagtatctttttatttctaccctggaccctgctgatattttacccattctcccaacatacatcttaaatagtgtttattttgaggtagttctcagactttctggtagttgtgattactctcgctacagattttgtatagctctgttatgaaatttatgcttttgtctttctacccctaattaaagggattgtttcatctttgtacctcattccatgcctagtatggtaggcatttaataaatatttctaacatagaaaaagaattaggtttttttggatggtcctagacaattggtgtaggacaaagggtagaagttaataggaagcgtattttagttccattttttaaagaaaagaaaataacgttttaattact

SEQ ID NO: 40726 - DNA, 317 bp, Homo sapiens
aaaggtcctgtgttttctttttagtagtgtgtgtctgcagagacatcctaatgtagtctaggtgcaggagttgaaggcagcagtatggaaggaagtctttatctataaagatagttgtcagggtatcactactttgttaaatttttttatacttaggatgtgggctttatcctagcagggagagagactgggtcttatatctatacccagcattcattcagtaccccaacttttagtatactaatattacttgggatggatatatgagcccaaatgccaccttagtactttctactgagtgcaagtcatgcacacat

SEQ ID NO: 40727 - DNA, 406 bp, Homo sapiens
ggtcacatggaggttttctggtctagagcacaactgagctccccagaaacaacccagcatcaaatggctggcccatgtgacccagctggcatggacattcccagaccagtctgtccttctgtcaccttagctacagggaaggcccatgaccccagaagtgcccgtcattatgctgaattctctgcctcagtggcccaccgaggtgtgcaagcatgtctcacaagggtcagatggagttctggcctggattgatgtgtagatgctggagagagaagctgggtttcttttggctgggtgctctgctggtatgtggtgggccttgggtttccaggtggtcattttccttatttgcagaaggaatgaggcccatatagagaatagagcaaattaaagggagagaaagaga

SEQ ID NO: 40728 - DNA, 363 bp, Homo sapiens
agacacataccaaaagccaaacaggcctccccaaaacggaggactctgaccagcaggcccatatcccaggaggacctgaaggaccatctggaacagaagggtagagagtcacggtgaagccagagaagctctctccgtgggaatgggaacaaggtgggacttgtgccaggtggtggcatccccggttctatagaatgggcagcactgagatctgcctttttagtggcacagggtgattctggagcctccaagcctcccctgtgtgagcgggtgaggcagggagagcataccccaggcttcctacaggaaagggctgccctcccccgccggctctgacactatcatctactctcctcccagttc

SEQ ID NO: 40729 - DNA, 568 bp, Homo sapiens
ttccttccagttaatttgaccatgagaagaaaactgcgcaaacacaattgccttcagaggagatgtatgcctctccattcacgagtacccttcccctgagatgagatctggctctatcacccaggctaaagtgcagtggcatgatctaggctaactccctggctcaagcgatccttccacctcagcctcccaagtacctgggactacaggcactcacggccacacctgactaatttttgtatttttttgtagagatggagtatcgccatgttgcccagcttcctttgaggaatgaaaatcattgtttgctgtacatttgatcagaagaaaaaagaaaaactgaaattagtgaagtcagtgaagtcttcggtcccgtcctgaatcatttttaccctctgtttagggacaggtctagaacgagtgagcacaaaactgaagagtgtgccgaaaatctcagcaatcaagataacatttgaactccatttttgaaaaaaataaaaactaacacccacgaaaaatacatgatgaataaaacatcaaaattttagataaacacaggatatcagga

SEQ ID NO: 40730 - DNA, 390 bp, Homo sapiens
ttccttccagttaatttgaccatgagaagaaaactgcgcaaacacaattgccttcagaggagatgtatgcctctccattcacgagtacccttcccctgagcttcctttgaggaatgaaaatcattgtttgctgtacatttgatcagaagaaaaaagaaaaactgaaattagtgaagtcagtgaagtcttcggtcccgtcctgaatcatttttaccctctgtttagggacaggtctagaacgagtgagcacaaaactgaagagtgtgccgaaaatctcagcaatcaagataacatttgaactccatttttgaaaaaaataaaaactaacacccacgaaaaatacatgatgaataaaacatcaaaattttagataaacacaggatatcagga

SEQ ID NO: 40731 - DNA, 661 bp, Homo sapiens
gattactcaaaaaagaaactatcctgtctaaatttgaattgtgttgataactaggtgttccccagatgctaagatgttcttaatttgtatttattgaaggattgttagcttagtgccacaaaatttttcttactttatgttaattccagataagaaatttacaagtttatatcttttttttcttttttttaagatgagatctggctctatcacccaggctaaagtgcagtggcatgatctaggctaactccctggctcaagcgatccttccacctcagcctcccaagtacctgggactacaggcactcacggccacacctgactaatttttgtatttttttgtagagatggagtatcgccatgttgcccagcttcctttgaggaatgaaaatcattgtttgctgtacatttgatcagaagaaaaaagaaaaactgaaattagtgaagtcagtgaagtcttcggtcccgtcctgaatcatttttaccctctgtttagggacaggtctagaacgagtgagcacaaaactgaagagtgtgccgaaaatctcagcaatcaagataacatttgaactccatttttgaaaaaaataaaaactaacacccacgaaaaatacatgatgaataaaacatcaaaattttagataaacacaggatatcagga

SEQ ID NO: 40732 - DNA, 294 bp, Homo sapiens
ctctcttgaataagcaaagtgttaactctgagaatgaaggggcaaataaaaaaggacacttgtaagcagaccctccatttgggagaaccttaattacaggttgttagttgcagtggaaacccaggctgggtggccctccagctcattgtcttgccccttttctctctccctgggtgggtctcatgggtcagagatttggccccacccaacccagcagctatgggaagaaccaccttctctgtgaactcacactcattcagccgcttaaacaatgtgtcacccacccccaccctc

SEQ ID NO: 40733 - DNA, 395 bp, Homo sapiens
ctgtgggacagcatcattccaagtgctgggctagggatggaagcaagaggcaaagataaataactaagggtccctaccttcaagtgaatctctctcagtgtctctctctttcctcaaaacagctttgtttggtccccacaaaacacgagatgtcccctgatatggtgacatcatcagggcatcttcccttattagaaacattctggcctatttataccctcaaagtttttcaaactcactggcagttccactcctatatgcaagttttaaaaactggtacaccaatgggttaaaacaatgccactgatgaaacaaggaaatattcaaccgggctttgcaaattccaaacagttttctctgtatacaaataaacccggaagcatagattggaacaa

SEQ ID NO: 40734 - DNA, 369 bp, Homo sapiens
gtttaggaaaattcctacaaggaaaccctaacccaatatcaataactggaaagacagacaaaaaggactggggccgggtgcggtggctcatgatccacctgccttggccacccaaagttctgggattacaagtgtgagccaccacgcccgaccattgactaccaatttttaactgcacattttaaataaaataatatgccaacattgtaaatcaaatacccctccccttttgcttttgttatttctacttcttggttttgtttttgttgttgtttgcttttagtttctttcatggactaattttgtatagtttgtgtttttggtcatgagtaactactaaagtatttactgggatggtttggtgtcagc

SEQ ID NO: 40735 - DNA, 264 bp, Homo sapiens
tgtttaaactgtatatataaagtgtcttaaggtggagtgggtaattgattgactactggtataattttagagtcaccaaagagcacatcaaccttaatatactttcccacaaccccagtcacttccatattatgtgacctttattacaagaaaggaatactataggctaaaatttcttgtagatacatgcaaaaatgctcagcaaaatattaacaaatgaagccagcaacatacataaagaatgacaaaatggagtgtattcta

SEQ ID NO: 40736 - DNA, 449 bp, Homo sapiens
tcacaggaagaggcttggtggctacagaaagacagaaagatgcctgacctgcttccagctgcttcagcccccccactgtcccatctccagacacgtcaaactgcaactggatgacagacattaagctggaactttgcagaacaaattccatgaataataggacttggtccaggctcctaaccatctttcatccttgggtgtatccatcggcctaggaacacctaacaccacgtgatgtttaatcctacagcaaaccatcgacactttcagcttgaatgatcatgtatcacttagttttcaagtttaattcaagtgcatctacctcttctccactgttgacaccagaaaactcccttccatatgcccttgtggaactcactatacttcgttcaacaaacgttcagtgactacctgctatgtgtccagaataaattaagaatacagttaaa

SEQ ID NO: 40737 - DNA, 443 bp, Homo sapiens
catcttgaagcttttgggcttcaatgtaaacagttcagctaatctgggtctgccaagttatatcaaagcccaaagtagtccatgcagagagatcacaggaagaggcttggtggctacagaaagacagaaagatgcctgacctgcttccagctgcttcagcccccccactgtcccatctccagacacgtcaaactgcaactggatgacagacattaagctggaactttgcaggcaagccctttcttagcctgacccatggagaatgtgagagatgataaaattattaggattgttttggagtaatttgttgtgtagcaagaggtaactggaatacacctatttccaggaatttggcaatttctcctccctttaggtgcactgtttgatctgtgctaggcaatcctttccagttgtctcaggaacagacataactggctgcatct

SEQ ID NO: 40738 - DNA, 437 bp, Homo sapiens
tgcggtgggggtctccagggagacgtgcagcaggcccccttggagggtgacagcactatagttgagataagaaataatgcaattctccaggcagagctgcagtcttctagcccatataaatgattcctttagtgattttgccaaggattgtgttatgtgtgcttggggaaccaacatagcctgagaaaccgtcaatatttctggagaagggcaagtgtaatcagtcaagcattccagaaaaaatgtagtcaatgattttaacagcaagtggttttgactatgaaaagattcaactatgggatttttttgtttttttctttttccccaagaatcactctgagcaatttcttaaagaattaaaatgaaatgtttctcgggtaacaaatcacccagtcttacagcttggagctttatcactctccagctaatgggtctga

SEQ ID NO: 40739 - DNA, 327 bp, Homo sapiens
tgatgtgaggagctgcagactgcaggacaaagggttcagtaaagacttcattcaaaatttgtaacatggaaatcaaatgtgaacaacagaccccaaaaccatctgttcttgccagagccaagacggactccatggccagctgccagaattgtcctgggttgttctatacacactaggggagggagccacgtttccttctaacaaaaggccattatgcaaagggctgcctaatgaaatcgtccttttgatgtattctctttaactagagtaatgtaataaaatgataatgataatcttctggtttatgattattctgaattaacacca

SEQ ID NO: 40740 - DNA, 285 bp, Homo sapiens
ctgtgacacacacagatatatatatatgtgtgtgtatatatatatatacacacacacacaaacaaatgtacacacagtactactacatttattttagccatttcttcacttgtactgaggaagaacaatgtagtctctaggttcaagaacagaagcaaagcccctgtcagtctatggtcctcagattatccactggagtcagtaaactaattgctaattattactgagcccaaaactccaaaatgttgtcaaaaaataggcacataatatgtagacaataagtgg

SEQ ID NO: 40741 - DNA, 633 bp, Homo sapiens
ggaaattcttattttgatagcatttttataccccctatgcaaaactgaaaatgctagacaatgaaagaaatgtgtaaactgttgaatacaaggagccaggcattcataatagagccagctgatgctttgagagaagaaaaaacctcatgtctcctcttctcacctctccctcttttcttccaacattttattacgaaaatttttaaatatacagagaagttggtagaactgtacagggaacgccaatttgccctccacccagagtctgtaattactaacattttgccacatttcctttatcgcctctctgtacaatcatctgtccatctcagtttttatgtatttcagaataagttacagatgttagtacatttcaacaataggttacttttatttccactgttaattaggcttagtctgaagggtgtggaatattttcatttcctgaatggaataaaaggtgggagttaaaagcagatgggaacaagcagaatgatataatgtaattaaggcctggcttaaaaaaatatgtgtgcctgtgtatgcacacacacacattgtaaattttgtgtacatgcacataaaatatatatacacatgcgtgtgtgtggatatgtatgcatatctatatgt

SEQ ID NO: 40742 - DNA, 364 bp, Homo sapiens
gcgatccttgcccaaggtcacacagctagttagaagagagctcatctcctggttccaaatcctatgttcttttgataaaaacgtaatgcttcgtattatttaaaatataaggtttggccaaataagttgaagattagcttttccctcttgagtcagaggaaaataataaatctatttctgcagtattcttctattggcctgagctagcatttctgaaagtatgttgttccactgaatactatttttaaaatcagccaggcacagtggctcattcctgtaatcctagcactttgggaagccaaggtgggaggatcagttgagtccaggagtctgagaccagcctggtcaacataaggtgacccct

SEQ ID NO: 40743 - DNA, 369 bp, Homo sapiens
gcaatattatatctatgttatctcctttaactattatatcatttcctagtcccctaggcctgaaaactaccttattcttcaagaatcaccttactttccagcttttcgcacccaaagtcagccgaagcgtttcctgtgtgtgcactgtagcacctcatagttgttgctattctgactttattcggcattatatctccactaaactgggttctctttgatggcagtgtcgctagtgttgttattctggtatctcaaggcctctcttcacttgaatctatcacaatattttagaatatttagttgctgaaaatgatgtttaggtgaactcagtcctacaactatgaatcatatcttttgttttagctacca

SEQ ID NO: 40744 - DNA, 690 bp, Homo sapiens
ccgaacattattagatgttcctgtgggtaagtctctttcttaaccttactcttaatgaatgtcaggatatttgagttctagggattccatttgcagcataatagaatctgcaatcagaaaagcaggttttgaagtccaggtacaaaacctggagagttgcaggaatgaacttggatgaactacataccctgccagtgtcaatgggtaattcacacagaggcagctgtgagaggcaacaatgtatgtgaaggccctctgtgatctctctgcccctgggtttttgcctctgaactaagacagtactagatggatgggtccttaactcttcattcccatcttcaacattctatgactctgactctaagggtggaaattcaagtatcaaggacaagctgccagtagccgagcacagtggtatgtgcctgtagtcccagatactagggaggccaagaaaggaggatctcttgagctcaggagttcgagaccagcctgagaaaaatagacccttgtctcaaatataaaataataataaaaaaagaacaagctgctggggaagcaatttctgggcccggggctttaataaacattgcagaactggctaggcgcagtgacttacgcctgtagtcccagctctttgggagactgacgcaggtgaattgcttgaacccaggagctcgagaccagcctggg

SEQ ID NO: 40745 - DNA, 353 bp, Homo sapiens
actggagatatttctgaacaccagaacctttggttcaggaattgccaactcaactccttaggtatgcacagactgggatccaagcaggttctaccttctctttcagtcttcctgtctacctgcagcttaccaatataataccttctacaagcacatggatgatctgccaatatataatgtaaaaattattttaaaatgtactcctcacacttagtttcccggtctgcgaaatgatgtcagtcctcagatgtgaatatatatacatacaagtacacacatcatgggactgtgggtgcaaagagtcaaacctcagccaaggccggacacagtggctcacacctgtaatcccagca

SEQ ID NO: 40746 - DNA, 362 bp, Homo sapiens
cagacaccgagtgactgatgggagcatcatctgtaggactgctggggcaggtacggctgccccacttccctcccccaaccctccactgtgccactttagcttcccccctaggccgaagccagagagatctttccagtgaaaactcttggtttgatgggtacagacatgcagttaaatagaaggtacaagttctaatgctggacagcagagtagggcgattgtagctagcaacaatgtattgtatatttcaaattagctagaagagaggacttgaattattcccaacatggagaaatgataaatactcaaggtgatagatgccccaaataccctgacctgatcattccacattctatgcatgt

SEQ ID NO: 40747 - DNA, 428 bp, Homo sapiens
ttgcataaataataccgggagtgtcatgacataaaacaatgaagatttattacaaatttctctcatggattggaataataagacgagccaaactagtacaagttcctcctttggtagtgttattaaattggtaaactggaagaattagatagagtgtttcttgatttttagcagagcatatgatatccttgtgggcaagatgaaggagtatgatatagtctggtagatttatagttagtgtaactaccaactgtccctcaaaaatgctgaataatatcaaggtggacagaagtcttgagttgcacacttagatgttggccttgcactgcctttctgaacatttaatcgggaaatagaataaagatctggatggtgtgtgtttgtgtgtgagtgtgtgtataaaacaaaagaaagagaaaaaaaaaaaa

SEQ ID NO: 40748 - DNA, 543 bp, Homo sapiens
tttcttttttctactactagattaaacttggttcctgtgaatgtaaatgtaattttgtgaacatttaatgaggatctactttatgtcaagtgctctgcatagtgctgtctctaagctataaaatgaaccaagcatcattaaatgaaacctaacttatgtccttgaagctaattttcatttgagtaaaatttaagaatagtgaagacaacattgttgtggcttagcaaagccgtctggagatttcttattggtggctggaggtgctgcaggctctgtcttggttcttatggatggccgtatgcccctcagtttctatcctggtggttttctgtatttggggttcaatcaatatttgtcaaacctaattttgctttaaaaactgactacacacacgcacacacaaagtgatggaacattgaacttcaaatgtagcaggtggtctgtttgagtcagtgtgcttcttagtacgcaaaaatagatttgaattcagaaatctgtgtgccagttgttatgaaatttgcaattgagcaaatcaaggttcat

SEQ ID NO: 40749 - DNA, 1378 bp, Homo sapiens
cacacaagactcagtaggccctgactgatgtctcttacatgaatgtgactggtgcccccaggaggcagtcaccgtgctgtctctgccccacattgtccttatgtatgtttacatggatgtctccccagcagcttgaaccctggagagcaagaataatctgattttcctgggggccagcacccaaataagcctggcatgcagtggcctcaataaaatgtgactgtattgagtcattttctagggccccagatcccctggtgtcatggacttagtctttgccagcattctgtccatgtgttctctggtcttctctcacaatgctgcatccctgtcccatttttagggtccctgtctatcactggatgctgcagcttctgttcattactgttagtgtatcattcttcatgcctctgtttctgtgatggtctcatcatatgtgaaccatttgacctggcgtattgtgtactagtcaccgtcaccatctctccatatgtatctccctgtatttcgggcccattccctctatgtcaagagtaaatagaggcacagagactgatgagaaacgttcataacatgaaggtaagactcagggagacagagactttgtggaagtatctctgagggagtcccagacacaggcagagagggccacatatcgtgtgccagaggctgagagactgagagggatgacaggcttaggggaaaactcagagaggagagatgcacattcctagtgaaattgcacaggcttccagcatgctggagggaacagaaaaggcatgggcctgaattcaggctgcagagcctgactcctccctgtggctacttttgggacctaagataagtgactttcctgaacctccatgacctcctcatatgtaaaccagggacaggacccaccttgtgtagtgcctgacccaaagcctggccctgcacactgtctctgactcacagcaatcatcagcacctctctttgcctcctacttgctcagtctctgtcacaagaactggatctccatccccttgatgctctgagcatcttcacccatttggtcgttgagacatatctgtccatgtctgtctaaaaggggaggagatgagggagaaaaaagggaatctactcagagcctgtgtgtgctgcccagtctaccaaataatttatatacatctcagtcctcacacaaccatccctgttttatagaggaggaagtggcttagagaatgtaactgaccaaagtcacactgccaggaactggaagcactaggatttgacagcatatccaaatatgtcagcaatttcaataaacatgactgtactcaacaaaaaaaaacacaaaacaaaaacaccagaacaagacaaaaaacaagaaaggggcgc

SEQ ID NO: 40750 - DNA, 4936 bp, Homo sapiens
  misc_feature (3117)..(3117): n is a, c, g, or t
cacgggcggacactcggccgggcagccgcgggccgagcgcagcgcctccgccaccgatgcgcctggtggccagactccaagtgggaccggcggacacgcagcctcgcgtgtcaggggaagctgatggagaatcgagctctggatccagggactcgggactcctatggtgccaccagccacctccccaacaagggggccctggcgaaggtcaagaacaacttcaaagacttgatgtccaaactgacggagggccagtatgtgctgtgccggtggacagatggcctgtactacctcgggaagatcaagagggtcagcagctctaagcaaagctgcctcgtgactttcgaagataattccaaatactgggtcctatggaaggacatacagcatgccggtgttccaggagaggagcccaagtgcaacatctgcctagggaagacatcagggccgctgaatgagatcctcatctgcgggaagtgtggcctgggttaccaccagcagtgccacatccccatagcgggcagtgctgaccagcccctgctcacaccttggttctgccgacgctgcatcttcgcactggctgtgcggaaaggcggcgcgctgaagaagggcgccatcgccaggacgctgcaggccgtgaagatggtgctgtcctaccagcccgaggagctcgagtgggactcgccccatcgcaccaaccagcagcaatgctactgctactgcggcgggcccggagaatggtacctgcggatgctgcaatgttaccggtgcaggcagtggttccacgaggcctgcacccagtgcctcaatgagcccatgatgtttggagaccggttttacctgttcttctgctccgtgtgtaaccagggcccagagtacatcgagaggctgcccctgcgatgggtggatgtggttcacctggccctctataatctgggggtacagagcaagaagaagtactttgactttgaggagattctggcctttgtcaaccaccactgggagctcctgcagcttggcaagctcaccagcaccccagtgacagatcgaggaccacatctcctcaacgctctgaacagttataaaagccggttcctctgcggcaaggagatcaagaagaagaagtgcatcttccgcctgcgcatccgcgtcccacccaacccgccagggaagctgctgcctgacaaaggactgctgccaaatgagaacagcgcctcctctgagctgcgtaagagaggaaagagcaagcctggtttgttgcctcacgaattccagcagcagaaaaggcgagtttatagaagaaaaagatcaaagtttttgctggaagatgctattcccagtagtgacttcacctcagcctggagcaccaaccaccacctggctagcatatttgacttcacgctggatgaaattcaaagtttaaaaagtgccagctcaggccagaccttcttctcagatgtcgactccaccgacgctgccagcacctctggctctgcctccaccagcctctcctatgactccagatggacagtgggcagccgaaagaggaagctggcagccaaggcatacatgcccctgcgggcaaagcggtgggcagctgagctggatggacgctgcccctcggacagcagtgcagagggggcttcagtccccgagcggccagacgaaggcattgacagccacacatttgagagcatcagtgaagatgactcatccctgtcccacctcaagtcatctatcaccaactactttggtgcagctgggcggttggcctgtggggagaagtaccaggtgttggctcggagggtcacacctgagggcaaggttcagtacctggtggagtgggaagggaccaccccttactgactagcccccgggggtgccaggggtcctgaaaaccaaaggaggagcagcagaagccataggctccccagctttctccaggctggggtgggagaaggaagcaggacagagctgcaagtgcctggcagaatgccctgcctgcctgcctgccaggccaaggcctgcgtctctctgctgtaccagctctgttccagggcctcctcaggctcgttacccctgtgcctgtgtctctacacactccacaccccctcaaactctgtttatctgttctctgaccttgtgtcccctgcgctgggacccttcctcctgaggcccaggtctttgtccccagttgtgtgccttgacctctctcgcccctttctgggtgtgttcgcacatcctgtgtgtgcacagctgtccctccactggatccccttcacacgtgacccgtggggcagccagtcctcccagggactacataacaggcacctttgagagagcatgggagaaggtggataagaggatgctgctcagtgcttttctcttccactttcctgccactccccactaccctcggagagaggtggtgggatgggagagagcccctgtgaaagcctgtgaggatctgaagagtaaagggctgggtctgcctcagaaggcaccagcaccagggcccaggtattaaggctgagagtgaaggctgccaatgtcagctttggaggtcccagaagtcttctgttctctggcctcaccccctcagtcgccatagagctgggcctggccttgctggaatggaggcatccttccaaacctgggggacgggggtggggggtggtagtggtgggagggaaaccatgtcttgctaaacctgtttctggtgcctcccatccccagacccaccagacaccacacagcagacaatacacacccactcgcacaagcttccatccacatgtgttgtactttcagctctaggcatgcagacaaccccacacggccacaccaccacatgcccaagtgtacacacacagagccacaccgtccctctgggcctgctggctcctcccttggctttcccttggcccacttccagggcccaggtgctgcaactaaatgtgaaagctcagtggccgctccttctttcagcccatcaaccagcattggtcccatagggaagcacaggggactcaccctctttcatatcccttgccctgccctgaaatggacaatcactttttgggataggttgaaatttttaaagagcctgcatcattnggttccctcaaagggaagcccttgccagtgggggtttgaaagagaatttttggaaccaacattcaaattctgcctcatctggagggaaaccaaaattgggagggggaagaggacccctgatgttttgctgcttccagagatattagaaactgactcacttgattggaaaatggacaaaagtgccttgacgtggagggtgggcaccagatggggaccagccttgccaactgctgctgtggcctccagcttggctggttttgcaggccgccagcaggaaggcgaaggtggtagtacagcaagaggcactggcggggcagcaggcctgcaggagctgtttttccattgctaggcctgacccctctctacctgtgagcgttcagggggtccctgagatagtttagatgcccccccatcttagacctcagctcccacagtgccttttaagggggacctcacctcctgtgcacagcccacccactttcctctgcttccctggcacagcccaggcatagacgagctggcgttggacccagttcttcccccttttcagccccacagctgctgccacaggggccaactagggccaggtggaaggggagctgagaagccaacccctagcccaggggtgctgtgggaactgggatccaatttgtagcttcctgcctggcttcagagagcccagcaaccttctaggcctgctttccagacttctgagatagcctgggatgagcaatcctgttacagtacatctggaccttccctacctgggctctggggaggctgtgggcctggagagggaaaaggagggagggggtgtctgcaccacctgggaagatagcacaaggcctaatgaggtcaccctgactccccaccccagcatttcattcataccagataatagctgcattactgccaactgaccttataaccctctgcaccttcaaaaagattcatggtttttaattgctgcttttaataacatttgttaaagttataattaatgtgtctgatttatgatttaaaacctccctttgaacaatcacttgtcttccctatagtgaattagctgctgggtggcagaaggaattggctctggcttttgcacttggtttactggaggctgaggaggaatggcaggaccctgtcctctggccaccttgccactcctaccactgccagcaacattctcacccttactgccagagagaatatggaatcttttgtgagtacccgacctttgggggcaaaaaacattagttgagtgccactgagaggtaaaagatggaaaatgaacttagaaattgacactattataatacttagatccgggcatcgtaaaactttatcagtacatcatcacacaattctagaaatatgaaatgagttctagacctgactctgctagttctaacctgtgccactttagtcagattcctttccttcagttttatcacccttcaaatggcagtgataatcccagcacatctgctccccatgtgttgggagagactttgctgtgtgtgactgattattacttcaaaataaacctctaaatttagggcagtttggagaggaaaaaaacaggagatgtaaaggggtaggaaaaaggtcatctatagagaggtaaaggccatggattccactgaattctacagtttgaggggtaaagtgtaacctgtaatcccgaatgaaggactcagtggtgttaatatctgcccttaaacgtcttcattcactatggctcccacttctttctaccactccatcagcttcaaccttttatctgtcctcagaataaaaccacaatgggacttggggg

SEQ ID NO: 40751 - DNA, 3773 bp, Homo sapiens
  misc_feature (1954)..(1954): n is a, c, g, or t
caccatgctgtttgatgcttgctcatctttgctcgtattgctccctctgcctgagataccctttgccttgccctagcccatctgttcttggactttgaagggtggctgggtaggaaacagacaggtgtggtggtgggaagctcagctgtgggaagacgggcctccactgggatgaaggatgcatgttaggggaacctgcgggccaggttggcaggaacttgctgggccgggccaccagcaggctcacggtcttgcccctctcagtgccagctcaggccagaccttcttctcagatgtcgactccaccgacgctgccagcacctctggctctgcctccaccagcctctcctatgactccagatggacagtgggcagccgaaagaggaagctggcagccaaggcatacatgcccctgcgggcaaagcggtgggcagctgagctggatggacgctgcccctcggacagcagtgcagagggggcttcagtccccgagcggccagacgaaggcattgacagccacacatttgagagcatcagtgaagatgactcatccctgtcccacctcaagtcatctatcaccaactactttggtgcagctgggcggttggcctgtggggagaagtaccaggtgttggctcggagggtcacacctgagggcaaggttcagtacctggtggagtgggaagggaccaccccttactgactagcccccgggggtgccaggggtcctgaaaaccaaaggaggagcagcagaagccataggctccccagctttctccaggctggggtgggagaaggaagcaggacagagctgcaagtgcctggcagaatgccctgcctgcctgcctgccaggccaaggcctgcgtctctctgctgtaccagctctgttccagggcctcctcaggctcgttacccctgtgcctgtgtctctacacactccacaccccctcaaactctgtttatctgttctctgaccttgtgtcccctgcgctgggacccttcctcctgaggcccaggtctttgtccccagttgtgtgccttgacctctctcgcccctttctgggtgtgttcgcacatcctgtgtgtgcacagctgtccctccactggatccccttcacacgtgacccgtggggcagccagtcctcccagggactacataacaggcacctttgagagagcatgggagaaggtggataagaggatgctgctcagtgcttttctcttccactttcctgccactccccactaccctcggagagaggtggtgggatgggagagagcccctgtgaaagcctgtgaggatctgaagagtaaagggctgggtctgcctcagaaggcaccagcaccagggcccaggtattaaggctgagagtgaaggctgccaatgtcagctttggaggtcccagaagtcttctgttctctggcctcaccccctcagtcgccatagagctgggcctggccttgctggaatggaggcatccttccaaacctgggggacgggggtggggggtggtagtggtgggagggaaaccatgtcttgctaaacctgtttctggtgcctcccatccccagacccaccagacaccacacagcagacaatacacacccactcgcacaagcttccatccacatgtgttgtactttcagctctaggcatgcagacaaccccacacggccacaccaccacatgcccaagtgtacacacacagagccacaccgtccctctgggcctgctggctcctcccttggctttcccttggcccacttccagggcccaggtgctgcaactaaatgtgaaagctcagtggccgctccttctttcagcccatcaaccagcattggtcccatagggaagcacaggggactcaccctctttcatatcccttgccctgccctgaaatggacaatcactttttgggataggttgaaatttttaaagagcctgcatcattnggttccctcaaagggaagcccttgccagtgggggtttgaaagagaatttttggaaccaacattcaaattctgcctcatctggagggaaaccaaaattgggagggggaagaggacccctgatgttttgctgcttccagagatattagaaactgactcacttgattggaaaatggacaaaagtgccttgacgtggagggtgggcaccagatggggaccagccttgccaactgctgctgtggcctccagcttggctggttttgcaggccgccagcaggaaggcgaaggtggtagtacagcaagaggcactggcggggcagcaggcctgcaggagctgtttttccattgctaggcctgacccctctctacctgtgagcgttcagggggtccctgagatagtttagatgcccccccatcttagacctcagctcccacagtgccttttaagggggacctcacctcctgtgcacagcccacccactttcctctgcttccctggcacagcccaggcatagacgagctggcgttggacccagttcttcccccttttcagccccacagctgctgccacaggggccaactagggccaggtggaaggggagctgagaagccaacccctagcccaggggtgctgtgggaactgggatccaatttgtagcttcctgcctggcttcagagagcccagcaaccttctaggcctgctttccagacttctgagatagcctgggatgagcaatcctgttacagtacatctggaccttccctacctgggctctggggaggctgtgggcctggagagggaaaaggagggagggggtgtctgcaccacctgggaagatagcacaaggcctaatgaggtcaccctgactccccaccccagcatttcattcataccagataatagctgcattactgccaactgaccttataaccctctgcaccttcaaaaagattcatggtttttaattgctgcttttaataacatttgttaaagttataattaatgtgtctgatttatgatttaaaacctccctttgaacaatcacttgtcttccctatagtgaattagctgctgggtggcagaaggaattggctctggcttttgcacttggtttactggaggctgaggaggaatggcaggaccctgtcctctggccaccttgccactcctaccactgccagcaacattctcacccttactgccagagagaatatggaatcttttgtgagtacccgacctttgggggcaaaaaacattagttgagtgccactgagaggtaaaagatggaaaatgaacttagaaattgacactattataatacttagatccgggcatcgtaaaactttatcagtacatcatcacacaattctagaaatatgaaatgagttctagacctgactctgctagttctaacctgtgccactttagtcagattcctttccttcagttttatcacccttcaaatggcagtgataatcccagcacatctgctccccatgtgttgggagagactttgctgtgtgtgactgattattacttcaaaataaacctctaaatttagggcagtttggagaggaaaaaaacaggagatgtaaaggggtaggaaaaaggtcatctatagagaggtaaaggccatggattccactgaattctacagtttgaggggtaaagtgtaacctgtaatcccgaatgaaggactcagtggtgttaatatctgcccttaaacgtcttcattcactatggctcccacttctttctaccactccatcagcttcaaccttttatctgtcctcagaataaaaccacaatgggacttggggg

SEQ ID NO: 40752 - DNA, 4767 bp, Homo sapiens
  misc_feature (3117)..(3117): n is a, c, g, or t
cacgggcggacactcggccgggcagccgcgggccgagcgcagcgcctccgccaccgatgcgcctggtggccagactccaagtgggaccggcggacacgcagcctcgcgtgtcaggggaagctgatggagaatcgagctctggatccagggactcgggactcctatggtgccaccagccacctccccaacaagggggccctggcgaaggtcaagaacaacttcaaagacttgatgtccaaactgacggagggccagtatgtgctgtgccggtggacagatggcctgtactacctcgggaagatcaagagggtcagcagctctaagcaaagctgcctcgtgactttcgaagataattccaaatactgggtcctatggaaggacatacagcatgccggtgttccaggagaggagcccaagtgcaacatctgcctagggaagacatcagggccgctgaatgagatcctcatctgcgggaagtgtggcctgggttaccaccagcagtgccacatccccatagcgggcagtgctgaccagcccctgctcacaccttggttctgccgacgctgcatcttcgcactggctgtgcggaaaggcggcgcgctgaagaagggcgccatcgccaggacgctgcaggccgtgaagatggtgctgtcctaccagcccgaggagctcgagtgggactcgccccatcgcaccaaccagcagcaatgctactgctactgcggcgggcccggagaatggtacctgcggatgctgcaatgttaccggtgcaggcagtggttccacgaggcctgcacccagtgcctcaatgagcccatgatgtttggagaccggttttacctgttcttctgctccgtgtgtaaccagggcccagagtacatcgagaggctgcccctgcgatgggtggatgtggttcacctggccctctataatctgggggtacagagcaagaagaagtactttgactttgaggagattctggcctttgtcaaccaccactgggagctcctgcagcttggcaagctcaccagcaccccagtgacagatcgaggaccacatctcctcaacgctctgaacagttataaaagccggttcctctgcggcaaggagatcaagaagaagaagtgcatcttccgcctgcgcatccgcgtcccacccaacccgccagggaagctgctgcctgacaaaggactgctgccaaatgagaacagcgcctcctctgagctgcgtaagagaggaaagagcaagcctggtttgttgcctcacgaattccagcagcagaaaaggcgagtttatagaagaaaaagatcaaagtttttgctggaagatgctattcccagtagtgacttcacctcagcctggagcaccaaccaccacctggctagcatatttgacttcacgctggatgaaattcaaagtttaaaaagtgccagctcaggccagaccttcttctcagatgtcgactccaccgacgctgccagcacctctggctctgcctccaccagcctctcctatgactccagatggacagtgggcagccgaaagaggaagctggcagccaaggcatacatgcccctgcgggcaaagcggtgggcagctgagctggatggacgctgcccctcggacagcagtgcagagggggcttcagtccccgagcggccagacgaaggcattgacagccacacatttgagagcatcagtgaagatgactcatccctgtcccacctcaagtcatctatcaccaactactttggtgcagctgggcggttggcctgtggggagaagtaccaggtgttggctcggagggtcacacctgagggcaaggttcagtacctggtggagtgggaagggaccaccccttactgactagcccccgggggtgccaggggtcctgaaaaccaaaggaggagcagcagaagccataggctccccagctttctccaggctggggtgggagaaggaagcaggacagagctgcaagtgcctggcagaatgccctgcctgcctgcctgccaggccaaggcctgcgtctctctgctgtaccagctctgttccagggcctcctcaggctcgttacccctgtgcctgtgtctctacacactccacaccccctcaaactctgtttatctgttctctgaccttgtgtcccctgcgctgggacccttcctcctgaggcccaggtctttgtccccagttgtgtgccttgacctctctcgcccctttctgggtgtgttcgcacatcctgtgtgtgcacagctgtccctccactggatccccttcacacgtgacccgtggggcagccagtcctcccagggactacataacaggcacctttgagagagcatgggagaaggtggataagaggatgctgctcagtgcttttctcttccactttcctgccactccccactaccctcggagagaggtggtgggatgggagagagcccctgtgaaagcctgtgaggatctgaagagtaaagggctgggtctgcctcagaaggcaccagcaccagggcccaggtattaaggctgagagtgaaggctgccaatgtcagctttggaggtcccagaagtcttctgttctctggcctcaccccctcagtcgccatagagctgggcctggccttgctggaatggaggcatccttccaaacctgggggacgggggtggggggtggtagtggtgggagggaaaccatgtcttgctaaacctgtttctggtgcctcccatccccagacccaccagacaccacacagcagacaatacacacccactcgcacaagcttccatccacatgtgttgtactttcagctctaggcatgcagacaaccccacacggccacaccaccacatgcccaagtgtacacacacagagccacaccgtccctctgggcctgctggctcctcccttggctttcccttggcccacttccagggcccaggtgctgcaactaaatgtgaaagctcagtggccgctccttctttcagcccatcaaccagcattggtcccatagggaagcacaggggactcaccctctttcatatcccttgccctgccctgaaatggacaatcactttttgggataggttgaaatttttaaagagcctgcatcattnggttccctcaaagggaagcccttgccagtgggggtttgaaagagaatttttggaaccaacattcaaattctgcctcatctggagggaaaccaaaattgggagggggaagaggacccctgatgttttgctgcttccagagatattagaaactgactcacttgattggaaaatggacaaaagtgccttgacgtggagggtgggcaccagatggggaccagccttgccaactgctgctgtggcctccagcttggctggttttgcaggccgccagcaggaaggcgaaggtggtagtacagcaagaggcactggcggggcagcaggcctgcaggagctgtttttccattgctaggcctgacccctctctacctgtgagcgttcagggggtccctgagatagtttagatgcccccccatcttagacctcagctcccacagtgcgccaacccctagcccaggggtgctgtgggaactgggatccaatttgtagcttcctgcctggcttcagagagcccagcaaccttctaggcctgctttccagacttctgagatagcctgggatgagcaatcctgttacagtacatctggaccttccctacctgggctctggggaggctgtgggcctggagagggaaaaggagggagggggtgtctgcaccacctgggaagatagcacaaggcctaatgaggtcaccctgactccccaccccagcatttcattcataccagataatagctgcattactgccaactgaccttataaccctctgcaccttcaaaaagattcatggtttttaattgctgcttttaataacatttgttaaagttataattaatgtgtctgatttatgatttaaaacctccctttgaacaatcacttgtcttccctatagtgaattagctgctgggtggcagaaggaattggctctggcttttgcacttggtttactggaggctgaggaggaatggcaggaccctgtcctctggccaccttgccactcctaccactgccagcaacattctcacccttactgccagagagaatatggaatcttttgtgagtacccgacctttgggggcaaaaaacattagttgagtgccactgagaggtaaaagatggaaaatgaacttagaaattgacactattataatacttagatccgggcatcgtaaaactttatcagtacatcatcacacaattctagaaatatgaaatgagttctagacctgactctgctagttctaacctgtgccactttagtcagattcctttccttcagttttatcacccttcaaatggcagtgataatcccagcacatctgctccccatgtgttgggagagactttgctgtgtgtgactgattattacttcaaaataaacctctaaatttagggcagtttggagaggaaaaaaacaggagatgtaaaggggtaggaaaaaggtcatctatagagaggtaaaggccatggattccactgaattctacagtttgaggggtaaagtgtaacctgtaatcccgaatgaaggactcagtggtgttaatatctgcccttaaacgtcttcattcactatggctcccacttctttctaccactccatcagcttcaaccttttatctgtcctcagaataaaaccacaatgggacttggggg

SEQ ID NO: 40753 - DNA, 2786 bp, Homo sapiens
  misc_feature (2680)..(2681): n is a, c, g, or t
  misc_feature (2683)..(2683): n is a, c, g, or t
  misc_feature (2706)..(2706): n is a, c, g, or t
  misc_feature (2718)..(2718): n is a, c, g, or t
cacgggcggacactcggccgggcagccgcgggccgagcgcagcgcctccgccaccgatgcgcctggtggccagactccaagtgggaccggcggacacgcagcctcgcgtgtcaggggaagctgatggagaatcgagctctggatccagggactcgggactcctatggtgccaccagccacctccccaacaagggggccctggcgaaggtcaagaacaacttcaaagacttgatgtccaaactgacggagggccagtatgtgctgtgccggtggacagatggcctgtactacctcgggaagatcaagagggtcagcagctctaagcaaagctgcctcgtgactttcgaagataattccaaatactgggtcctatggaaggacatacagcatgccggtgttccaggagaggagcccaagtgcaacatctgcctagggaagacatcagggccgctgaatgagatcctcatctgcgggaagtgtggcctgggttaccaccagcagtgccacatccccatagcgggcagtgctgaccagcccctgctcacaccttggttctgccgacgctgcatcttcgcactggctgtgcggaaaggcggcgcgctgaagaagggcgccatcgccaggacgctgcaggccgtgaagatggtgctgtcctaccagcccgaggagctcgagtgggactcgccccatcgcaccaaccagcagcaatgctactgctactgcggcgggcccggagaatggtacctgcggatgctgcaatgttaccggtgcaggcagtggttccacgaggcctgcacccagtgcctcaatgagcccatgatgtttggagaccggttttacctgttcttctgctccgtgtgtaaccagggcccagagtacatcgagaggctgcccctgcgatgggtggatgtggttcacctggccctctataatctgggggtacagagcaagaagaagtactttgactttgaggagattctggcctttgtcaaccaccactgggagctcctgcagcttggcaagctcaccagcaccccagtgacagatcgaggaccacatctcctcaacgctctgaacagttataaaagccggttcctctgcggcaaggagatcaagaagaagaagtgcatcttccgcctgcgcatccgcgtcccacccaacccgccagggaagctgctgcctgacaaaggactgctgccaaatgagaacagcgcctcctctgagctgcgtaagagaggaaagagcaagcctggtttgttgcctcacgaattccagcagcagaaaaggcgagtttatagaagaaaaagatcaaagtttttgctggaagatgctattcccagtagtgacttcacctcagcctggagcaccaaccaccacctggctagcatatttgacttcacgctggatgaaattcaaagtttaaaaagtgccagctcaggccagaccttcttctcagatgtcgactccaccgacgctgccagcacctctggctctgcctccaccagcctctcctatgactccagatggacagtgggcagccgaaagaggaagctggcagccaaggcatacatgcccctgcgggcaaagcggtgggcagctgagctggatggacgctgcccctcggacagcagtgcagagggggcttcagtccccgagcggccagacgaaggcattgacagccacacatttgagagcatcagtgaagatgactcatccctgtcccacctcaagtcatctatcaccaactactttggtgcagctgggcggttggcctgtggggagaagtaccaggtgttggctcggagggtcacacctgagggcaaggttcagtacctggtggagtgggaagggaccaccccttactgactagcccccgggggtgccaggggtcctgaaaaccaaaggaggagcagcagaagccataggctccccagctttctccaggctggggtgggagaaggaagcaggacagagctgcaagtgcctggcagaatgccctgcctgcctgcctgccaggccaaggcctgcgtctctctgctgtaccagctctgttccagggcctcctcaggctcgttacccctgtgcctgtgtctctacacactccacaccccctcaaactctgtttatctgttctctgaccttgtgtcccctgcgctgggacccttcctcctgaggcccaggtctttgtccccagttgtgtgccttgacctctctcgcccctttctgggtgtgttcgcacatcctgtgtgtgcacagctgtccctccactggatccccttcacacgtgacccgtggggcagccagtcctcccagggactacataacaggcacctttgagagagcatgggagaaggtggataagaggatgctgctcagtgcttttctcttccactttcctgccactccccactaccctcggagagaggtggtgggatgggagagagcccctgtgaaagcctgtgaggatctgaagagtaaagggctgggtctgcctcagaaggcaccagcaccagggcccaggtattaaggctgagagtgaaggctgccaatgtcagctttggaggtcccagaagtcttctgttctctggcctcaccccctcagtcgccatagagctgggcctggccttgctggaatggaggcatccttccaaacctgggggacgggggtggggggtttttnntnttttttttctcttttctttgttnattcctgcttgntgctgtcctcttcgctccccctctatcccttgcttcggttcggctccccgaccacgtctgttgtgctg

SEQ ID NO: 40754 - DNA, 3094 bp, Homo sapiens
cacgggcggacactcggccgggcagccgcgggccgagcgcagcgcctccgccaccgatgcgcctggtggccagactccaagtgggaccggcggacacgcagcctcgcgtgtcaggggaagctgatggagaatcgagctctggatccagggactcgggactcctatggtgccaccagccacctccccaacaagggggccctggcgaaggtcaagaacaacttcaaagacttgatgtccaaactgacggagggccagtatgtgctgtgccggtggacagatggcctgtactacctcgggaagatcaagagggtcagcagctctaagcaaagctgcctcgtgactttcgaagataattccaaatactgggtcctatggaaggacatacagcatgccggtgttccaggagaggagcccaagtgcaacatctgcctagggaagacatcagggccgctgaatgagatcctcatctgcgggaagtgtggcctgggttaccaccagcagtgccacatccccatagcgggcagtgctgaccagcccctgctcacaccttggttctgccgacgctgcatcttcgcactggctgtgcggaaaggcggcgcgctgaagaagggcgccatcgccaggacgctgcaggccgtgaagatggtgctgtcctaccagcccgaggagctcgagtgggactcgccccatcgcaccaaccagcagcaatgctactgctactgcggcgggcccggagaatggtacctgcggatgctgcaatgttaccggtgcaggcagtggttccacgaggcctgcacccagtgcctcaatgagcccatgatgtttggagaccggttttacctgttcttctgctccgtgtgtaaccagggcccagagtacatcgagaggctgcccctgcgatgggtggatgtggttcacctggccctctataatctgggggtacagagcaagaagaagtactttgactttgaggagattctggcctttgtcaaccaccactgggagctcctgcagcttggcaagctcaccagcaccccagtgacagatcgaggaccacatctcctcaacgctctgaacagttataaaagccggttcctctgcggcaaggagatcaagaagaagaagtgcatcttccgcctgcgcatccgcgtcccacccaacccgccagggaagctgctgcctgacaaaggactgctgccaaatgagaacagcgcctcctctgagctgcgtaagagaggaaagagcaagcctggtttgttgcctcacgaattccagcagcagaaaaggcgagtttatagaagaaaaagatcaaagtttttgctggaagatgctattcccagtagtgacttcacctcagcctggagcaccaaccaccacctggctagcatatttgacttcacgctggatgaaattcaaagtttaaaaagtgccagctcaggccagaccttcttctcagatgtcgactccaccgacgctgccagcacctctggctctgcctccaccagcctctcctatgactccagatggacagtgggcagccgaaagaggaagctggcagccaaggcatacatgcccctgcgggcaaagcggtgggcagctgagctggatggacgctgcccctcggacagcagtgcagagggggcttcagtccccgagcggccagacgaaggcattgacagccacacatttgagagcatcagtgaagatgactcatccctgtcccacctcaagtcatctatcaccaactactttggtgcagctgggcggttggcctgtggggagaagtaccaggtgttggctcggagggtcacacctgagggcaaggttcagtacctggtggagtgggaagggaccaccccttactgactagcccccgggggtgccaggggtcctgaaaaccaaaggaggagcagcagaagccataggctccccagctttctccaggctggggtgggagaaggaagcaggacagagctgcaagtgcctggcagaatgccctgcctgcctgcctgccaggccaaggcctgcgtctctctgctgtaccagctctgttccagggcctcctcaggctcgttacccctgtgcctgtgttctgcaccacctgggaagatagcacaaggcctaatgaggtcaccctgactccccaccccagcatttcattcataccagataatagctgcattactgccaactgaccttataaccctctgcaccttcaaaaagattcatggtttttaattgctgcttttaataacatttgttaaagttataattaatgtgtctgatttatgatttaaaacctccctttgaacaatcacttgtcttccctatagtgaattagctgctgggtggcagaaggaattggctctggcttttgcacttggtttactggaggctgaggaggaatggcaggaccctgtcctctggccaccttgccactcctaccactgccagcaacattctcacccttactgccagagagaatatggaatcttttgtgagtacccgacctttgggggcaaaaaacattagttgagtgccactgagaggtaaaagatggaaaatgaacttagaaattgacactattataatacttagatccgggcatcgtaaaactttatcagtacatcatcacacaattctagaaatatgaaatgagttctagacctgactctgctagttctaacctgtgccactttagtcagattcctttccttcagttttatcacccttcaaatggcagtgataatcccagcacatctgctccccatgtgttgggagagactttgctgtgtgtgactgattattacttcaaaataaacctctaaatttagggcagtttggagaggaaaaaaacaggagatgtaaaggggtaggaaaaaggtcatctatagagaggtaaaggccatggattccactgaattctacagtttgaggggtaaagtgtaacctgtaatcccgaatgaaggactcagtggtgttaatatctgcccttaaacgtcttcattcactatggctcccacttctttctaccactccatcagcttcaaccttttatctgtcctcagaataaaaccacaatgggacttggggg

SEQ ID NO: 40755 - DNA, 379 bp, Homo sapiens
tagcatatttgacttcacgctggatgaaattcaaagtttaaaaaggtatcagtgagggacctagcacagaggtctgctctggagacagggagggaaccaagcagaaagccaagccctcagttaaaaggatccctgctgtgcaggtctgtctgaaggggctttttgcagtagagctttcagcataacatccctgttcccagagcaccacagccctcccctcttctccagccctccccaccttgccccatggttatccacactcaccatgctgtttgatgcttgctcatctttgctcgtattgctccctctgcctgagataccctttgccttgccctagcccatctgaaaactcaggaccctgcttcttccaggaaggctt

SEQ ID NO: 40756 - DNA, 4171 bp, Homo sapiens
  misc_feature (3117)..(3117): n is a, c, g, or t
cacgggcggacactcggccgggcagccgcgggccgagcgcagcgcctccgccaccgatgcgcctggtggccagactccaagtgggaccggcggacacgcagcctcgcgtgtcaggggaagctgatggagaatcgagctctggatccagggactcgggactcctatggtgccaccagccacctccccaacaagggggccctggcgaaggtcaagaacaacttcaaagacttgatgtccaaactgacggagggccagtatgtgctgtgccggtggacagatggcctgtactacctcgggaagatcaagagggtcagcagctctaagcaaagctgcctcgtgactttcgaagataattccaaatactgggtcctatggaaggacatacagcatgccggtgttccaggagaggagcccaagtgcaacatctgcctagggaagacatcagggccgctgaatgagatcctcatctgcgggaagtgtggcctgggttaccaccagcagtgccacatccccatagcgggcagtgctgaccagcccctgctcacaccttggttctgccgacgctgcatcttcgcactggctgtgcggaaaggcggcgcgctgaagaagggcgccatcgccaggacgctgcaggccgtgaagatggtgctgtcctaccagcccgaggagctcgagtgggactcgccccatcgcaccaaccagcagcaatgctactgctactgcggcgggcccggagaatggtacctgcggatgctgcaatgttaccggtgcaggcagtggttccacgaggcctgcacccagtgcctcaatgagcccatgatgtttggagaccggttttacctgttcttctgctccgtgtgtaaccagggcccagagtacatcgagaggctgcccctgcgatgggtggatgtggttcacctggccctctataatctgggggtacagagcaagaagaagtactttgactttgaggagattctggcctttgtcaaccaccactgggagctcctgcagcttggcaagctcaccagcaccccagtgacagatcgaggaccacatctcctcaacgctctgaacagttataaaagccggttcctctgcggcaaggagatcaagaagaagaagtgcatcttccgcctgcgcatccgcgtcccacccaacccgccagggaagctgctgcctgacaaaggactgctgccaaatgagaacagcgcctcctctgagctgcgtaagagaggaaagagcaagcctggtttgttgcctcacgaattccagcagcagaaaaggcgagtttatagaagaaaaagatcaaagtttttgctggaagatgctattcccagtagtgacttcacctcagcctggagcaccaaccaccacctggctagcatatttgacttcacgctggatgaaattcaaagtttaaaaagtgccagctcaggccagaccttcttctcagatgtcgactccaccgacgctgccagcacctctggctctgcctccaccagcctctcctatgactccagatggacagtgggcagccgaaagaggaagctggcagccaaggcatacatgcccctgcgggcaaagcggtgggcagctgagctggatggacgctgcccctcggacagcagtgcagagggggcttcagtccccgagcggccagacgaaggcattgacagccacacatttgagagcatcagtgaagatgactcatccctgtcccacctcaagtcatctatcaccaactactttggtgcagctgggcggttggcctgtggggagaagtaccaggtgttggctcggagggtcacacctgagggcaaggttcagtacctggtggagtgggaagggaccaccccttactgactagcccccgggggtgccaggggtcctgaaaaccaaaggaggagcagcagaagccataggctccccagctttctccaggctggggtgggagaaggaagcaggacagagctgcaagtgcctggcagaatgccctgcctgcctgcctgccaggccaaggcctgcgtctctctgctgtaccagctctgttccagggcctcctcaggctcgttacccctgtgcctgtgtctctacacactccacaccccctcaaactctgtttatctgttctctgaccttgtgtcccctgcgctgggacccttcctcctgaggcccaggtctttgtccccagttgtgtgccttgacctctctcgcccctttctgggtgtgttcgcacatcctgtgtgtgcacagctgtccctccactggatccccttcacacgtgacccgtggggcagccagtcctcccagggactacataacaggcacctttgagagagcatgggagaaggtggataagaggatgctgctcagtgcttttctcttccactttcctgccactccccactaccctcggagagaggtggtgggatgggagagagcccctgtgaaagcctgtgaggatctgaagagtaaagggctgggtctgcctcagaaggcaccagcaccagggcccaggtattaaggctgagagtgaaggctgccaatgtcagctttggaggtcccagaagtcttctgttctctggcctcaccccctcagtcgccatagagctgggcctggccttgctggaatggaggcatccttccaaacctgggggacgggggtggggggtggtagtggtgggagggaaaccatgtcttgctaaacctgtttctggtgcctcccatccccagacccaccagacaccacacagcagacaatacacacccactcgcacaagcttccatccacatgtgttgtactttcagctctaggcatgcagacaaccccacacggccacaccaccacatgcccaagtgtacacacacagagccacaccgtccctctgggcctgctggctcctcccttggctttcccttggcccacttccagggcccaggtgctgcaactaaatgtgaaagctcagtggccgctccttctttcagcccatcaaccagcattggtcccatagggaagcacaggggactcaccctctttcatatcccttgccctgccctgaaatggacaatcactttttgggataggttgaaatttttaaagagcctgcatcattnggttccctcaaagggaagcccttgccagtgggggtttgaaagagaatttttggaaccaacattcaaattctgcctcatctggagggaaaccaaaattgggagggggaagaggacccctgatgttttgctgcttccagagatattagaaactgactcacttgattggaaaatggacaaaagtgccttgacgtggagggtgggcaccagatggggaccagccttgccaactgctgctgtggcctccagcttggctggttttgcaggccgccagcaggaaggcgaaggtggtagtacagcaagaggcactggcggggcagcaggcctgcaggagctgtttttccattgctaggcctgacccctctctacctgtgagcgttcagggggtccctgagatagtttagatgcccccccatcttagacctcagctcccacagtgccttttaagggggacctcacctcctgtgcacagcccacccactttcctctgcttccctggcacagcccaggcatagacgagctggcgttggacccagttcttcccccttttcagccccacagctgctgccacaggggccaactagggccaggtggaaggggagctgagaagccaacccctagcccaggggtgctgtgggaactgggatccaatttgtagcttcctgcctggcttcagagagcccagcaaccttctaggcctgctttccagacttctgagatagcctgggatgagcaatcctgttacagtacatctggaccttccctacctgggctctggggaggctgtgggcctggagagggaaaaggagggagggggtgtctgcaccacctgggaagatagcacaaggcctaatgaggtcaccctgactccccaccccagcatttcattcataccagataatagctgcattactgccaactgaccttataaccctctgcaccttcaaaaagattcatggtttttaattgctgcttttaataacatttgttaaagtcctcatgaaacatcctatcatctggccggtcgtggggcccggtacccaattcacccttagag

SEQ ID NO: 40757 - DNA, 4717 bp, Homo sapiens
  misc_feature (3117)..(3117): n is a, c, g, or t
cacgggcggacactcggccgggcagccgcgggccgagcgcagcgcctccgccaccgatgcgcctggtggccagactccaagtgggaccggcggacacgcagcctcgcgtgtcaggggaagctgatggagaatcgagctctggatccagggactcgggactcctatggtgccaccagccacctccccaacaagggggccctggcgaaggtcaagaacaacttcaaagacttgatgtccaaactgacggagggccagtatgtgctgtgccggtggacagatggcctgtactacctcgggaagatcaagagggtcagcagctctaagcaaagctgcctcgtgactttcgaagataattccaaatactgggtcctatggaaggacatacagcatgccggtgttccaggagaggagcccaagtgcaacatctgcctagggaagacatcagggccgctgaatgagatcctcatctgcgggaagtgtggcctgggttaccaccagcagtgccacatccccatagcgggcagtgctgaccagcccctgctcacaccttggttctgccgacgctgcatcttcgcactggctgtgcggaaaggcggcgcgctgaagaagggcgccatcgccaggacgctgcaggccgtgaagatggtgctgtcctaccagcccgaggagctcgagtgggactcgccccatcgcaccaaccagcagcaatgctactgctactgcggcgggcccggagaatggtacctgcggatgctgcaatgttaccggtgcaggcagtggttccacgaggcctgcacccagtgcctcaatgagcccatgatgtttggagaccggttttacctgttcttctgctccgtgtgtaaccagggcccagagtacatcgagaggctgcccctgcgatgggtggatgtggttcacctggccctctataatctgggggtacagagcaagaagaagtactttgactttgaggagattctggcctttgtcaaccaccactgggagctcctgcagcttggcaagctcaccagcaccccagtgacagatcgaggaccacatctcctcaacgctctgaacagttataaaagccggttcctctgcggcaaggagatcaagaagaagaagtgcatcttccgcctgcgcatccgcgtcccacccaacccgccagggaagctgctgcctgacaaaggactgctgccaaatgagaacagcgcctcctctgagctgcgtaagagaggaaagagcaagcctggtttgttgcctcacgaattccagcagcagaaaaggcgagtttatagaagaaaaagatcaaagtttttgctggaagatgctattcccagtagtgacttcacctcagcctggagcaccaaccaccacctggctagcatatttgacttcacgctggatgaaattcaaagtttaaaaagtgccagctcaggccagaccttcttctcagatgtcgactccaccgacgctgccagcacctctggctctgcctccaccagcctctcctatgactccagatggacagtgggcagccgaaagaggaagctggcagccaaggcatacatgcccctgcgggcaaagcggtgggcagctgagctggatggacgctgcccctcggacagcagtgcagagggggcttcagtccccgagcggccagacgaaggcattgacagccacacatttgagagcatcagtgaagatgactcatccctgtcccacctcaagtcatctatcaccaactactttggtgcagctgggcggttggcctgtggggagaagtaccaggtgttggctcggagggtcacacctgagggcaaggttcagtacctggtggagtgggaagggaccaccccttactgactagcccccgggggtgccaggggtcctgaaaaccaaaggaggagcagcagaagccataggctccccagctttctccaggctggggtgggagaaggaagcaggacagagctgcaagtgcctggcagaatgccctgcctgcctgcctgccaggccaaggcctgcgtctctctgctgtaccagctctgttccagggcctcctcaggctcgttacccctgtgcctgtgtctctacacactccacaccccctcaaactctgtttatctgttctctgaccttgtgtcccctgcgctgggacccttcctcctgaggcccaggtctttgtccccagttgtgtgccttgacctctctcgcccctttctgggtgtgttcgcacatcctgtgtgtgcacagctgtccctccactggatccccttcacacgtgacccgtggggcagccagtcctcccagggactacataacaggcacctttgagagagcatgggagaaggtggataagaggatgctgctcagtgcttttctcttccactttcctgccactccccactaccctcggagagaggtggtgggatgggagagagcccctgtgaaagcctgtgaggatctgaagagtaaagggctgggtctgcctcagaaggcaccagcaccagggcccaggtattaaggctgagagtgaaggctgccaatgtcagctttggaggtcccagaagtcttctgttctctggcctcaccccctcagtcgccatagagctgggcctggccttgctggaatggaggcatccttccaaacctgggggacgggggtggggggtggtagtggtgggagggaaaccatgtcttgctaaacctgtttctggtgcctcccatccccagacccaccagacaccacacagcagacaatacacacccactcgcacaagcttccatccacatgtgttgtactttcagctctaggcatgcagacaaccccacacggccacaccaccacatgcccaagtgtacacacacagagccacaccgtccctctgggcctgctggctcctcccttggctttcccttggcccacttccagggcccaggtgctgcaactaaatgtgaaagctcagtggccgctccttctttcagcccatcaaccagcattggtcccatagggaagcacaggggactcaccctctttcatatcccttgccctgccctgaaatggacaatcactttttgggataggttgaaatttttaaagagcctgcatcattnggttccctcaaagggaagcccttgccagtgggggtttgaaagagaatttttggaaccaacattcaaattctgcctcatctggagggaaaccaaaattgggagggggaagaggacccctgatgttttgctgcttccagagatattagaaactgactcacttgattggaaaatggacaaaagtgccttgacgtggagggtgggcaccagatggggaccagccttgccaactgctgctgtggcctccagcttggctggttttgcaggccgccagcaggaaggcgaaggtggtagtacagcaagaggcactggcggggcagcaggcctgcaggagctgtttttccattgctaggcctgacccctctctacctgtgagcgttcagggggtccgccaacccctagcccaggggtgctgtgggaactgggatccaatttgtagcttcctgcctggcttcagagagcccagcaaccttctaggcctgctttccagacttctgagatagcctgggatgagcaatcctgttacagtacatctggaccttccctacctgggctctggggaggctgtgggcctggagagggaaaaggagggagggggtgtctgcaccacctgggaagatagcacaaggcctaatgaggtcaccctgactccccaccccagcatttcattcataccagataatagctgcattactgccaactgaccttataaccctctgcaccttcaaaaagattcatggtttttaattgctgcttttaataacatttgttaaagttataattaatgtgtctgatttatgatttaaaacctccctttgaacaatcacttgtcttccctatagtgaattagctgctgggtggcagaaggaattggctctggcttttgcacttggtttactggaggctgaggaggaatggcaggaccctgtcctctggccaccttgccactcctaccactgccagcaacattctcacccttactgccagagagaatatggaatcttttgtgagtacccgacctttgggggcaaaaaacattagttgagtgccactgagaggtaaaagatggaaaatgaacttagaaattgacactattataatacttagatccgggcatcgtaaaactttatcagtacatcatcacacaattctagaaatatgaaatgagttctagacctgactctgctagttctaacctgtgccactttagtcagattcctttccttcagttttatcacccttcaaatggcagtgataatcccagcacatctgctccccatgtgttgggagagactttgctgtgtgtgactgattattacttcaaaataaacctctaaatttagggcagtttggagaggaaaaaaacaggagatgtaaaggggtaggaaaaaggtcatctatagagaggtaaaggccatggattccactgaattctacagtttgaggggtaaagtgtaacctgtaatcccgaatgaaggactcagtggtgttaatatctgcccttaaacgtcttcattcactatggctcccacttctttctaccactccatcagcttcaaccttttatctgtcctcagaataaaaccacaatgggacttggggg

SEQ ID NO: 40758 - DNA, 3454 bp, Homo sapiens
  misc_feature (3117)..(3117): n is a, c, g, or t
  misc_feature (3437)..(3437): n is a, c, g, or t
cacgggcggacactcggccgggcagccgcgggccgagcgcagcgcctccgccaccgatgcgcctggtggccagactccaagtgggaccggcggacacgcagcctcgcgtgtcaggggaagctgatggagaatcgagctctggatccagggactcgggactcctatggtgccaccagccacctccccaacaagggggccctggcgaaggtcaagaacaacttcaaagacttgatgtccaaactgacggagggccagtatgtgctgtgccggtggacagatggcctgtactacctcgggaagatcaagagggtcagcagctctaagcaaagctgcctcgtgactttcgaagataattccaaatactgggtcctatggaaggacatacagcatgccggtgttccaggagaggagcccaagtgcaacatctgcctagggaagacatcagggccgctgaatgagatcctcatctgcgggaagtgtggcctgggttaccaccagcagtgccacatccccatagcgggcagtgctgaccagcccctgctcacaccttggttctgccgacgctgcatcttcgcactggctgtgcggaaaggcggcgcgctgaagaagggcgccatcgccaggacgctgcaggccgtgaagatggtgctgtcctaccagcccgaggagctcgagtgggactcgccccatcgcaccaaccagcagcaatgctactgctactgcggcgggcccggagaatggtacctgcggatgctgcaatgttaccggtgcaggcagtggttccacgaggcctgcacccagtgcctcaatgagcccatgatgtttggagaccggttttacctgttcttctgctccgtgtgtaaccagggcccagagtacatcgagaggctgcccctgcgatgggtggatgtggttcacctggccctctataatctgggggtacagagcaagaagaagtactttgactttgaggagattctggcctttgtcaaccaccactgggagctcctgcagcttggcaagctcaccagcaccccagtgacagatcgaggaccacatctcctcaacgctctgaacagttataaaagccggttcctctgcggcaaggagatcaagaagaagaagtgcatcttccgcctgcgcatccgcgtcccacccaacccgccagggaagctgctgcctgacaaaggactgctgccaaatgagaacagcgcctcctctgagctgcgtaagagaggaaagagcaagcctggtttgttgcctcacgaattccagcagcagaaaaggcgagtttatagaagaaaaagatcaaagtttttgctggaagatgctattcccagtagtgacttcacctcagcctggagcaccaaccaccacctggctagcatatttgacttcacgctggatgaaattcaaagtttaaaaagtgccagctcaggccagaccttcttctcagatgtcgactccaccgacgctgccagcacctctggctctgcctccaccagcctctcctatgactccagatggacagtgggcagccgaaagaggaagctggcagccaaggcatacatgcccctgcgggcaaagcggtgggcagctgagctggatggacgctgcccctcggacagcagtgcagagggggcttcagtccccgagcggccagacgaaggcattgacagccacacatttgagagcatcagtgaagatgactcatccctgtcccacctcaagtcatctatcaccaactactttggtgcagctgggcggttggcctgtggggagaagtaccaggtgttggctcggagggtcacacctgagggcaaggttcagtacctggtggagtgggaagggaccaccccttactgactagcccccgggggtgccaggggtcctgaaaaccaaaggaggagcagcagaagccataggctccccagctttctccaggctggggtgggagaaggaagcaggacagagctgcaagtgcctggcagaatgccctgcctgcctgcctgccaggccaaggcctgcgtctctctgctgtaccagctctgttccagggcctcctcaggctcgttacccctgtgcctgtgtctctacacactccacaccccctcaaactctgtttatctgttctctgaccttgtgtcccctgcgctgggacccttcctcctgaggcccaggtctttgtccccagttgtgtgccttgacctctctcgcccctttctgggtgtgttcgcacatcctgtgtgtgcacagctgtccctccactggatccccttcacacgtgacccgtggggcagccagtcctcccagggactacataacaggcacctttgagagagcatgggagaaggtggataagaggatgctgctcagtgcttttctcttccactttcctgccactccccactaccctcggagagaggtggtgggatgggagagagcccctgtgaaagcctgtgaggatctgaagagtaaagggctgggtctgcctcagaaggcaccagcaccagggcccaggtattaaggctgagagtgaaggctgccaatgtcagctttggaggtcccagaagtcttctgttctctggcctcaccccctcagtcgccatagagctgggcctggccttgctggaatggaggcatccttccaaacctgggggacgggggtggggggtggtagtggtgggagggaaaccatgtcttgctaaacctgtttctggtgcctcccatccccagacccaccagacaccacacagcagacaatacacacccactcgcacaagcttccatccacatgtgttgtactttcagctctaggcatgcagacaaccccacacggccacaccaccacatgcccaagtgtacacacacagagccacaccgtccctctgggcctgctggctcctcccttggctttcccttggcccacttccagggcccaggtgctgcaactaaatgtgaaagctcagtggccgctccttctttcagcccatcaaccagcattggtcccatagggaagcacaggggactcaccctctttcatatcccttgccctgccctgaaatggacaatcactttttgggataggttgaaatttttaaagagcctgcatcattnggttccctcaaagggaagcccttgccagtgggggtttgaaagagaatttttggaaccaacattcaaattctgcctcatctggagggaaaccaaaattgggagggggaagaggacccctgatgttttgctgcttccagagatattagaaactgactcacttgattggaaaatggacaaaagtgccttgacgtggagggtgggcaccagatggggaccagccttgccaactgctgctgtggcctccagcttggctggttttgcaggccgccagcaggaaggcgaaggtggtagtacagcaagaggcactggcgagctagacngatcctctagataccca

SEQ ID NO: 40759 - DNA, 2967 bp, Homo sapiens
  misc_feature (140)..(140): n is a, c, g, or t
  misc_feature (788)..(788): n is a, c, g, or t
  misc_feature (828)..(828): n is a, c, g, or t
agcagcccaggggccttcctgcctggacgcaggaccacggagacctgcatgtgcagggaggcctggcagcctgccgatgggggtccccgagccccggagtctcctcgaaacccctgctgtgggtcacagcatggaccagnaggggtcaccatcctgagtacccccgacatccctgccccttgacctgtggcagatgctcctgccctggcctccaggaagtcagctcttttgcaaagggcttgtgtgagaggtcggagaaagccctgggcctccagggagatgcagctggcaggaggtgggctgagctgctccggggctaggggtggcccattgctggcagaatttaaggaaagagcaggttgtaggcacagaggatgggcagccaggcctgggccttccccttactgtcccagggcagcagagctagggtcctcttttaccctccctaaggtcacccccttcccatctacacgtccctccccaagttcaagcacatagtcaatcatgaccactcaggagctcagtgagctggggccatgtccctgtggcctccagcccatccgcaggagggtcccttgcagtgacagcacaaagagtcccccacaggaagcccctgagggccagcatggaccttgagagccaggagggaatgggcctggtgccactctgttcccactcccacctaagattcctacccctgtgttctagcaggtgactcttgatctggccagcccacaacaaatacttgaactaggcagcatggggtggtggaggcctgcagaggcccngggcccaggaactgagactagggctttctcatgaggcctnatcaagctcccgcaggtatgacctggcctcctcgcctcgggctgccttaaagcaccgctaacccacgccaaggggctaggcagggcttcgcggggcctggcccaaggtctccagcagagcaataacatcttcccaggttgggttgccacagacaccctgccctggagcccccagcccatcccatctggtgctaccctgtctgcctggcagcctagcctcacccctcctgtccggtcatctgggggtccttggtaaggatgcagccacatggggccggtttatgcacctgggcgagaacctgactggggcaggggatgctcaggggcctgcaggtctcccacagagctgcttttctgcccgcctcaccctgtgggtttgtatttcttgccgggtcaaaataggcagtgactcgtgccttccctcctcagggccggcggcagggtgtggacccagctggccgctggaccgtccccttcctcattctccaagctcatcaacaggtctcagaggaacatttccataaaaggtgtggcctggcatgcagtgctgtctgcacgctgtcgcttcccccacagcaacctgccggtcagccttaactggtgtggaggtcgaggtggggagggggaggcgggcttccctccctggtgtctggcctctttttgctcagccctcagcacagccttcagcgtggagagcgagaccctgcgtgtcactggggcttggctgaggtctccctgcaggataacagtgacttcaggaacccagaccccagtctgggcggctctaccttcccggctggcccagcccccacaccacagttccctgccacctccaggcacaaaagcctctgaggccacagcccagctatgaagctgagtggctttgtgcggtctcctagggaaggggcagtgatgccatgcatgagatccgctgtgccataagaagttgcttcctttagaatttctggtccaatgcagggaggtgaggcccagcctcatgataacacatgcccatcaaggaaaagctgtggctaatgcttccaaaacaagtgaaaatcttgcaccaggcccagggccatatctcattccgccccagctactgagggaggggacagactgctggaggacaatttctcctagttaccactaggggttacatggctactcagaatgaaagataaattgccaggcctgttgcaatcttttttttgagatgggagtcttgctctgtcgcccaggctggagtgcagaggtgcgatctcagctcactgcaacctccacctcccgggtcaagcaattctcctgcctcagcttcccgagtagctggaattacaggtgcccaccaccatgcctggctaatttttgtatttttagtagagacggggtttcaccatgttggccaggctggtcttgaacacctgacctcaaatgatccgcccacctcggcctcccaaagtgttgggattacaggcgtgagccacctcaccaggccccgttgcaatcttactccacttcgttttcacagcagtcccgggacatgcccattattaggcctatttgatagatgatactgaggctcagagtcgggggtcacaagccaaagccacaccgctagaagggctcaggacccaagcccagctcccgtcctcttggtggcatcaagcttgtgtgatatgaggtcttatgtctgctcatgacagccttaaaagcaataaacagatacaacttccagcaacttcccactcagctgcaaggctgcgggggggtcctgcctcgagccataaggtgagcagctagccagtgccgggccagtgtggagaaggctgaattgcctgtgaagctggggttgcaggcaggaatattcatggagcccctgaccatgtactcacactgctcttcctcagttcagggttcttggatttgctcaagtccacccaaatatccctttacgattctcagggtcccactccttccagatccaatgccctaaactttacataagagttccggcaaggctgtgacttcaacttgtgttgtaactgcaacctgcagaatcaaatttagggttatgttttcagttgtatcagtcttacggctacaagatattaaagagattcttttctggttatcaaaaaaaatc

SEQ ID NO: 40760 - DNA, 2611 bp, Homo sapiens
  misc_feature (612)..(612): n is a, c, g, or t
  misc_feature (652)..(652): n is a, c, g, or t
ccatgagagcacatgcgttgtgtgaggagatgcgtggagagaggagattcgcggtgtgaggagttgtgtgagaggtcggagaaagccctgggcctccagggagatgcagctggcaggaggtgggctgagctgctccggggctaggggtggcccattgctggcagaatttaaggaaagagcaggttgtaggcacagaggatgggcagccaggcctgggccttccccttactgtcccagggcagcagagctagggtcctcttttaccctccctaaggtcacccccttcccatctacacgtccctccccaagttcaagcacatagtcaatcatgaccactcaggagctcagtgagctggggccatgtccctgtggcctccagcccatccgcaggagggtcccttgcagtgacagcacaaagagtcccccacaggaagcccctgagggccagcatggaccttgagagccaggagggaatgggcctggtgccactctgttcccactcccacctaagattcctacccctgtgttctagcaggtgactcttgatctggccagcccacaacaaatacttgaactaggcagcatggggtggtggaggcctgcagaggcccngggcccaggaactgagactagggctttctcatgaggcctnatcaagctcccgcaggtatgacctggcctcctcgcctcgggctgccttaaagcaccgctaacccacgccaaggggctaggcagggcttcgcggggcctggcccaaggtctccagcagagcaataacatcttcccaggttgggttgccacagacaccctgccctggagcccccagcccatcccatctggtgctaccctgtctgcctggcagcctagcctcacccctcctgtccggtcatctgggggtccttggtaaggatgcagccacatggggccggtttatgcacctgggcgagaacctgactggggcaggggatgctcaggggcctgcaggtctcccacagagctgcttttctgcccgcctcaccctgtgggtttgtatttcttgccgggtcaaaataggcagtgactcgtgccttccctcctcagggccggcggcagggtgtggacccagctggccgctggaccgtccccttcctcattctccaagctcatcaacaggtctcagaggaacatttccataaaaggtgtggcctggcatgcagtgctgtctgcacgctgtcgcttcccccacagcaacctgccggtcagccttaactggtgtggaggtcgaggtggggagggggaggcgggcttccctccctggtgtctggcctctttttgctcagccctcagcacagccttcagcgtggagagcgagaccctgcgtgtcactggggcttggctgaggtctccctgcaggataacagtgacttcaggaacccagaccccagtctgggcggctctaccttcccggctggcccagcccccacaccacagttccctgccacctccaggcacaaaagcctctgaggccacagcccagctatgaagctgagtggctttgtgcggtctcctagggaaggggcagtgatgccatgcatgagatccgctgtgccataagaagttgcttcctttagaatttctggtccaatgcagggaggtgaggcccagcctcatgataacacatgcccatcaaggaaaagctgtggctaatgcttccaaaacaagtgaaaatcttgcaccaggcccagggccatatctcattccgccccagctactgagggaggggacagactgctggaggacaatttctcctagttaccactaggggttacatggctactcagaatgaaagataaattgccaggcctgttgcaatcttttttttgagatgggagtcttgctctgtcgcccaggctggagtgcagaggtgcgatctcagctcactgcaacctccacctcccgggtcaagcaattctcctgcctcagcttcccgagtagctggaattacaggtgcccaccaccatgcctggctaatttttgtatttttagtagagacggggtttcaccatgttggccaggctggtcttgaacacctgacctcaaatgatccgcccacctcggcctcccaaagtgttgggattacaggcgtgagccacctcaccaggccccgttgcaatcttactccacttcgttttcacagcagtcccgggacatgcccattattaggcctatttgatagatgatactgaggctcagagtcgggggtcacaagccaaagccacaccgctagaagggctcaggacccaagcccagctcccgtcctcttggtggcatcaagcttgtgtgatatgaggtcttatgtctgctcatgacagccttaaaagcaataaacagatacaacttccagcaacttcccactcagctgcaaggctgcgggggggtcctgcctcgagccataaggtgagcagctaatccaatgccctaaactttacataagagttccggcaaggctgtgacttcaacttgtgttgtaactgcaacctgcagaatcaaatttagggttatgttttcagttgtatcagtcttacggctacaagatattaaagagattcttttctggttatcaaaaaaaatc

SEQ ID NO: 40761 - DNA, 2791 bp, Homo sapiens
  misc_feature (612)..(612): n is a, c, g, or t
  misc_feature (652)..(652): n is a, c, g, or t
ccatgagagcacatgcgttgtgtgaggagatgcgtggagagaggagattcgcggtgtgaggagttgtgtgagaggtcggagaaagccctgggcctccagggagatgcagctggcaggaggtgggctgagctgctccggggctaggggtggcccattgctggcagaatttaaggaaagagcaggttgtaggcacagaggatgggcagccaggcctgggccttccccttactgtcccagggcagcagagctagggtcctcttttaccctccctaaggtcacccccttcccatctacacgtccctccccaagttcaagcacatagtcaatcatgaccactcaggagctcagtgagctggggccatgtccctgtggcctccagcccatccgcaggagggtcccttgcagtgacagcacaaagagtcccccacaggaagcccctgagggccagcatggaccttgagagccaggagggaatgggcctggtgccactctgttcccactcccacctaagattcctacccctgtgttctagcaggtgactcttgatctggccagcccacaacaaatacttgaactaggcagcatggggtggtggaggcctgcagaggcccngggcccaggaactgagactagggctttctcatgaggcctnatcaagctcccgcaggtatgacctggcctcctcgcctcgggctgccttaaagcaccgctaacccacgccaaggggctaggcagggcttcgcggggcctggcccaaggtctccagcagagcaataacatcttcccaggttgggttgccacagacaccctgccctggagcccccagcccatcccatctggtgctaccctgtctgcctggcagcctagcctcacccctcctgtccggtcatctgggggtccttggtaaggatgcagccacatggggccggtttatgcacctgggcgagaacctgactggggcaggggatgctcaggggcctgcaggtctcccacagagctgcttttctgcccgcctcaccctgtgggtttgtatttcttgccgggtcaaaataggcagtgactcgtgccttccctcctcagggccggcggcagggtgtggacccagctggccgctggaccgtccccttcctcattctccaagctcatcaacaggtctcagaggaacatttccataaaaggtgtggcctggcatgcagtgctgtctgcacgctgtcgcttcccccacagcaacctgccggtcagccttaactggtgtggaggtcgaggtggggagggggaggcgggcttccctccctggtgtctggcctctttttgctcagccctcagcacagccttcagcgtggagagcgagaccctgcgtgtcactggggcttggctgaggtctccctgcaggataacagtgacttcaggaacccagaccccagtctgggcggctctaccttcccggctggcccagcccccacaccacagttccctgccacctccaggcacaaaagcctctgaggccacagcccagctatgaagctgagtggctttgtgcggtctcctagggaaggggcagtgatgccatgcatgagatccgctgtgccataagaagttgcttcctttagaatttctggtccaatgcagggaggtgaggcccagcctcatgataacacatgcccatcaaggaaaagctgtggctaatgcttccaaaacaagtgaaaatcttgcaccaggcccagggccatatctcattccgccccagctactgagggaggggacagactgctggaggacaatttctcctagttaccactaggggttacatggctactcagaatgaaagataaattgccaggcctgttgcaatcttttttttgagatgggagtcttgctctgtcgcccaggctggagtgcagaggtgcgatctcagctcactgcaacctccacctcccgggtcaagcaattctcctgcctcagcttcccgagtagctggaattacaggtgcccaccaccatgcctggctaatttttgtatttttagtagagacggggtttcaccatgttggccaggctggtcttgaacacctgacctcaaatgatccgcccacctcggcctcccaaagtgttgggattacaggcgtgagccacctcaccaggccccgttgcaatcttactccacttcgttttcacagcagtcccgggacatgcccattattaggcctatttgatagatgatactgaggctcagagtcgggggtcacaagccaaagccacaccgctagaagggctcaggacccaagcccagctcccgtcctcttggtggcatcaagcttgtgtgatatgaggtcttatgtctgctcatgacagccttaaaagcaataaacagatacaacttccagcaacttcccactcagctgcaaggctgcgggggggtcctgcctcgagccataaggtgagcagctagccagtgccgggccagtgtggagaaggctgaattgcctgtgaagctggggttgcaggcaggaatattcatggagcccctgaccatgtactcacactgctcttcctcagttcagggttcttggatttgctcaagtccacccaaatatccctttacgattctcagggtcccactccttccagatccaatgccctaaactttacataagagttccggcaaggctgtgacttcaacttgtgttgtaactgcaacctgcagaatcaaatttagggttatgttttcagttgtatcagtcttacggctacaagatattaaagagattcttttctggttatcaaaaaaaatc

SEQ ID NO: 40762 - DNA, 354 bp, Homo sapiens
taaaatgcaagtcattgtagagatgccagtctatgcctttatgcttgccagtctcaattaagacttgattgagctgcagtactttaaaaaggattagaagagctattgaatgacttaatttattagaagtttttaagtgacagcatttctaattattcaagtgcatttatttttcatgaaaaaaggtagaatgatttgttctgacataaagtaaatagtgttgatgcattagaaattgtgtgtcttgattatgatttctgtactttttgcattagaagtataatggacttgtatttttaaatagttgaaactagcactgtgatcatattaaataatgcatttctcagtttggac

SEQ ID NO: 40763 - DNA, 451 bp, Homo sapiens
ctttatcagcctacaatggagaatttccaaagccttcaaagcatgttaagacaacctagagaattatagaaaaacgtttgaattaacttgcttttggatcaatttttctttgggacaggggtttgcaaactatgaccaatagaacaaagccagactcattcgcaaattgctctctgatttcaatacagcagcagagttgagtggctgtgacagagaccgcatggcctgcaaagcctaaaatagttactctctggtcttttatagaaaaagttcgctgatctctattctatgatacatacatagattccaaaggcttacattggtatgaatttaaaaaataaaaataggccgggtgtggtggctcacgcctgtaatcccagcactttgggaggccgaggtgggcggatcacgaggtcaggagatcgagaccatcctggctaacatgatgaaa

SEQ ID NO: 40764 - DNA, 1128 bp, Homo sapiens
ttttttttttatctttttctttagggacattggtctatagttagtatctaggtttacaacattaagcttttttcattttgtttggaaaaacaaggctggcagaattacatttgtttttaattccattgctaatattacatacttaggaggctatcaggtgcaagttatttacttgagacaagaagcactgattattttggctaggcttcatctgaaggcctatgttctgggaagggaggcctccataaaaaaggaagaacctttagtgacctttatccttgggaataaaagtaaagatcagaagccagtgcattcagtttaccgtcttacaaaaggagtcaagtattgtataggtcagagaccactattgtaagatcatataaatcctgtgtctaattttgttatcctctgtttctccataataattagtaccaagcactttacaaaaagaatccccatatatttgtttttggaggccacaagaaatgggaagggctaatgagagactgcagttaattctgcagctagtcttagggaaaacagaactccaaaaaatagaagagctgaaaggagaagaaagcagactgaattcttgtgcttatcaaaggaagaacaaaagaataaggagttgtcctggatctgagaccattagtggggttacctgagatgacctgtgatgtgtgtggcactgtgttttttttatgtgaactagagcaagaaattagatatggcccctcctgtaaagaaactcactcatttgtggggaaaatatataaggaaacaactcttcataacctaaggtttaataatattagtgttataatagtgaaggagacagatcttagctattctgatgggaagtttacattttagttgagtttgggaggataaataaaatttcattgggaagaaaagaattttctagttgagaagtcatttatttataccttttcctaccttctcccagtccattaccaaatcatgttaattttgcctccaaagtatatctcgagtcttcctatcttcattgctactaggctagttcactctgtagtttttttacatgagctatgttgatggcctttggccttctaatcagcctgttttcattattgcctcctcctccta

SEQ ID NO: 40765 - DNA, 383 bp, Homo sapiens
ccagagactgccagtggattagtttgatcctatgtgaggaaaaaagctgctttgtgaaaccagtaattccatagagactagtggtattagagatatttttaaatttggggcttagccagaagatctgagcattgatataccctttcctttctgtattaatgaatttaaaatatgttgttgatttaatgtttagtttgtacattgatttctggtttgggcttctttaaactttgtgtgaatattagaatccagtgagtttgttaaaaaatatttgcttattctatcctttcatatgacatatactagtagaagacagctattattttgaaagcagcatatatatttaacattcttatgattgtacagatgtggactggcatgag

SEQ ID NO: 40766 - DNA, 407 bp, Homo sapiens
gctttatgaccttgccagctggaccacaaccaagcttcttacacagagtgagtcaaaactaatccatcctctctattagaaagggttatgaactgtccccaaccacaacactttcagaagacaaatttggaagagcctctttcaagagaccaccatcagttaggaagggttggtgcctttcaaagactgctccattcaataccagtcatctcaaagagtaggggcaattttcatcccctattgtcaaccatctataacacagtcactgcaacatgaaagagaaagaaggttattcctttgcatagatgcttgtgaacataatcatcagagagcaaatatatggtgaggcagaacttagcacatcaaattcatgacatgcaataggttggttaccctcaatcagaaac

SEQ ID NO: 40767 - DNA, 381 bp, Homo sapiens
aatggggccagactctctgggctaaagtcccctccatgcactctatgtaagtattagattgttatcatcaagcgctttgccccaggtgcacagctggggagtggcagggctggatctctgatgtcctgatacagaagtgagtaatactctatatctacccacctggggctcatagactggggtgactgggtaggcacaggaacctgggctccagaggggggtgcctggtctttttagttcaagatttctgccaggcagtggaacaggcaggcaggtggaccttgagtcctattgatgccctagttgggtgcacttaattagagtcactgggaggcatttgaggtacgtgctgtacccagaattcctcagcttgcacagctt

SEQ ID NO: 40768 - DNA, 410 bp, Homo sapiens
atttttactatgcatggtacccatgagcctaaataagtagcatagtagtaacagttttcaaactgcagtatgagagagtttactcacttatagaactacttcagtcttgattgtctagggataatggacaagaggactgtgaaatgaagattaactatttaatggcctgtgaaaagacggtgttagataattattaagcaaagaacttccactacaagccagacttaaccctcttctgatttattgctcacctattacagttgaattctaattacagtatgaatagctgaagtttgaaagcctgcttttcaagtttgagagtttttaaaagtccagttctttcaggatgaatttagcggaattaacctctctcatgattttacctgattttgtgaacatgcctagttttg

SEQ ID NO: 40769 - DNA, 384 bp, Homo sapiens
tacaaggtctagtgtttattccagtcctgctaataacctgtaacatgccagtctgggacaggggactgcttttgttctcctaactcataaaatgttaacacatttggccaggcacagtggctcacgtctctaatcctagcactttgggagaccgaggtgagtggatcactgaggtcaggagtttgagaccagcctggccaacatggtgaaacttggtctctactaaaaatacaaaaattagctgggcatggtggcacatgcctgtggtcccagctacttgggaggctgaggcaggagaatcggttgaactcaggaggtggaggtacagtgagccgagatcatgccactgcactcctgcctgggagacagagcaacactctgtct

SEQ ID NO: 40770 - DNA, 557 bp, Homo sapiens
  misc_feature (547)..(549): n is a, c, g, or t
  misc_feature (551)..(556): n is a, c, g, or t
aagaagtgcctttcacctctcatcatgattctgtggcctccccagccatgtggaacttttttctcttgctgctaccatgtaagaagtgcctttcacctcgtgccatgattatgagacttccccagccatgtggaactgttaagtccaattaaacatctttttcttcttagtcccaggttgttctcattcgtggctggatcacaccagcaagaaggattttaaaggacaactccttggggccgtccaacactgaaaccgcctgaccgctgctgtctttgtgcttgcagaaaatcacggtgggcacaaaattttggacacgatttcgagagcgtgagagctactgttcacgaatccagggccagcctcgtgtctgtcttcctttaaagcacctggcttggtacctaaaatgttcctttttttttttttttgaaattcaataacttcatcagaacaggcgttgatgtagacagatctccatctttttggttttttgagtgagtttttgctctgtaggctgaattctttggaatttagttctgaaatcacnnnannnnnna

SEQ ID NO: 40771 - DNA, 412 bp, Homo sapiens
caaaataatttcttaacaactcgtataacacctgaattcagcccccttactgggggaatgtaccaacggaactcccacctttcctggtttctcaaggctagattgtgtaaacctcctgggtctcggtctgtgtctgagcagctgctctgccaacactccacacagccctgtgtactaggcccaaggccgccgtgactcagcccatgggaggatctcctgatttcttggttgcaaagatccatgggagaaaaatggtttctggggcggggtcacacactcatggcttctcttggctgtgcaagaaggttcctttggctctgttccaatatagcgtggttcatcacccacccctgttttctttgttctcctgagtcaagttgtttgcctagtcagtcccaatgtgagaacctga

SEQ ID NO: 40772 - DNA, 2229 bp, Homo sapiens
atcagggcggcgggcgagggcggggcgagggcggggaggtgggcggggacggggcccgcacggcggctacggcctaggtgagcggctcggactcggcggccgcacctgcccaacccaacccgcacggtccggaagtcgccgaggggccgggagcgggaggggacgtcgtcctagagggccggagcgggcgggcggccgaggacccggctcccgcgcaggacggagccgtggctcaggtcggcccctccccaacaccaccccgggcctccgccccttcctgggcctctcggtggagcagggacccgaaccggtgcccatccagtccggtgccatctgaagcccccttcccagaaaatgagccacagagcaagctgaccccagcgacacagccccccagccctactgtatttccgttcctatcaaaaaatggatgactcggagacaggtttcaatctgaaagtcgtcctggtcagtttcaagcagtgtctcgatgagaaggaagaggtcttgctggacccctacattgccagctggaagggcctggtcaggtttctgaacagcctgggcaccatcttctcattcatctccaaggacgtggtctccaagctgcggatcatggagcgcctcaggggcggcccgcagagcgagcactaccgcagcctgcaggccatggtggcccacgagctgagcaaccggctggtggacctggagcgccgctcccaccacccggagtctggctgccggacggtgctgcgcctgcaccgcgccctgcactggctgcagctgttcctggagggcctgcgtaccagccccgaggacgcacgcacctccgcgctctgcgccgactcctacaacgcctcgctggccgcctaccacccctgggtcgtgcgccgtgccgtcaccgtggccttctgcacgctgcccacacgcgaggtcttcctggaggccatgaacgtggggcccccggagcaggccgtgcagatgctaggcgaggccctccccttcatccagcgtgtctacaacgtctcccagaagctctacgccgagcactccctgctggacctgccctagaggcgggaagccagggccgcaccggctttcctgctgcagatctgggctgcggtggccagggccgtgagtcccgtggcagagccttctgggcgctgcgggaacaggagatcctctgtcgcccctgtgagctgagctggttaggaaccacagactgtgacagagaaggtggcgaccagcccagaagaggcccaccctctcggtccggaacaagacgcctcagccacggctccccctcggcctattacacgcgtgcgcagccaggcctcgccagggtgcggtgcagagcagagcaggcaggggtgggggccgggcccgcaagagcccgaaaggtcgccaccccctagcctgtggggtgcatctgcgaaccagggtgaagtcacaggtcccggggtgtggaggctccatcctttctcctttctgccagccgatgtgtcctcatctcaggcccgtgcctgggaccccgtgtctgcccaggtgggcagccttgagcccaggggactcagtgccctccatgccctggctggcagaaaccctcaacagcagtctgggcactgtggggctctccccgcctctcctgccttgtttgcccctcagcgtgccaggcagactgggggcaggacagccggaagctgagaccaaggctcctcacagaagggcccaggaagtccccgcccttgggacagcctcctccgtagcccctgcacggcaccagttccccgagggacgcagcaggccgcctcccgcagcggccgtgggtctgcacagcccagcccagcccaaggcccccaggagctgggactctgctacacccagtgaaatgctgtgtcccttctcccccgtgccccttgatgccccctccccacagtgctcaggagacccgtggggcacggaacaggagggtctggaccctgtggcccagccaaaggctaccagacagccacaaccagcccagccaccatccagtgcctggggcctggccactggctcttcacagtggaccccagcacctcggggtggcagagggacggcccccacggcccagcagacatgcgagcttccagagtgcaatctatgtgatgtcttccaacgttaataaatcacacagcctcccaggagggagacgctggggtgcaacccccagcacacacacaacaacac

SEQ ID NO: 40773 - DNA, 2899 bp, Homo sapiens
gggaaaggcctggaggtgtctgggtcaccttcctgggctggcaagctgcctgcctcctgcacagccactgcccttcctgttgttcccgagccaccagccacagctctgagaagctcctggcagcttctgtttgccactggctcgaatctgggcaggaaggcaaggcccgcagaatatctggtgaccaagaaggaaaccccagagcctcagagaccatcttctcagtggacaaaattaaggcccgaggaggggaggggcgtgctggaagtctatgggactgcatctttctgaggcccaggagcagccatcccccacacctgaagcccggtgagctcacatctggggcctccgcctggtgccaagcatgcaacccaacctgtggggcctgcaacgccaggcttcagcaccctgcaggcaccagtgctccagcagcctgggccacgggctgggcagggcttgcagcccatgatccctagtgatgaagggcccagtcctagggtgctgagcaacctgcccacctgctcctggccaggagctctcaccacggctgggtgcccttccccctcccccaccgatggagtccctgcagccagggaggccaggacagggctcccagcaccaaccggcctaggaacccccaggccctcttcctggtcgaggtggaatgcagctgactctcaggttccccagagcagaaaatgagccacagagcaagctgaccccagcgacacagccccccagccctactgtatttccgttcctatcaaaaaatggatgactcggagacaggtttcaatctgaaagtcgtcctggtcagtttcaagcagtgtctcgatgagaaggaagaggtcttgctggacccctacattgccagctggaagggcctggtcaggtttctgaacagcctgggcaccatcttctcattcatctccaaggacgtggtctccaagctgcggatcatggagcgcctcaggggcggcccgcagagcgagcactaccgcagcctgcaggccatggtggcccacgagctgagcaaccggctggtggacctggagcgccgctcccaccacccggagtctggctgccggacggtgctgcgcctgcaccgcgccctgcactggctgcagctgttcctggagggcctgcgtaccagccccgaggacgcacgcacctccgcgctctgcgccgactcctacaacgcctcgctggccgcctaccacccctgggtcgtgcgccgtgccgtcaccgtggccttctgcacgctgcccacacgcgaggtcttcctggaggccatgaacgtggggcccccggagcaggccgtgcagatgctaggcgaggccctccccttcatccagcgtgtctacaacgtctcccagaagctctacgccgagcactccctgctggacctgccctagaggcgggaagccagggccgcaccggctttcctgctgcagatctgggctgcggtggccagggccgtgagtcccgtggcagagccttctgggcgctgcgggaacaggagatcctctgtcgcccctgtgagctgagctggttaggaaccacagactgtgacagagaaggtggcgaccagcccagaagaggcccaccctctcggtccggaacaagacgcctcagccacggctccccctcggcctattacacgcgtgcgcagccaggcctcgccagggtgcggtgcagagcagagcaggcaggggtgggggccgggcccgcaagagcccgaaaggtcgccaccccctagcctgtggggtgcatctgcgaaccagggtgaagtcacaggtcccggggtgtggaggctccatcctttctcctttctgccagccgatgtgtcctcatctcaggcccgtgcctgggaccccgtgtctgcccaggtgggcagccttgagcccaggggactcagtgccctccatgccctggctggcagaaaccctcaacagcagtctgggcactgtggggctctccccgcctctcctgccttgtttgcccctcagcgtgccaggcagactgggggcaggacagccggaagctgagaccaaggctcctcacagaagggcccaggaagtccccgcccttgggacagcctcctccgtagcccctgcacggcaccagttccccgagggacgcagcaggccgcctcccgcagcggccgtgggtctgcacagcccagcccagcccaaggcccccaggagctgggactctgctacacccagtgaaatgctgtgtcccttctcccccgtgccccttgatgccccctccccacagtgctcaggagacccgtggggcacggaacaggagggtctggaccctgtggcccagccaaaggctaccagacagccacaaccagcccagccaccatccagtgcctggggcctggccactggctcttcacagtggaccccagcacctcggggtggcagagggacggcccccacggcccagcagacatgcgagcttccagagtgcaatctatgtgatgtcttccaacgttaataaatcacacagcctcccaggagggagacgctggggtgcaaaaaaaaaaaaaaaaaaaaaaaaaaaaaaaaaaaaaaaaaaaaaaaaaaaaaaaaaaaaaaaaagggggggggcccaaaaaaacccccgagggggggcccgaacagtcgatcgcacgcacccgccccggtgttttttgtgagggaagaagagacggcgcgccccaataaagagagaccggctagcgaatatataaacccgcagtccggcagcgcccgccgtgcgtaaaccaacgaccacgcagcagtagtcgagaaacaaaggcgcaaaacgagagctcgtagtggagaaggcgcacccacacacgggggggggaaaaaagggcgcacgcaaccccacagagataagcacg

SEQ ID NO: 40774 - DNA, 1246 bp, Homo sapiens
tcgaggatatgcagggagatctggacgggttgcagtgacgattttgatgtaggaagtgtgtggggaggctgtggcccgaaagaggccgaagggacagcacccctagcctgtggggtgcatctgcgaaccagggtgaagtcacaggtcccggggtgtggaggctccatcctttctcctttctgccagccgatgtgtcctcatctcaggcccgtgcctgggaccccgtgtctgcccaggtgggcagccttgagcccaggggactcagtgccctccatgccctggctggcagaaaccctcaacagcagtctgggcactgtggggctctccccgcctctcctgccttgtttgcccctcagcgtgccaggcagactgggggcaggacagccggaagctgagaccaaggctcctcacagaagggcccaggaagtccccgcccttgggacagcctcctccgtagcccctgcacggcaccagttccccgagggacgcagcaggccgcctcccgcagcggccgtgggtctgcacagcccagcccagcccaaggcccccaggagctgggactctgctacacccagtgaaatgctgtgtcccttctcccccgtgccccttgatgccccctccccacagtgctcaggagacccgtggggcacggaacaggagggtctggaccctgtggcccagccaaaggctaccagacagccacaaccagcccagccaccatccagtgcctggggcctggccactggctcttcacagtggaccccagcacctcggggtggcagagggacggcccccacggcccagcagacatgcgagcttccagagtgcaatctatgtgatgtcttccaacgttaataaatcacacagcctcccaggagggagacgctggggtgcaaaaaaaaaaaaaaaaaaaaaaaaaaaaaaaaaaaaaaaaaaaaaaaaaaaaaaaaaaaaaaaaagggggggggcccaaaaaaacccccgagggggggcccgaacagtcgatcgcacgcacccgccccggtgttttttgtgagggaagaagagacggcgcgccccaataaagagagaccggctagcgaatatataaacccgcagtccggcagcgcccgccgtgcgtaaaccaacgaccacgcagcagtagtcgagaaacaaaggcgcaaaacgagagctcgtagtggagaaggcgcacccacacacgggggggggaaaaaagggcgcacgcaaccccacagagataagcacg

SEQ ID NO: 40775 - DNA, 489 bp, Homo sapiens
gcccagaagaggcccaccctctcggtccggaacaagacgcctcagccacgccctccccttcatccagcgtgtctacaacgtctcccagaagctctacgccgagcactccctgctggacctgccctagaggcgggaagccagggccgcaccggctttcctgctgcagatctgggctgcggtggccagggccgtgagtcccgtggcagagccttctgggcgctgcgggaacaggagatcctctgtcgcccagccaaaggctaccagacagccacaaccagcccagccaccatccagtgcctggggcctggccactggctcttcacagtggaccccagcacctcggggtggcagagggacggcccccacggcccagcagacatgcgagcttccagagtgcaatctatgtgatgtcttccaacgttaataaatcacacagcctcccaggagggagacgctggggtgcaacccccagcacacacacaacaacac

SEQ ID NO: 40776 - DNA, 2555 bp, Homo sapiens
atcagggcggcgggcgagggcggggcgagggcggggaggtgggcggggacggggcccgcacggcggctacggcctaggtgagcggctcggactcggcggccgcacctgcccaacccaacccgcacggtccggaagtcgccgaggggccgggagcgggaggggacgtcgtcctagagggccggagcgggcgggcggccgaggacccggctcccgcgcaggacggagccgtggctcaggtcggcccctccccaacaccaccccgggcctccgccccttcctgggcctctcggtggagcagggacccgaaccggtgcccatccagtccggtgccatctgaagcccccttcccagaaaatgagccacagagcaagctgaccccagcgacacagccccccagccctactgtatttccgttcctatcaaaaaatggatgactcggagacaggtttcaatctgaaagtcgtcctggtcagtttcaagcagtgtctcgatgagaaggaagaggtcttgctggacccctacattgccagctggaagggcctggtcaggtttctgaacagcctgggcaccatcttctcattcatctccaaggacgtggtctccaagctgcggatcatggagcgcctcaggggcggcccgcagagcgagcactaccgcagcctgcaggccatggtggcccacgagctgagcaaccggctggtggacctggagcgccgctcccaccacccggagtctggctgccggacggtgctgcgcctgcaccgcgccctgcactggctgcagctgttcctggagggcctgcgtaccagccccgaggacgcacgcacctccgcgctctgcgccgactcctacaacgcctcgctggccgcctaccacccctgggtcgtgcgccgtgccgtcaccgtggccttctgcacgctgcccacacgcgaggtcttcctggaggccatgaacgtggggcccccggagcaggccgtgcagatgctaggcgaggccctccccttcatccagcgtgtctacaacgtctcccagaagctctacgccgagcactccctgctggacctgccctagaggcgggaagccagggccgcaccggctttcctgctgcagatctgggctgcggtggccagggccgtgagtcccgtggcagagccttctgggcgctgcgggaacaggagatcctctgtcgcccctgtgagctgagctggttaggaaccacagactgtgacagagaaggtggcgaccagcccagaagaggcccaccctctcggtccggaacaagacgcctcagccacggctccccctcggcctattacacgcgtgcgcagccaggcctcgccagggtgcggtgcagagcagagcaggcaggggtgggggccgggcccgcaagagcccgaaaggtcgccaccccctagcctgtggggtgcatctgcgaaccagggtgaagtcacaggtcccggggtgtggaggctccatcctttctcctttctgccagccgatgtgtcctcatctcaggcccgtgcctgggaccccgtgtctgcccaggtgggcagccttgagcccaggggactcagtgccctccatgccctggctggcagaaaccctcaacagcagtctgggcactgtggggctctccccgcctctcctgccttgtttgcccctcagcgtgccaggcagactgggggcaggacagccggaagctgagaccaaggctcctcacagaagggcccaggaagtccccgcccttgggacagcctcctccgtagcccctgcacggcaccagttccccgagggacgcagcaggccgcctcccgcagcggccgtgggtctgcacagcccagcccagcccaaggcccccaggagctgggactctgctacacccagtgaaatgctgtgtcccttctcccccgtgccccttgatgccccctccccacagtgctcaggagacccgtggggcacggaacaggagggtctggaccctgtggcccagccaaaggctaccagacagccacaaccagcccagccaccatccagtgcctggggcctggccactggctcttcacagtggaccccagcacctcggggtggcagagggacggcccccacggcccagcagacatgcgagcttccagagtgcaatctatgtgatgtcttccaacgttaataaatcacacagcctcccaggagggagacgctggggtgcaaaaaaaaaaaaaaaaaaaaaaaaaaaaaaaaaaaaaaaaaaaaaaaaaaaaaaaaaaaaaaaaagggggggggcccaaaaaaacccccgagggggggcccgaacagtcgatcgcacgcacccgccccggtgttttttgtgagggaagaagagacggcgcgccccaataaagagagaccggctagcgaatatataaacccgcagtccggcagcgcccgccgtgcgtaaaccaacgaccacgcagcagtagtcgagaaacaaaggcgcaaaacgagagctcgtagtggagaaggcgcacccacacacgggggggggaaaaaagggcgcacgcaaccccacagagataagcacg

SEQ ID NO: 40777 - DNA, 2358 bp, Homo sapiens
atcagggcggcgggcgagggcggggcgagggcggggaggtgggcggggacggggcccgcacggcggctacggcctaggtgagcggctcggactcggcggccgcacctgcccaacccaacccgcacggtccggaagtcgccgaggggccgggagcgggaggggacgtcgtcctagagggccggagcgggcgggcggccgaggacccggctcccgcgcaggacggagccgtggctcaggtcggcccctccccaacaccaccccgggcctccgccccttcctgggcctctcggtggagcagggacccgaaccggtgcccatccagtccggtgccatctgaagcccccttcccaggtttctgaacagcctgggcaccatcttctcattcatctccaaggacgtggtctccaagctgcggatcatggagcgcctcaggggcggcccgcagagcgagcactaccgcagcctgcaggccatggtggcccacgagctgagcaaccggctggtggacctggagcgccgctcccaccacccggagtctggctgccggacggtgctgcgcctgcaccgcgccctgcactggctgcagctgttcctggagggcctgcgtaccagccccgaggacgcacgcacctccgcgctctgcgccgactcctacaacgcctcgctggccgcctaccacccctgggtcgtgcgccgtgccgtcaccgtggccttctgcacgctgcccacacgcgaggtcttcctggaggccatgaacgtggggcccccggagcaggccgtgcagatgctaggcgaggccctccccttcatccagcgtgtctacaacgtctcccagaagctctacgccgagcactccctgctggacctgccctagaggcgggaagccagggccgcaccggctttcctgctgcagatctgggctgcggtggccagggccgtgagtcccgtggcagagccttctgggcgctgcgggaacaggagatcctctgtcgcccctgtgagctgagctggttaggaaccacagactgtgacagagaaggtggcgaccagcccagaagaggcccaccctctcggtccggaacaagacgcctcagccacggctccccctcggcctattacacgcgtgcgcagccaggcctcgccagggtgcggtgcagagcagagcaggcaggggtgggggccgggcccgcaagagcccgaaaggtcgccaccccctagcctgtggggtgcatctgcgaaccagggtgaagtcacaggtcccggggtgtggaggctccatcctttctcctttctgccagccgatgtgtcctcatctcaggcccgtgcctgggaccccgtgtctgcccaggtgggcagccttgagcccaggggactcagtgccctccatgccctggctggcagaaaccctcaacagcagtctgggcactgtggggctctccccgcctctcctgccttgtttgcccctcagcgtgccaggcagactgggggcaggacagccggaagctgagaccaaggctcctcacagaagggcccaggaagtccccgcccttgggacagcctcctccgtagcccctgcacggcaccagttccccgagggacgcagcaggccgcctcccgcagcggccgtgggtctgcacagcccagcccagcccaaggcccccaggagctgggactctgctacacccagtgaaatgctgtgtcccttctcccccgtgccccttgatgccccctccccacagtgctcaggagacccgtggggcacggaacaggagggtctggaccctgtggcccagccaaaggctaccagacagccacaaccagcccagccaccatccagtgcctggggcctggccactggctcttcacagtggaccccagcacctcggggtggcagagggacggcccccacggcccagcagacatgcgagcttccagagtgcaatctatgtgatgtcttccaacgttaataaatcacacagcctcccaggagggagacgctggggtgcaaaaaaaaaaaaaaaaaaaaaaaaaaaaaaaaaaaaaaaaaaaaaaaaaaaaaaaaaaaaaaaaagggggggggcccaaaaaaacccccgagggggggcccgaacagtcgatcgcacgcacccgccccggtgttttttgtgagggaagaagagacggcgcgccccaataaagagagaccggctagcgaatatataaacccgcagtccggcagcgcccgccgtgcgtaaaccaacgaccacgcagcagtagtcgagaaacaaaggcgcaaaacgagagctcgtagtggagaaggcgcacccacacacgggggggggaaaaaagggcgcacgcaaccccacagagataagcacg

SEQ ID NO: 40778 - DNA, 2531 bp, Homo sapiens
gggaaaggcctggaggtgtctgggtcaccttcctgggctggcaagctgcctgcctcctgcacagccactgcccttcctgttgttcccgagccaccagccacagctctgagaagctcctggcagcttctgtttgccactggctcgaatctgggcaggaaggcaaggcccgcagaatatctggtgaccaagaaggaaaccccagagcctcagagaccatcttctcagtggacaaaattaaggcccgaggaggggaggggcgtgctggaagtctatgggactgcatctttctgaggcccaggagcagccatcccccacacctgaagcccgaaaatgagccacagagcaagctgaccccagcgacacagccccccagccctactgtatttccgttcctatcaaaaaatggatgactcggagacaggtttcaatctgaaagtcgtcctggtcagtttcaagcagtgtctcgatgagaaggaagaggtcttgctggacccctacattgccagctggaagggcctggtcaggtttctgaacagcctgggcaccatcttctcattcatctccaaggacgtggtctccaagctgcggatcatggagcgcctcaggggcggcccgcagagcgagcactaccgcagcctgcaggccatggtggcccacgagctgagcaaccggctggtggacctggagcgccgctcccaccacccggagtctggctgccggacggtgctgcgcctgcaccgcgccctgcactggctgcagctgttcctggagggcctgcgtaccagccccgaggacgcacgcacctccgcgctctgcgccgactcctacaacgcctcgctggccgcctaccacccctgggtcgtgcgccgtgccgtcaccgtggccttctgcacgctgcccacacgcgaggtcttcctggaggccatgaacgtggggcccccggagcaggccgtgcagatgctaggcgaggccctccccttcatccagcgtgtctacaacgtctcccagaagctctacgccgagcactccctgctggacctgccctagaggcgggaagccagggccgcaccggctttcctgctgcagatctgggctgcggtggccagggccgtgagtcccgtggcagagccttctgggcgctgcgggaacaggagatcctctgtcgcccctgtgagctgagctggttaggaaccacagactgtgacagagaaggtggcgaccagcccagaagaggcccaccctctcggtccggaacaagacgcctcagccacggctccccctcggcctattacacgcgtgcgcagccaggcctcgccagggtgcggtgcagagcagagcaggcaggggtgggggccgggcccgcaagagcccgaaaggtcgccaccccctagcctgtggggtgcatctgcgaaccagggtgaagtcacaggtcccggggtgtggaggctccatcctttctcctttctgccagccgatgtgtcctcatctcaggcccgtgcctgggaccccgtgtctgcccaggtgggcagccttgagcccaggggactcagtgccctccatgccctggctggcagaaaccctcaacagcagtctgggcactgtggggctctccccgcctctcctgccttgtttgcccctcagcgtgccaggcagactgggggcaggacagccggaagctgagaccaaggctcctcacagaagggcccaggaagtccccgcccttgggacagcctcctccgtagcccctgcacggcaccagttccccgagggacgcagcaggccgcctcccgcagcggccgtgggtctgcacagcccagcccagcccaaggcccccaggagctgggactctgctacacccagtgaaatgctgtgtcccttctcccccgtgccccttgatgccccctccccacagtgctcaggagacccgtggggcacggaacaggagggtctggaccctgtggcccagccaaaggctaccagacagccacaaccagcccagccaccatccagtgcctggggcctggccactggctcttcacagtggaccccagcacctcggggtggcagagggacggcccccacggcccagcagacatgcgagcttccagagtgcaatctatgtgatgtcttccaacgttaataaatcacacagcctcccaggagggagacgctggggtgcaaaaaaaaaaaaaaaaaaaaaaaaaaaaaaaaaaaaaaaaaaaaaaaaaaaaaaaaaaaaaaaaagggggggggcccaaaaaaacccccgagggggggcccgaacagtcgatcgcacgcacccgccccggtgttttttgtgagggaagaagagacggcgcgccccaataaagagagaccggctagcgaatatataaacccgcagtccggcagcgcccgccgtgcgtaaaccaacgaccacgcagcagtagtcgagaaacaaaggcgcaaaacgagagctcgtagtggagaaggcgcacccacacacgggggggggaaaaaagggcgcacgcaaccccacagagataagcacg

SEQ ID NO: 40779 - DNA, 2017 bp, Homo sapiens
atcagggcggcgggcgagggcggggcgagggcggggaggtgggcggggacggggcccgcacggcggctacggcctaggtgagcggctcggactcggcggccgcacctgcccaacccaacccgcacggtccggaagtcgccgaggggccgggagcgggaggggacgtcgtcctagagggccggagcgggcgggcggccgaggacccggctcccgcgcaggacggagccgtggctcaggtcggcccctccccaacaccaccccgggcctccgccccttcctgggcctctcggtggagcagggacccgaaccggtgcccatccagtccggtgccatctgaagcccccttcccagaaaatgagccacagagcaagctgaccccagcgacacagccccccagccctactgtatttccgttcctatcaaaaaatggatgactcggagacaggtttcaatctgaaagtcgtcctggtcagtttcaagcagtgtctcgatgagaaggaagaggtcttgctggacccctacattgccagctggaagggcctggtcaggtttctgaacagcctgggcaccatcttctcattcatctccaaggacgtggtctccaagctgcggatcatggagcgcctcaggggcggcccgcagagcgagcactaccgcagcctgcaggccatggtggcccacgagctgagcaaccggctggtggacctggagcgccgctcccaccacccggagtctggctgccggacggtgctgcgcctgcaccgcgccctgcactggctgcagctgttcctggagggcctgcgtaccagccccgaggacgcacgcacctccgcgctctgcgccgactcctacaacgcctcgctggccgcctaccacccctgggtcgtgcgccgtgccgtcaccgtggccttctgcacgctgcccacacgcgaggtcttcctggaggccatgaacgtggggcccccggagcaggccgtgcagatgctaggcgaggccctccccttcatccagcgtgtctacaacgtctcccagaagctctacgccgagcactccctgctggacctgccctagaggcgggaagccagggccgcaccggctttcctgctgcagatctgggctgcggtggccagggccgtgagtcccgtggcagagccttctgggcgctgcgggaacaggagatcctctgtcgcccctgtgagctgagctggttaggaaccacagactgtgacagagaaggtggcgaccagcccagaagaggcccaccctctcggtccggaacaagacgcctcagccacggctccccctcggcctattacacgcgtgcgcagccaggcctcgccagggtgcggtgcagagcagagcaggcaggggtgggggccgggcccgcaagagcccgaaaggtcgccaccccctagcctgtggggtgcatctgcgaaccagggtgaagtcacaggtcccggggtgtggaggctccatcctttctcctttctgccagccgatgtgtcctcatctcaggcccgtgcctgggaccccgtgtctgcccaggtgggcagccttgagcccaggggactcagtgccctccatgccctggctggcagaaaccctcaacagcagtctgggcactgtggggctctccccgcctctcctgccttgtttgcccctcagcgtgccaggcagactgggggcaggacagccggaagctgagaccaaggctcctcacagaagggcccaggaagtccccgcccttgggacagcctcctccgtagcccctgcacggcaccagttccccgagggacgcagcaggccgcctcccgcagcggccgtgggtctgcacagcccagcccagcccaaggcccccaggagctgggactctgctacacccagtgaaatgctgtgtcccttctcccccgtgccccttgatgccccctccccacagtgctcaggagacccgtggggcacggaacaggagggtctggaccctgtggatcctaaatctccgggccgtaccagcctgctt

SEQ ID NO: 40780 - DNA, 2045 bp, Homo sapiens
atcagggcggcgggcgagggcggggcgagggcggggaggtgggcggggacggggcccgcacggcggctacggcctaggtgagcggctcggactcggcggccgcacctgcccaacccaacccgcacggtccggaagtcgccgaggggccgggagcgggaggggacgtcgtcctagagggccggagcgggcgggcggccgaggacccggctcccgcgcaggacggagccgtggctcaggtcggcccctccccaacaccaccccgggcctccgccccttcctgggcctctcggtggagcagggacccgaaccggtgcccatccagtccggtgccatctgaagcccccttcccagaaaatgagccacagagcaagctgaccccagcgacacagccccccagccctactgtatttccgttcctatcaaaaaatggatgactcggagacaggtttcaatctgaaagtcgtcctggtcagtttcaagcagtgtctcgatgagaaggaagaggtcttgctggacccctacattgccagctggaagggcctggtcaggtttctgaacagcctgggcaccatcttctcattcatctccaaggacgtggtctccaagctgcggatcatggagcgcctcaggggcggcccgcagagcgagcactaccgcagcctgcaggccatggtggcccacgagctgagcaaccggctggtggacctggagcgccgctcccaccacccggagtctggctgccggacggtgctgcgcctgcaccgcgccctgcactggctgcagctgttcctggagggcctgcgtaccagccccgaggacgcacgcacctccgcgctctgcgccgactcctacaacgcctcgctggccgcctaccacccctgggtcgtgcgccgtgccgtcaccgtggccttctgcacgctgcccacacgcgaggtcttcctggaggccatgaacgtggggcccccggagcaggccgtgcagatgctaggcgaggccctccccttcatccagcgtgtctacaacgtctcccagaagctctacgccgagcactccctgctggacctgccctagaggcgggaagccagggccgcaccggctttcctgctgcagatctgggctgcggtggccagggccgtgagtcccgtggcagagccttctgggcgctgcgggaacaggagatcctctgtcgcccctgtgagctgagctggttaggaaccacagactgtgacagagaaggtggcgaccagcccagaagaggcccaccctctcggtccggaacaagacgcctcagccacggctccccctcggcctattacacgcgtgcgcagccaggcctcgccagggtgcggtgcagagcagagcaggcaggggtgggggccgggcccgcaagagcccgaaaggtcgccaccccctagcctgtggggtgcatctgcgaaccagggtgaagtcacaggtcccggggtgtggaggctccatcctttctcctttctgccagccgatgtgtcctcatctcaggcccgtgcctgggaccccgtgtctgcccaggtgggcagccttgagcccaggggactcagtgccctccatgccctggctggcagaaaccctcaacagcagtctgggcactgtggggctctccccgcctctcctgccttgtttgcccctcagcgtgccaggcagactgggggcaggacagccggaagctgagaccaaggctcctcacagaagggcccaggaagtccccgcccttgggacagcctcctccgtagcccctgcacggaacaggagggtctggaccctgtggcccagccaaaggctaccagacagccacaaccagcccagccaccatccagtgcctggggcctggccactggctcttcacagtggaccccagcacctcggggtggcagagggacggcccccacggcccagcagacatgcgagcttccagagtgcaatctatgtgatgtcttccaacgttaataaatcacacagcctcccaggagggagacgctggggtgcaacccccagcacacacacaacaacac

SEQ ID NO: 40781 - DNA, 1084 bp, Homo sapiens
  misc_feature (504)..(504): n is a, c, g, or t
  misc_feature (568)..(568): n is a, c, g, or t
cgggcccggtgagtccccggttgtccaagaagcgtttcctggggcgacagccgggaaacagggagatccgttctggtggccccctgttaagctggaagcctagcgttaggaacgcacaggactgtgacaggagaaaggctggcgaaccagccccagaaaggagcgcccgaccgctgcgtcggttccgggaatcaagaccgccttcaagcccacaggcgtcgcccgtctggcgcatacttaacacggcggtgccgctagtcctaggggcctccgtccaagtggtcgacggttgcaagagtcaagaaggcaagggcagtggggcttgggggaccggggccacggccaaagtagcgccagataagcatacggccaagccgctccttagcccatgtcgggggctcgcatccctagcgaacccaacgggctgaagtgccacaagggtcccgggcgtgtagtgaaaggcgtcctatgccatttgcgtccgtctatcgtggccaagccgantggtagtcgcatcaatctgcacggccgcagtagcacttgcgggaccaccgttgatcgtgtcacncaaggtaggggaacaagcccgtgtgaagacacccaggggactcagtgccctccatgccctggctggcagaaaccctcaacagcagtctgggcactgtggggctctccccgcctctcctgccttgtttgcccctcagcgtgccaggcagactgggggcaggacagccggaagctgagaccaaggctcctcacagaagggcccaggaagtccccgcccttgggacagcctcctccgtagcccctgcacggaacaggagggtctggaccctgtggcccagccaaaggctaccagacagccacaaccagcccagccaccatccagtgcctggggcctggccactggctcttcacagtggaccccagcacctcggggtggcagagggacggcccccacggcccagcagacatgcgagcttccagagtgcaatctatgtgatgtcttccaacgttaataaatcacacagcctcccaggagggagacgctggggtgcaacccccagcacacacacaacaacac

SEQ ID NO: 40782 - DNA, 1541 bp, Homo sapiens
ttttttttttaatttaatcagtaactttattataacaaaacctgtatattacccatttaaactcatgtgtaacattcagtgatgtgagctgtattaaacccaggtattagtgaaaatttgcattgtaaaacctggtaacagtagtcatcaaggtgaaccgggagtgcgtgcgcggcctgtgggccgggcagcagcaggagctggtgttcctgcgcaaccgcaaccccgagcgtggcagcatccagaacgccaagcaggcgcttcgcaacatgatcaactcctcctgtgaccagccgctgggctaccccatctacgtgtcgcctctcaccacctcgctggctggcagccacccccagctacgggcactgtggggtggccccatcagcctgggtgccattgcccactggctcctgcgcacctgggagaggcttcacaagggctgtggcgccggctgcaatagtggcgggaacgtggatgattcagactgtagtgggggcggtggcctgacctccctcagcaataacccccccgtggcacaccccacacctgagaacacggcaggcaatggtgaccaacccctcccaccaggccctggctgggggccgcggtcctccctgagtggctctggtgatgggcggcccccacctctgctgcagtggcctccccctcggctccctggaccaccccctgcatcgcctatccccacagagggtccccggacctcacggccccctggcccgggtctcctcagttctgagggccccagtggaaagtggagcctggggggccggaaggggctgggaggatctgacggggagccagcctcagggagccccaaaggaggtacccccaaatctcaggcgcctctagactcagcctcagcctcagcctcagcctcagccccgatgtcagcactgaggcctcaccccccagagcttcccaggacattccttgcttggacagcagtgcccctgagagtggcacacctatgggtgccctgggcgactggcctgcccctattgaggagcgtgagagcccggcagcccagcccctgctggaacaccagtactgagctacctggcgcccactggaccacctcctaggattcagtaacggacctgctctgctgcctctctgctggaccacagaactgagtggctttggcctacatgtctgaaccctgacctttggctgccttggccagagtaccaaaactgagtgacccagacctctgaccttgacccctgatctctctcatccccagtccagggcctgggctccccagatggaggcagtcagcctcccagccaggccctaagagccaaaccatgggctggtcccacttggagcctgtggccaggaccacctcagcccctgggcctgcactgcctgcaggtgtggcccccttggcctggacctggggcctgaattgtgggaagggtggtttctttctttccttttttttcttttcttttttttttttttttttgtgcttcggagacatcagaattaataacactatttttgattttgattggcag

SEQ ID NO: 40783 - DNA, 473 bp, Homo sapiens
ggggggccggaaggggctgggaggatctgacggggagccagcctcagggagccccaaaggaggtacccccaaatctcaggtaaggcacctgtgggagggttgggtcccagaaggctaaggcctgctcacccgccaacctctcccccctcccccaggcgcctctagactcagcctcagcctcagcctcagcctcagccccgatgtcagcactgaggcctcaccccccagagcttcccaggacattccttgcttggacagcagtgcccctgagagtggcacacctatgggtgccctgggcgactggcctgcccctattgaggagcgtgagagcccggcagcccagcccctgctggaacaccagtactgagctacctggcgcccactggaccacctcctaggattcagtaacggacctgctctgctgcctctctgctggaccacagaactgagtggctttggcctacatgtctgaa

SEQ ID NO: 40784 - DNA, 2332 bp, Homo sapiens
ggtggaggctatcaccgagggtgtggaggaggacgagggctgttgctgctgtgaacctggccacctgccacgggtcctgtccttcaatgctgcctttgggcagcgctggctggcttgggaggtaacagccagcaagtacgtgctggagggctatagcattagtgacaataatgctgcctccatgctgcaggttttcgacctccgcaagatcctcatcacctactatgtcaagagcatcatctactacgtgagccgctcaccaaagctggaggtgtggctcagccatgagggcatcacggcagccctgaggcctgtgcgggtgcccggctatgccgactcggatcccaccttctcgctgagtgtggatgaggactatgacctccgcctgtctggcctctcgctgccctccttttgtgctgtgcacctcgagtggatccagtactgcgcctcccggcgcagccagcccgtggaccaggattggaactccccgctggtcacgctgtgttttggcctgtgtgtgctgggccgccgggccctgggacagcctctcacagcatgtctgcaagcctggagcccttcctctacggcctgcacgccctgttcaagggggattttcgcatcacctccccacgtgacgagtgggtctttgccgacatggacctgcttcaccgcgttgtggcgcctggggttcgcatggccctcaagcttcaccaggaccacttcacgtccccagatgaatatgaggagccagcagccctatacgatgccattgcggccaacgaggagcggctggtcatctcacatgagggtgacccagcatggcgcagcgccatcctcagcaacacgccctccctgctggctgcgccatgtcctggatgatgcctccgacgagtacaagatcatcatgctcaaccggcgccacctcagcttccgagtcatcaaggtgaaccgggagtgcgtgcgcggcctgtgggccgggcagcagcaggagctggtgttcctgcgcaaccgcaaccccgagcgtggcagcatccagaacgccaagcaggcgcttcgcaacatgatcaactcctcctgtgaccagccgctgggctaccccatctacgtgtcgcctctcaccacctcgctggctggcagccacccccagctacgggcactgtggggtggccccatcagcctgggtgccattgcccactggctcctgcgcacctgggagaggcttcacaagggctgtggcgccggctgcaatagtggcgggaacgtggatgattcagactgtagtgggggcggtggcctgacctccctcagcaataacccccccgtggcacaccccacacctgagaacacggcaggcaatggtgaccaacccctcccaccaggccctggctgggggccgcggtcctccctgagtggctctggtgatgggcggcccccacctctgctgcagtggcctccccctcggctccctggaccaccccctgcatcgcctatccccacagagggtccccggacctcacggccccctggcccgggtctcctcagttctgagggccccagtggaaagtggagcctggggggccggaaggggctgggaggatctgacggggagccagcctcagggagccccaaaggaggtacccccaaatctcaggcgcctctagactcagcctcagcctcagcctcagcctcagccccgatgtcagcactgaggcctcaccccccagagcttcccaggacattccttgcttggacagcagtgcccctgagagtggcacacctatgggtgccctgggcgactggcctgcccctattgaggagcgtgagagcccggcagcccagcccctgctggaacaccagtactgagctacctggcgcccactggaccacctcctaggattcagtaacggacctgctctgctgcctctctgctggaccacagaactgagtggctttggcctacatgtctgaaccctgacctttggctgccttggccagagtaccaaaactgagtgacccagacctctgaccttgacccctgatctctctcatccccagtccagggcctgggctccccagatggaggcagtcagcctcccagccaggccctaagagccaaaccatgggctggtcccacttggagcctgtggccaggaccacctcagcccctgggcctgcactgcctgcaggtgtggcccccttggcctggacctggggcctgaattgtgggaagggtggtttctttctttccttttttttcttttcttttttttttttttttttgtgcttcggagacatcagaattaataacactatttttgattttgattggcag

SEQ ID NO: 40785 - DNA, 3430 bp, Homo sapiens
  misc_feature (1)..(1): n is a, c, g, or t
  misc_feature (241)..(241): n is a, c, g, or t
  misc_feature (3422)..(3422): n is a, c, g, or t
  misc_feature (3424)..(3430): n is a, c, g, or t
ngacacaggtgtgtttgcagtggtgaacagccattccttgtccttgctggggaagctgaccatcagtgctgcctttaacattgtttatatctacacctctgagctttaccctacagtcatcaggaatgttgggcttggaacttgttccatgttctcccgagttggtgggattattgctcccttcatcccctcactgaaatatgtgcaatggtctttaccattcattgtcttcggagccacnggtctgacctccggcctcctgagtttgttattgccggagacccttaacagtccgctgctagaaacattctccgaccttcaggtgtattcgtatcgcaggctgggagaagaagcattatctttacaggctttggacccccaacagtgtgtggacaaggagagctctttagggagtgagagtgaggaagaggaagaattttatgatgcagatgaagagactcagatgatcaagtgaagagccccagattccccctaagaagcaaaggatcgtcttttatgcctctggctaaggcaggttcttccatgactcctaagagagttgtaaaaatagaggcttggcttgaatgtacatagatggtacctggcatggactgatgtttttaggcacagaagttggagaagagatttcatgaaagacaacatcactgcattgagagaatagttgttaatttgtttagaatttaagttctactcagaatcataacatctggcagaacagcccaaacccacattccaaagtggtaggctcatttgtttctagagatttcatcatgtcgcttttccttcatcatgatctaaataaaggcagatatgtaaaatttctcaccattttggtggggtaagataagctattattaagatttaatccttataccatgttggacatttgcccctatcagttgctcctcaggaatcttctggtacaggttaacatcagcattttcattttgtatccagggaaaagcacccagaggtcatctgtgtgtcccgagaccctccagctttttcttagctgatgaaatatgagtcctcagcttggttcccagcctgctgattgacttgggctgctggtgccttgagtcccacagatgattcattaggaaaagccagatgtaccaaagcggtttactcagagtcaggggtgtagctctggctgcctgtcagctcccttggatactatattgtatgatttcttcctttcccactaatatgcacatccagaaaaatttccatctgagattctagtacttcaaaatcatgcatagtaaatgagaaagctttaagtagagggcagttaaacagtgacatgttgagcacctggaggaaaaaaaaggtgcagtttttaataagagagaaaatgaaattatctttgataaatttttgtttgttttgctttcagcattgtgccatgagggatttggacaatatttaagaacttcttgtcctagatcagccccaatctgtttaatcaaaatggaaggttcagtaatttcatgggaaaccttggtttttcattaagtgctaccaactttcaagtgaatcttgtatttgatttcctaaaatcatgtcttgaaaacatgttttctcatgaaacttgaatactatctcaaataggaatataaacctggagtcaacaagcttaggcagcattgatttaggtcactttcccagtgaggaaaatttctgtgttttcagaatttccatttctactaacctcttggagaaaaagaaattgaattagaggtaaatagaagacgtcactgtggctgcttctggaagtgctggaagcatcaccccaattggctccaaatactgtcatgttttcttgcacactgacttctggtttccactgtatcagtatgtacctttgtaattgttatttttatgtcttttatgcccttgattattagttgggctcttcataaacagaggccatctctactactgtttatttttccctgctgtgcccagaacattggcgtagacacagtaagaacctagtaaatattactgtttctagccatcagggagattgtggaactcctcccagtataatttttacaaactccaagcaaatctgacccaaactcccaaattgtcaagtcctgcttaactttctctggaaaatagaccccttctcaacatcagaataggaagagaggaagaacttacaaagacacttaaaagttattcttaaatggtggttgggcatttaaaacagtgaactaacatatatataatttttgattagttggagctttctttgtattatgagagtaatatatctcattacagaaaatttggaaactataaatttagaaacgtatcacccatacgtccaacatcgaaagaaaaccagtgttatgactttgttccatttgaagactaattgggagtccatctctctattggcactgggttcgattgcccctggctaatagagttcaattagttctatccctgggtttcctttcttagctatggggtggaagataggagggggagatctacaatttgaatatgtgttacttaataaggctaggctggccatcagttgcttatttcagatgtgtcactaaattttccttctagatggtccttgagcaaaacttaataattactgttttttatttccactgcctttataaaatcaaaattttctccttttgataaaaactgttgaatactattgatgtagagaatgtgtatatgtgtatatttgcattgattaaattattggaaaacttttcattgacaggtaatgtattttggttgtgcggatggtttgtaaaaagtatcctgtttttttaattctattcaaaattaaaaattttttttcctaaaataaagcaagaaaaataaatgtaagatatataagaaaccccagagtttccagggtgaaagttcacattagcagcttgtccaaaatatttacacctcacaaatattttgaaagaaaccatgttgaaattttctgattttgtgagttacaaccacagcccagtaaaaccaatacttgttatttggctactttcaagcaatgcagatattctttagtatttaaaaatgagcaaataaacaaaatgaggcaaataaatgaagaaaatgagtttctgagacactgtttaggtaaccataaatcagacagatatttttatggtgggcaaattgatgaagatacttttagtaggtgatttatattcataacaaatacatattgaaataattgtcactactgtatcagaattaaaaaccagcttcacattaggacttctccatacaaatgctttatcattggttcttaaattggaaaaatatctataaatgattacatttttaagctaaataaaatgcagatattttggcttcttgtgaatgtaataaagaatcataaaacatanannnnnnn

SEQ ID NO: 40786 - DNA, 2772 bp, Homo sapiens
  misc_feature (1)..(1): n is a, c, g, or t
  misc_feature (241)..(241): n is a, c, g, or t
ngacacaggtgtgtttgcagtggtgaacagccattccttgtccttgctggggaagctgaccatcagtgctgcctttaacattgtttatatctacacctctgagctttaccctacagtcatcaggaatgttgggcttggaacttgttccatgttctcccgagttggtgggattattgctcccttcatcccctcactgaaatatgtgcaatggtctttaccattcattgtcttcggagccacnggtctgacctccggcctcctgagtttgttattgccggagacccttaacagtccgctgctagaaacattctccgaccttcaggtgtattcgtatcgcaggctgggagaagaagcattatctttacaggctttggacccccaacagtgtgtggacaaggagagctctttagggagtgagagtgaggaagaggaagaattttatgatgcagatgaagagactcagatgatcaagtgaagagccccagattccccctaagaagcaaaggatcgtcttttatgcctctggctaaggcaggttcttccatgactcctaagagagttgtaaaaatagaggcttggcttgaatgtacatagatggtacctggcatggactgatgtttttaggcacagaagttggagaagagatttcatgaaagacaacatcactgcattgagagaatagttgttaatttgtttagaatttaagttctactcagaatcataacatctggcagaacagcccaaacccacattccaaagtggtaggctcatttgtttctagagatttcatcatgtcgcttttccttcatcatgatctaaataaaggcagatatgtaaaatttctcaccattttggtggggtaagataagctattattaagatttaatccttataccatgttggacatttgcccctatcagttgctcctcaggaatcttctggtacaggttaacatcagcattttcattttgtatccagggaaaagcacccagaggtcatctgtgtgtcccgagaccctccagctttttcttagctgatgaaatatgagtcctcagcttggttcccagcctgctgattgacttgggctgctggtgccttgagtcccacagatgattcattaggaaaagccagatgtaccaaagcggtttactcagagtcaggggtgtagctctggctgcctgtcagctcccttggatactatattgtatgatttcttcctttcccactaatatgcacatccagaaaaatttccatctgagattctagtacttcaaaatcatgcatagtaaatgagaaagctttaagtagagggcagttaaacagtgacatgttgagcacctggaggaaaaaaaaggtgcagtttttaataagagagaaaatgaaattatctttgataaatttttgtttgttttgctttcagcattgtgccatgagggatttggacaatatttaagaacttcttgtcctagatcagccccaatctgtttaatcaaaatggaaggttcagtaatttcatgggaaaccttggtttttcattaagtgctaccaactttcaagtgaatcttgtatttgatttcctaaaatcatgtcttgaaaacatgttttctcatgaaacttgaatactatctcaaataggaatataaacctggagtcaacaagcttaggcagcattgatttaggtcactttcccagtgaggaaaatttctgtgttttcagaatttccatttctactaacctcttggagaaaaagaaattgaattagaggtaaatagaagacgtcactgtggctgcttctggaagtgctggaagcatcaccccaattggctccaaatactgtcatgttttcttgcacactgacttctggtttccactgtatcagtatgtacctttgtaattgttatttttatgtcttttatgcccttgattattagttgggctcttcataaacagaggccatctctactactgtttatttttccctgctgtgcccagaacattggcgtagacacagtaagaacctagtaaatattactgtttctagccatcagggagattgtggaactcctcccagtataatttttacaaactccaagcaaatctgacccaaactcccaaattgtcaagtcctgcttaactttctctggaaaatagaccccttctcaacatcagaataggaagagaggaagaacttacaaagacacttaaaagttattcttaaatggtggttgggcatttaaaacagtgaactaacatatatataatttttgattagttggagctttctttgtattatgagagtaatatatctcattacagaaaatttggaaactataaatttagaaacgtatcacccatacgtccaacatcgaaagaaaaccagtgttatgactttgttccatttgaagactaattgggagtccatctctctattggcactgggttcgattgcccctggctaatagagttcaattagttctatccctgggtttcctttcttagctatggggtggaagataggagggggagatctacaatttgaatatgtgttacttaataaggctaggctggccatcagttgcttatttcagatgtgtcactaaattttccttctagatggtccttgagcaaaacttaataattactgttttttatttccactgcctttataaaatcaaaattttctccttttgataaaaactgttgaatactattgatgtagagaatgtgtatatgtgtatatttgcattgattaaattattggaaaacttttca

SEQ ID NO: 40787 - DNA, 2718 bp, Homo sapiens
  misc_feature (1)..(1): n is a, c, g, or t
  misc_feature (241)..(241): n is a, c, g, or t
ngacacaggtgtgtttgcagtggtgaacagccattccttgtccttgctggggaagctgaccatcagtgctgcctttaacattgtttatatctacacctctgagctttaccctacagtcatcaggaatgttgggcttggaacttgttccatgttctcccgagttggtgggattattgctcccttcatcccctcactgaaatatgtgcaatggtctttaccattcattgtcttcggagccacnggtctgacctccggcctcctgagtttgttattgccggagacccttaacagtccgctgctagaaacattctccgaccttcaggtgtattcgtatcgcaggctgggagaagaagcattatctttacaggctttggacccccaacagtgtgtggacaaggagagctctttagggagtgagagtgaggaagaggaagaattttatgatgcagatgaagagactcagatgatcaagtgaagagccccagattccccctaagaagcaaaggatcgtcttttatgcctctggctaaggcaggttcttccatgactcctaagagagttgtaaaaatagaggcttggcttgaatgtacatagatggtacctggcatggactgatgtttttaggcacagaagttggagaagagatttcatgaaagacaacatcactgcattgagagaatagttgttaatttgtttagaatttaagttctactcagaatcataacatctggcagaacagcccaaacccacattccaaagtggtaggctcatttgtttctagagatttcatcatgtcgcttttccttcatcatgatctaaataaaggcagatatgtttataccatgttggacatttgcccctatcagttgctcctcaggaatcttctggtacaggttaacatcagcattttcattttgtatccagggaaaagcacccagaggtcatctgtgtgtcccgagaccctccagctttttcttagctgatgaaatatgagtcctcagcttggttcccagcctgctgattgacttgggctgctggtgccttgagtcccacagatgattcattaggaaaagccagatgtaccaaagcggtttactcagagtcaggggtgtagctctggctgcctgtcagctcccttggatactatattgtatgatttcttcctttcccactaatatgcacatccagaaaaatttccatctgagattctagtacttcaaaatcatgcatagtaaatgagaaagctttaagtagagggcagttaaacagtgacatgttgagcacctggaggaaaaaaaaggtgcagtttttaataagagagaaaatgaaattatctttgataaatttttgtttgttttgctttcagcattgtgccatgagggatttggacaatatttaagaacttcttgtcctagatcagccccaatctgtttaatcaaaatggaaggttcagtaatttcatgggaaaccttggtttttcattaagtgctaccaactttcaagtgaatcttgtatttgatttcctaaaatcatgtcttgaaaacatgttttctcatgaaacttgaatactatctcaaataggaatataaacctggagtcaacaagcttaggcagcattgatttaggtcactttcccagtgaggaaaatttctgtgttttcagaatttccatttctactaacctcttggagaaaaagaaattgaattagaggtaaatagaagacgtcactgtggctgcttctggaagtgctggaagcatcaccccaattggctccaaatactgtcatgttttcttgcacactgacttctggtttccactgtatcagtatgtacctttgtaattgttatttttatgtcttttatgcccttgattattagttgggctcttcataaacagaggccatctctactactgtttatttttccctgctgtgcccagaacattggcgtagacacagtaagaacctagtaaatattactgtttctagccatcagggagattgtggaactcctcccagtataatttttacaaactccaagcaaatctgacccaaactcccaaattgtcaagtcctgcttaactttctctggaaaatagaccccttctcaacatcagaataggaagagaggaagaacttacaaagacacttaaaagttattcttaaatggtggttgggcatttaaaacagtgaactaacatatatataatttttgattagttggagctttctttgtattatgagagtaatatatctcattacagaaaatttggaaactataaatttagaaacgtatcacccatacgtccaacatcgaaagaaaaccagtgttatgactttgttccatttgaagactaattgggagtccatctctctattggcactgggttcgattgcccctggctaatagagttcaattagttctatccctgggtttcctttcttagctatggggtggaagataggagggggagatctacaatttgaatatgtgttacttaataaggctaggctggccatcagttgcttatttcagatgtgtcactaaattttccttctagatggtccttgagcaaaacttaataattactgttttttatttccactgcctttataaaatcaaaattttctccttttgataaaaactgttgaatactattgatgtagagaatgtgtatatgtgtatatttgcattgattaaattattggaaaacttttca

SEQ ID NO: 40788 - DNA, 2713 bp, Homo sapiens
  misc_feature (1)..(1): n is a, c, g, or t
  misc_feature (241)..(241): n is a, c, g, or t
ngacacaggtgtgtttgcagtggtgaacagccattccttgtccttgctggggaagctgaccatcagtgctgcctttaacattgtttatatctacacctctgagctttaccctacagtcatcaggaatgttgggcttggaacttgttccatgttctcccgagttggtgggattattgctcccttcatcccctcactgaaatatgtgcaatggtctttaccattcattgtcttcggagccacnggtctgacctccggcctcctgagtttgttattgccggagacccttaacagtccgctgctagaaacattctccgaccttcaggtgtattcgtatcgcaggctgggagaagaagcattatctttacaggctttggacccccaacagtgtgtggacaaggagagctctttagggagtgagagtgaggaagaggaagaattttatgatgcagatgaagagactcagatgatcaagtgaagagccccagattccccctaagaagcaaaggatcgtcttttatgcctctggctaaggcaggttcttccatgactcctaagagagttgtaaaaatagaggcttggcttgaatgtacatagatggtacctggcatggactgatgtttttaggcacagaagttggagaagagatttcatgaaagacaacatcactgcattgagagaatagttgttaatttgtttagaatttaagttctactcagaatcataacatctggcagaacagcccaaacccacattccaaagtggtaggctcatttgtttctagagatttcatcatgtcgcttttccttcatcatgatctaaataaaggcagatatgtaaaatttctcaccattttggtggggtaagataagctattattaagatttaatccttataccatgttggacatttgcccctatcagttgctcctcaggaatcttctggtacaggttaacatcagcattttcattttgtatccagggaaaagcacccagaggtcatctgtgtgtcccgagaccctccagctttttcttagctgatgaaatatgagtcctcagcttggttcccagcctgctgattgacttgggctgctggtgccttgagtcccacagatgattcattaggaaaagccagatgtaccaaagcggtttactcagagtcaggggtgtagctctggctgcctgtcagctcccttggatactatattgtatgatttcttcctttcccactaatatgcacatccagaaaaatttccatctgagattctagtacttcaaaatcatgcatagtaaatgagaaagctttaagtagagggcagttaaacagtgacatgttgagcacctggaggtttgttttgctttcagcattgtgccatgagggatttggacaatatttaagaacttcttgtcctagatcagccccaatctgtttaatcaaaatggaaggttcagtaatttcatgggaaaccttggtttttcattaagtgctaccaactttcaagtgaatcttgtatttgatttcctaaaatcatgtcttgaaaacatgttttctcatgaaacttgaatactatctcaaataggaatataaacctggagtcaacaagcttaggcagcattgatttaggtcactttcccagtgaggaaaatttctgtgttttcagaatttccatttctactaacctcttggagaaaaagaaattgaattagaggtaaatagaagacgtcactgtggctgcttctggaagtgctggaagcatcaccccaattggctccaaatactgtcatgttttcttgcacactgacttctggtttccactgtatcagtatgtacctttgtaattgttatttttatgtcttttatgcccttgattattagttgggctcttcataaacagaggccatctctactactgtttatttttccctgctgtgcccagaacattggcgtagacacagtaagaacctagtaaatattactgtttctagccatcagggagattgtggaactcctcccagtataatttttacaaactccaagcaaatctgacccaaactcccaaattgtcaagtcctgcttaactttctctggaaaatagaccccttctcaacatcagaataggaagagaggaagaacttacaaagacacttaaaagttattcttaaatggtggttgggcatttaaaacagtgaactaacatatatataatttttgattagttggagctttctttgtattatgagagtaatatatctcattacagaaaatttggaaactataaatttagaaacgtatcacccatacgtccaacatcgaaagaaaaccagtgttatgactttgttccatttgaagactaattgggagtccatctctctattggcactgggttcgattgcccctggctaatagagttcaattagttctatccctgggtttcctttcttagctatggggtggaagataggagggggagatctacaatttgaatatgtgttacttaataaggctaggctggccatcagttgcttatttcagatgtgtcactaaattttccttctagatggtccttgagcaaaacttaataattactgttttttatttccactgcctttataaaatcaaaattttctccttttgataaaaactgttgaatactattgatgtagagaatgtgtatatgtgtatatttgcattgattaaattattggaaaacttttca

SEQ ID NO: 40789 - DNA, 2087 bp, Homo sapiens
ttcaaattcacttattctagtagtttgtagattcctttgaattttttatgtctgtaatcatagaagcattctatgcttgtgcagataaagcatttttcagtgttaaaagttttattgacttctttttctggagtttccatcttctcattttgtcttctccttttggtatcaagtgctaagaatagcaccacttggaaatatgacaggactgcagccagtgtggataattatcattttcaactacagatctctctcagccttgtctgcttatcacactggcttgatcgcgcccatgaagatccgcacagaggcccctgggaaccttcgtttatacagtgggagccccactcgcagcgagaaagagcaggtctccatcagctccttctactacaaggagcggaaatcaagacgatggaaaagtaagcgtgagggatcagactctggcaatcgacagatcaaggctgctgggaaagtcatcatccaggatattgcttgcctcctgcctgttcacaaatcgctgggagagctgtacatattgaatgtgaatgatattcaggaaacatgtcagaagaatgccgcctctgccttgctcgttggaagaaaggatcttgtccaggtttggtcgctggctacggtagctacagatctttgccttggtccgaaatctgacccagatttggaaacaccctgggctcgacatccatttgggcggcagctgctggagtccctgttggctcactattgccggctccgggatgttcagacactggcgatgctctgtagcgtgtttgaagcccagtctcggcctcaggggctaccaaacccctttgggccttttcctaaccgttcttctaatcttgtggtgtcccatagtcgatatcctagctttacctcttctggttcctgctccagtatgtcagacccagggctcaacactggcggctggaacatagcgggaagagaggcagagcacttgtcctccccttggggagaatcctcaccagaagagctccgctttgggagtctgacctacagtgatccccgtgagcgagaacgcgaccagcatgataaaaataaaaggctcctggaccccgccaatacccagcaatttgatgactttaagaaatgctatggggaaatcctctaccgttggggtctgagagagaagcgagctgaagtgttgaagtttgtctcctgtcctcctgaccctcacaaagggatcgagttcggcgtgtactgcagccactgccggagtgaggtccgtggcacgcagtgtgccatctgcaaaggcttcacgttccagtgtgccatctgtcacgtggctgtgcggggatcgtccaatttctgcctgacctgtgggcacggtggccacaccagccacatgatggagtggtttcggacccaggaggtgtgtcccaccgggtgtgggtgccactgcctgcttgaaagcactttctgaacctacagaagttgggtattgtctgaaatcccagaggacccataagtgccggtgacaagctgtctgtcaggggagaggctccagaacctgggttcgtccccagtgagaccggaggatgatcccccaaggactgcgcagcatcagctcttggtgggcctctgccttctcttctgtttggccacctggtgtggatgtcactgtgtgaagataaggacagaagtgcagagctgcgctttgtgtgttgtctatgtcggctgagctaccaaggtggaagttttcatggagaaaagcacctggctccagggccagtgttacagtgttaccctgtaaggtgttagccttaaaccaccgagcagcgttctcttgatgccagtgcagagaccagagtcagatgcccgaggacagtgggtaggaatttcatcaacaaatggacctatggcatcatggctttagaagctggtacatttactgagctgatggacagtggccttctaaaatatgacacttaaattgtaaatatgcactgtacttaaggattcttaagatgtatttttttgttatttctcctccagctgctatcccttggctaataaaattctagtaatttgaaaaaaaaaaaaagagagaa

SEQ ID NO: 40790 - DNA, 508 bp, Homo sapiens
gtgctgggattccaggcatgagccacaacggcccagcccatcatttgcgttagcatcatgtgtgtgtacttagtgatcaagttctcttagtaataaatacctgcgcaaaaaggcaagggtaggagagagttctatttagttatatttctcagaatattcagcctcgcttaacatttcttctgggaaatccattggccacatgctgtcttatgagactcttcagatattttccatgccttctctgattgccatcttcccttcccatttgattttcttcagcgggaagagaggcagagcacttgtcctccccttggggagaatcctcaccagaagagctccgctttgggagtctgacctacagtgatccccgtgagcgagaacgcgaccagcatgataaaaataaaaggtaaccaccctcccaggtgagagctgcaatgccaggactccaggcaggactccagtttctccacaatcacaactcttacttttttttttttttggacacaga

SEQ ID NO: 40791 - DNA, 458 bp, Homo sapiens
aatcatgcaccactcggaaatatgaccaggaactgcagccagtgtggataattatcattttcaactacagatctctctcagccttgtctgcttatcacactggcttgatcgcgcccatgaagatccgcacagaggcccctgggaaccttcgtttatacagtgggagccccactcgcagcgagaaagagcaggtctccatcagctccttctactacaaggagcgggtaagtgccagagccgcagcctttgattcttaccccttctcctggattcttgttcctcatctcctgcctggcgcagcagctagattagtaatcaccctgtagcctttcactttcgtaatcagtttgttcaagaaagtcattactttgttcctttcagttggttttacctgctataaattgtgtgtgtatgggtcggggggcagttcttatggtccgtaatctttactccccatt

SEQ ID NO: 40792 - DNA, 642 bp, Homo sapiens
agccgacctcttaggccccgtcgggggagggaagacgaccatcgggggcaatcggggcgagcatggacggagtttcggggctccctacgcgggtaggggagtggggtccgccttgtgacactgaggcagagactgcgcatcgtgagtgctgaggggaggcttcccacaatcagggtacggagcgagggcgtgacggcttcccgaggccctagccgcgtgtggcgacttaaggcaactgcgatgtctgtggactgtcttgggcagcatgcagtgctttctggccgcagattcttatacatcgtcaatctagatgcccctttcgaaggtcaccgaaagatctctcgccagagcaaatgggacattggagctgtgcagtggaatcctcatgacagctttgcacactattttgcggcttcgagtaaccaacgagtagacctttacaagtggaaagacggcagtggggaagttggcacaaccttacaaggccacactcgtgtcatcagcgacttggactgggcggtgtttgagcctgacctcctggttaccagctctgtggacacctacatctacatttgggatatcaaagacacaaggaaacctacttgtcgcactgtcctgctgtcgccgggctgcctcccaggc

SEQ ID NO: 40793 - DNA, 3871 bp, Homo sapiens
cttggactacaactcccggcagagctcgcggcagggggtgtgcccgcaatcgcgaggagcgtgggtgactcaaaccaagtgacggaagtgagcgagggcgtgcctgtttgttgcaggcgcggtgtagcaattggaggacccaggaagaaggggcggagcctatgcttgggtcaaccaatggcttgagctcaggagcaaccagggcacggggcgtgtcggggctgattctctggctgtgtggggcgcacggtcccgggatactggggacggcggggtgggagggcgccgtcctggggccgcggcggccgggcgggggagatggcggcgcgatggagcagcgaaaacgtggttgtagagttccgtgactcccaggcaactgcgatgtctgtggactgtcttgggcagcatgcagtgctttctggccgcagattcttatacatcgtcaatctagatgcccctttcgaaggtcaccgaaagatctctcgccagagcaaatgggacattggagctgtgcagtggaatcctcatgacagctttgcacactattttgcggcttcgagtaaccaacgagtagacctttacaagtggaaagacggcagtggggaagttggcacaaccttacaaggccacactcgtgtcatcagcgacttggactgggcggtgtttgagcctgacctcctggttaccagctctgtggacacctacatctacatttgggatatcaaagacacaaggaaacctactgttgcactgtctgctgttgcgggtgcctcccaggtcaaatggaataaaaaaaatgctaactgccttgccaccagccatgacggcgatgtgcggatatgggataagaggaaacccagtacagcagtggaatatctagccgcccacctctccaaaatccatggcctggactggcacccagacagcgagcacattcttgctacctccagtcaagacaattctgtgaagttctgggattaccgccagcctcggaaatacctcaatattcttccttgccaggtgcctgtctggaaggccagatacacacctttcagcaatggattggtgactgtgatggttccccagctgcggagggaaaacagccttctcctgtggaatgtctttgacttgaacaccccagtccacaccttcgtggggcatgatgatgtggtcctggagttccagtggaggaagcagaaggaagggtccaaggactatcaactggtgacgtggtcccgggatcagaccttgagaatgtggcgggtggattcccagatgcagaggctttgtgcaaatgacatattagatggtgttgatgagttcattgagagtatttcccttctgccggaacctgagaagaccctgcacactgaagatacagatcaccagcacactgcaagccatggggaggaagaagccctaaaagaagatccccctagaaatctcctggaagagaggaaatcagatcaactggggctgcctcagaccttgcagcaggaattctccctgatcaatgtgcaaatccggaatgtcaatgtggagatggatgcggcagacaggagctgcacagtgtctgtgcactgcagcaaccatcgtgtcaagatgctggtgaagttccctgcacagtacccaaacaacgccgccccttccttccagtttattaaccccacaaccatcacatccaccatgaaagctaagctgctgaagatcctgaaggacacagccctgcagaaagtgaagcgtggccagagctgcctggagccctgcctgcgccagctcgtctcctgccttgagtcctttgtgaaccaggaagacagcgcttccagcaacccgtttgcactccccaactctgtcactccccccttaccgacgtttgcgcgggtgaccacggcttacgggtcgtaccaggacgccaacattccctttcctaggacttctggggccaggttctgcggagcaggttacctggtatatttcacaaggcccatgacaatgcatcgggcggtgtctcccacagagcctactccgagatctctctcagccttgtctgcttatcacactggcttgatcgcgcccatgaagatccgcacagaggcccctgggaaccttcgtttatacagtgggagccccactcgcagcgagaaagagcaggtctccatcagctccttctactacaaggagcggaaatcaagacgatggaaaagtaagcgtgagggatcagactctggcaatcgacagatcaaggctgctgggaaagtcatcatccaggatattgcttgcctcctgcctgttcacaaatcgctgggagagctgtacatattgaatgtgaatgatattcaggaaacatgtcagaagaatgccgcctctgccttgctcgttggaagaaaggatcttgtccaggtttggtcgctggctacggtagctacagatctttgccttggtccgaaatctgacccagatttggaaacaccctgggctcgacatccatttgggcggcagctgctggagtccctgttggctcactattgccggctccgggatgttcagacactggcgatgctctgtagcgtgtttgaagcccagtctcggcctcaggggctaccaaacccctttgggccttttcctaaccgttcttctaatcttgtggtgtcccatagtcgatatcctagctttacctcttctggttcctgctccagtatgtcagacccagggctcaacactggcggctggaacatagcgggaagagaggcagagcacttgtcctccccttggggagaatcctcaccagaagagctccgctttgggagtctgacctacagtgatccccgtgagcgagaacgcgaccagcatgataaaaataaaaggctcctggaccccgccaatacccagcaatttgatgactttaagaaatgctatggggaaatcctctaccgttggggtctgagagagaagcgagctgaagtgttgaagtttgtctcctgtcctcctgaccctcacaaagggatcgagttcggcgtgtactgcagccactgccggagtgaggtccgtggcacgcagtgtgccatctgcaaaggcttcacgttccagtgtgccatctgtcacgtggctgtgcggggatcgtccaatttctgcctgacctgtgggcacggtggccacaccagccacatgatggagtggtttcggacccaggaggtgtgtcccaccgggtgtgggtgccactgcctgcttgaaagcactttctgaacctacagaagttgggtattgtctgaaatcccagaggacccataagtgccggtgacaagctgtctgtcaggggagaggctccagaacctgggttcgtccccagtgagaccggaggatgatcccccaaggactgcgcagcatcagctcttggtgggcctctgccttctcttctgtttggccacctggtgtggatgtcactgtgtgaagataaggacagaagtgcagagctgcgctttgtgtgttgtctatgtcggctgagctaccaaggtggaagttttcatggagaaaagcacctggctccagggccagtgttacagtgttaccctgtaaggtgttagccttaaaccaccgagcagcgttctcttgatgccagtgcagagaccagagtcagatgcccgaggacagtgggtaggaatttcatcaacaaatggacctatggcatcatggctttagaagctggtacatttactgagctgatggacagtggccttctaaaatatgacacttaaattgtaaatatgcactgtacttaaggattcttaagatgtatttttttgttatttctcctccagctgctatcccttggctaataaaattctagtaatttgaaaaaaaaaaaaagagagaa

SEQ ID NO: 40794 - DNA, 3928 bp, Homo sapiens
cttggactacaactcccggcagagctcgcggcagggggtgtgcccgcaatcgcgaggagcgtgggtgactcaaaccaagtgacggaagtgagcgagggcgtgcctgtttgttgcaggcgcggtgtagcaattggaggacccaggaagaaggggcggagcctatgcttgggtcaaccaatggcttgagctcaggagcaaccagggcacggggcgtgtcggggctgattctctggctgtgtggggcgcacggtcccgggatactggggacggcggggtgggagggcgccgtcctggggccgcggcggccgggcgggggagatggcggcgcgatggagcagcgaaaacgtggttgtagagttccgtgactcccaggcaactgcgatgtctgtggactgtcttgggcagcatgcagtgctttctggccgcagattcttatacatcgtcaatctagatgcccctttcgaaggtcaccgaaagatctctcgccagagcaaatgggacattggagctgtgcagtggaatcctcatgacagctttgcacactattttgcggcttcgagtaaccaacgagtagacctttacaagtggaaagacggcagtggggaagttggcacaaccttacaaggccacactcgtgtcatcagcgacttggactgggcggtgtttgagcctgacctcctggttaccagctctgtggacacctacatctacatttgggatatcaaagacacaaggaaacctactgttgcactgtctgctgttgcgggtgcctcccaggtcaaatggaataaaaaaaatgctaactgccttgccaccagccatgacggcgatgtgcggatatgggataagaggaaacccagtacagcagtggaatatctagccgcccacctctccaaaatccatggcctggactggcacccagacagcgagcacattcttgctacctccagtcaagacaattctgtgaagttctgggattaccgccagcctcggaaatacctcaatattcttccttgccaggtgcctgtctggaaggccagatacacacctttcagcaatggattggtgactgtgatggttccccagctgcggagggaaaacagccttctcctgtggaatgtctttgacttgaacaccccagtccacaccttcgtggggcatgatgatgtggtcctggagttccagtggaggaagcagaaggaagggtccaaggactatcaactggtgacgtggtcccgggatcagaccttgagaatgtggcgggtggattcccagatgcagaggctttgtgcaaatgacatattagatggtgttgatgagttcattgagagtatttcccttctgccggaacctgagaagaccctgcacactgaagatacagatcaccagcacactgcaagccatggggaggaagaagccctaaaagaagatccccctagaaatctcctggaagagaggaaatcagatcaactggggctgcctcagaccttgcagcaggaattctccctgatcaatgtgcaaatccggaatgtcaatgtggagatggatgcggcagacaggagctgcacagtgtctgtgcactgcagcaaccatcgtgtcaagatgctggtgaagttccctgcacagtacccaaacaacgccgccccttccttccagtttattaaccccacaaccatcacatccaccatgaaagctaagctgctgaagatcctgaaggacacagccctgcagaaagtgaagcgtggccagagctgcctggagccctgcctgcgccagctcgtctcctgccttgagtcctttgtgaaccaggaagacagcgcttccagcaacccgtttgcactccccaactctgtcactccccccttaccgacgtttgcgcgggtgaccacggcttacgggtcgtaccaggacgccaacattccctttcctaggacttctggggccaggttctgcggagcaggttacctggtatatttcacaaggcccatgacaatgcatcgggcggtgtctcccacagagcctactccgagatctctctcagccttgtctgcttatcacactggcttgatcgcgcccatgaagatccgcacagaggcccctgggaaccttcgtttatacagtgggagccccactcgcagcgagaaagagcaggtctccatcagctccttctactacaaggagcggatgtctcctcgctctgcccggcggcgttggtccatacaagcaattaacgacttcccgaaatcaagacgatggaaaagtaagcgtgagggatcagactctggcaatcgacagatcaaggctgctgggaaagtcatcatccaggatattgcttgcctcctgcctgttcacaaatcgctgggagagctgtacatattgaatgtgaatgatattcaggaaacatgtcagaagaatgccgcctctgccttgctcgttggaagaaaggatcttgtccaggtttggtcgctggctacggtagctacagatctttgccttggtccgaaatctgacccagatttggaaacaccctgggctcgacatccatttgggcggcagctgctggagtccctgttggctcactattgccggctccgggatgttcagacactggcgatgctctgtagcgtgtttgaagcccagtctcggcctcaggggctaccaaacccctttgggccttttcctaaccgttcttctaatcttgtggtgtcccatagtcgatatcctagctttacctcttctggttcctgctccagtatgtcagacccagggctcaacactggcggctggaacatagcgggaagagaggcagagcacttgtcctccccttggggagaatcctcaccagaagagctccgctttgggagtctgacctacagtgatccccgtgagcgagaacgcgaccagcatgataaaaataaaaggctcctggaccccgccaatacccagcaatttgatgactttaagaaatgctatggggaaatcctctaccgttggggtctgagagagaagcgagctgaagtgttgaagtttgtctcctgtcctcctgaccctcacaaagggatcgagttcggcgtgtactgcagccactgccggagtgaggtccgtggcacgcagtgtgccatctgcaaaggcttcacgttccagtgtgccatctgtcacgtggctgtgcggggatcgtccaatttctgcctgacctgtgggcacggtggccacaccagccacatgatggagtggtttcggacccaggaggtgtgtcccaccgggtgtgggtgccactgcctgcttgaaagcactttctgaacctacagaagttgggtattgtctgaaatcccagaggacccataagtgccggtgacaagctgtctgtcaggggagaggctccagaacctgggttcgtccccagtgagaccggaggatgatcccccaaggactgcgcagcatcagctcttggtgggcctctgccttctcttctgtttggccacctggtgtggatgtcactgtgtgaagataaggacagaagtgcagagctgcgctttgtgtgttgtctatgtcggctgagctaccaaggtggaagttttcatggagaaaagcacctggctccagggccagtgttacagtgttaccctgtaaggtgttagccttaaaccaccgagcagcgttctcttgatgccagtgcagagaccagagtcagatgcccgaggacagtgggtaggaatttcatcaacaaatggacctatggcatcatggctttagaagctggtacatttactgagctgatggacagtggccttctaaaatatgacacttaaattgtaaatatgcactgtacttaaggattcttaagatgtatttttttgttatttctcctccagctgctatcccttggctaataaaattctagtaatttgaaaaaaaaaaaaagagagaa

SEQ ID NO: 40795 - DNA, 3896 bp, Homo sapiens
cttggactacaactcccggcagagctcgcggcagggggtgtgcccgcaatcgcgaggagcgtgggtgactcaaaccaagtgacggaagtgagcgagggcgtgcctgtttgttgcaggcgcggtgtagcaattggaggacccaggaagaaggggcggagcctatgcttgggtcaaccaatggcttgagctcaggagcaaccagggcacggggcgtgtcggggctgattctctggctgtgtggggcgcacggtcccgggatactggggacggcggggtgggagggcgccgtcctggggccgcggcggccgggcgggggagatggcggcgcgatggagcagcgaaaacgtggttgtagagttccgtgactcccaggcaactgcgatgtctgtggactgtcttgggcagcatgcagtgctttctggccgcagattcttatacatcgtcaatctagatgcccctttcgaaggtcaccgaaagatctctcgccagagcaaatgggacattggagctgtgcagtggaatcctcatgacagctttgcacactattttgcggcttcgagtaaccaacgagtagacctttacaagtggaaagacggcagtggggaagttggcacaaccttacaaggccacactcgtgtcatcagcgacttggactgggcggtgtttgagcctgacctcctggttaccagctctgtggacacctacatctacatttgggatatcaaagacacaaggaaacctactgttgcactgtctgctgttgcgggtgcctcccaggtcaaatggaataaaaaaaatgctaactgccttgccaccagccatgacggcgatgtgcggatatgggataagaggaaacccagtacagcagtggaatatctagccgcccacctctccaaaatccatggcctggactggcacccagacagcgagcacattcttgctacctccagtcaagacaattctgtgaagttctgggattaccgccagcctcggaaatacctcaatattcttccttgccaggtgcctgtctggaaggccagatacacacctttcagcaatggattggtgactgtgatggttccccagctgcggagggaaaacagccttctcctgtggaatgtctttgacttgaacaccccagtccacaccttcgtggggcatgatgatgtggtcctggagttccagtggaggaagcagaaggaagggtccaaggactatcaactggtgacgtggtcccgggatcagaccttgagaatgtggcgggtggattcccagatgcagaggctttgtgcaaatgacatattagatggtgttgatgagttcattgagagtatttcccttctgccggaacctgagaagaccctgcacactgaagatacagatcaccagcacactgcaagccatggggaggaagaaggtaatttgtcaaactgatgtctcagccctaaaagaagatccccctagaaatctcctggaagagaggaaatcagatcaactggggctgcctcagaccttgcagcaggaattctccctgatcaatgtgcaaatccggaatgtcaatgtggagatggatgcggcagacaggagctgcacagtgtctgtgcactgcagcaaccatcgtgtcaagatgctggtgaagttccctgcacagtacccaaacaacgccgccccttccttccagtttattaaccccacaaccatcacatccaccatgaaagctaagctgctgaagatcctgaaggacacagccctgcagaaagtgaagcgtggccagagctgcctggagccctgcctgcgccagctcgtctcctgccttgagtcctttgtgaaccaggaagacagcgcttccagcaacccgtttgcactccccaactctgtcactccccccttaccgacgtttgcgcgggtgaccacggcttacgggtcgtaccaggacgccaacattccctttcctaggacttctggggccaggttctgcggagcaggttacctggtatatttcacaaggcccatgacaatgcatcgggcggtgtctcccacagagcctactccgagatctctctcagccttgtctgcttatcacactggcttgatcgcgcccatgaagatccgcacagaggcccctgggaaccttcgtttatacagtgggagccccactcgcagcgagaaagagcaggtctccatcagctccttctactacaaggagcggaaatcaagacgatggaaaagtaagcgtgagggatcagactctggcaatcgacagatcaaggctgctgggaaagtcatcatccaggatattgcttgcctcctgcctgttcacaaatcgctgggagagctgtacatattgaatgtgaatgatattcaggaaacatgtcagaagaatgccgcctctgccttgctcgttggaagaaaggatcttgtccaggtttggtcgctggctacggtagctacagatctttgccttggtccgaaatctgacccagatttggaaacaccctgggctcgacatccatttgggcggcagctgctggagtccctgttggctcactattgccggctccgggatgttcagacactggcgatgctctgtagcgtgtttgaagcccagtctcggcctcaggggctaccaaacccctttgggccttttcctaaccgttcttctaatcttgtggtgtcccatagtcgatatcctagctttacctcttctggttcctgctccagtatgtcagacccagggctcaacactggcggctggaacatagcgggaagagaggcagagcacttgtcctccccttggggagaatcctcaccagaagagctccgctttgggagtctgacctacagtgatccccgtgagcgagaacgcgaccagcatgataaaaataaaaggctcctggaccccgccaatacccagcaatttgatgactttaagaaatgctatggggaaatcctctaccgttggggtctgagagagaagcgagctgaagtgttgaagtttgtctcctgtcctcctgaccctcacaaagggatcgagttcggcgtgtactgcagccactgccggagtgaggtccgtggcacgcagtgtgccatctgcaaaggcttcacgttccagtgtgccatctgtcacgtggctgtgcggggatcgtccaatttctgcctgacctgtgggcacggtggccacaccagccacatgatggagtggtttcggacccaggaggtgtgtcccaccgggtgtgggtgccactgcctgcttgaaagcactttctgaacctacagaagttgggtattgtctgaaatcccagaggacccataagtgccggtgacaagctgtctgtcaggggagaggctccagaacctgggttcgtccccagtgagaccggaggatgatcccccaaggactgcgcagcatcagctcttggtgggcctctgccttctcttctgtttggccacctggtgtggatgtcactgtgtgaagataaggacagaagtgcagagctgcgctttgtgtgttgtctatgtcggctgagctaccaaggtggaagttttcatggagaaaagcacctggctccagggccagtgttacagtgttaccctgtaaggtgttagccttaaaccaccgagcagcgttctcttgatgccagtgcagagaccagagtcagatgcccgaggacagtgggtaggaatttcatcaacaaatggacctatggcatcatggctttagaagctggtacatttactgagctgatggacagtggccttctaaaatatgacacttaaattgtaaatatgcactgtacttaaggattcttaagatgtatttttttgttatttctcctccagctgctatcccttggctaataaaattctagtaatttgaaaaaaaaaaaaagagagaa

SEQ ID NO: 40796 - DNA, 4003 bp, Homo sapiens
cttggactacaactcccggcagagctcgcggcagggggtgtgcccgcaatcgcgaggagcgtgggtgactcaaaccaagtgacggaagtgagcgagggcgtgcctgtttgttgcaggcgcggtgtagcaattggaggacccaggaagaaggggcggagcctatgcttgggtcaaccaatggcttgagctcaggagcaaccagggcacggggcgtgtcggggctgattctctggctgtgtggggcgcacggtcccgggatactggggacggcggggtgggagggcgccgtcctggggccgcggcggccgggcgggggagatggcggcgcgatggagcagcgaaaacgtggttgtagagttccgtgactcccaggcaactgcgatgtctgtggactgtcttgggcagcatgcagtgctttctggccgcagattcttatacatcgtcaatctagatgcccctttcgaaggtcaccgaaagatctctcgccagagcaaatgggacattggagctgtgcagtggaatcctcatgacagctttgcacactattttgcggcttcgagtaaccaacgagtagacctttacaagtggaaagacggcagtggggaagttggcacaaccttacaaggccacactcgtgtcatcagcgacttggactgggcggtgtttgagcctgacctcctggttaccagctctgtggacacctacatctacatttgggatatcaaagacacaaggaaacctactgttgcactgtctgctgttgcgggtgcctcccaggtcaaatggaataaaaaaaatgctaactgccttgccaccagccatgacggcgatgtgcggatatgggataagaggaaacccagtacagcagtggaatatctagccgcccacctctccaaaatccatggcctggactggcacccagacagcgagcacattcttgctacctccagtcaagacaattctgtgaagttctgggattaccgccagcctcggaaatacctcaatattcttccttgccaggtgcctgtctggaaggccagatacacacctttcagcaatggattggtgactgtgatggttccccagctgcggagggaaaacagccttctcctgtggaatgtctttgacttgaacaccccagtccacaccttcgtggggcatgatgatgtggtcctggagttccagtggaggaagcagaaggaagggtccaaggactatcaactggtgacgtggtcccgggatcagaccttgagaatgtggcgggtggattcccagatgcagaggctttgtgcaaatgacatattagatggtgttgatgagttcattgagagtatttcccttctgccggaacctgagaagaccctgcacactgaagatacagatcaccagcacactgcaagccatggggaggaagaaggtaatttgtcaaactgatgtctcaggtaaggtgccactctacgcattgcagagttgtggcagataccccagacctgttctctgtttcattttcaaaaatgctttccaacattgaacttctctctcctgctagccctaaaagaagatccccctagaaatctcctggaagagaggaaatcagatcaactggggctgcctcagaccttgcagcaggaattctccctgatcaatgtgcaaatccggaatgtcaatgtggagatggatgcggcagacaggagctgcacagtgtctgtgcactgcagcaaccatcgtgtcaagatgctggtgaagttccctgcacagtacccaaacaacgccgccccttccttccagtttattaaccccacaaccatcacatccaccatgaaagctaagctgctgaagatcctgaaggacacagccctgcagaaagtgaagcgtggccagagctgcctggagccctgcctgcgccagctcgtctcctgccttgagtcctttgtgaaccaggaagacagcgcttccagcaacccgtttgcactccccaactctgtcactccccccttaccgacgtttgcgcgggtgaccacggcttacgggtcgtaccaggacgccaacattccctttcctaggacttctggggccaggttctgcggagcaggttacctggtatatttcacaaggcccatgacaatgcatcgggcggtgtctcccacagagcctactccgagatctctctcagccttgtctgcttatcacactggcttgatcgcgcccatgaagatccgcacagaggcccctgggaaccttcgtttatacagtgggagccccactcgcagcgagaaagagcaggtctccatcagctccttctactacaaggagcggaaatcaagacgatggaaaagtaagcgtgagggatcagactctggcaatcgacagatcaaggctgctgggaaagtcatcatccaggatattgcttgcctcctgcctgttcacaaatcgctgggagagctgtacatattgaatgtgaatgatattcaggaaacatgtcagaagaatgccgcctctgccttgctcgttggaagaaaggatcttgtccaggtttggtcgctggctacggtagctacagatctttgccttggtccgaaatctgacccagatttggaaacaccctgggctcgacatccatttgggcggcagctgctggagtccctgttggctcactattgccggctccgggatgttcagacactggcgatgctctgtagcgtgtttgaagcccagtctcggcctcaggggctaccaaacccctttgggccttttcctaaccgttcttctaatcttgtggtgtcccatagtcgatatcctagctttacctcttctggttcctgctccagtatgtcagacccagggctcaacactggcggctggaacatagcgggaagagaggcagagcacttgtcctccccttggggagaatcctcaccagaagagctccgctttgggagtctgacctacagtgatccccgtgagcgagaacgcgaccagcatgataaaaataaaaggctcctggaccccgccaatacccagcaatttgatgactttaagaaatgctatggggaaatcctctaccgttggggtctgagagagaagcgagctgaagtgttgaagtttgtctcctgtcctcctgaccctcacaaagggatcgagttcggcgtgtactgcagccactgccggagtgaggtccgtggcacgcagtgtgccatctgcaaaggcttcacgttccagtgtgccatctgtcacgtggctgtgcggggatcgtccaatttctgcctgacctgtgggcacggtggccacaccagccacatgatggagtggtttcggacccaggaggtgtgtcccaccgggtgtgggtgccactgcctgcttgaaagcactttctgaacctacagaagttgggtattgtctgaaatcccagaggacccataagtgccggtgacaagctgtctgtcaggggagaggctccagaacctgggttcgtccccagtgagaccggaggatgatcccccaaggactgcgcagcatcagctcttggtgggcctctgccttctcttctgtttggccacctggtgtggatgtcactgtgtgaagataaggacagaagtgcagagctgcgctttgtgtgttgtctatgtcggctgagctaccaaggtggaagttttcatggagaaaagcacctggctccagggccagtgttacagtgttaccctgtaaggtgttagccttaaaccaccgagcagcgttctcttgatgccagtgcagagaccagagtcagatgcccgaggacagtgggtaggaatttcatcaacaaatggacctatggcatcatggctttagaagctggtacatttactgagctgatggacagtggccttctaaaatatgacacttaaattgtaaatatgcactgtacttaaggattcttaagatgtatttttttgttatttctcctccagctgctatcccttggctaataaaattctagtaatttgaaaaaaaaaaaaagagagaa

SEQ ID NO: 40797 - DNA, 2974 bp, Homo sapiens
cggaaagaggaccaacaaagttctccctcttgcccccctcaccccccattccagtccgcacaatctgtgaagttctgggattaccgccagcctcggaaatacctcaatattcttccttgccaggtgcctgtctggaaggccagatacacacctttcagcaatggattggtgactgtgatggttccccagctgcggagggaaaacagccttctcctgtggaatgtctttgacttgaacaccccagtccacaccttcgtggggcatgatgatgtggtcctggagttccagtggaggaagcagaaggaagggtccaaggactatcaactggtgacgtggtcccgggatcagaccttgagaatgtggcgggtggattcccagatgcagaggctttgtgcaaatgacatattagatggtgttgatgagttcattgagagtatttcccttctgccggaacctgagaagaccctgcacactgaagatacagatcaccagcacactgcaagccatggggaggaagaagccctaaaagaagatccccctagaaatctcctggaagagaggaaatcagatcaactggggctgcctcagaccttgcagcaggaattctccctgatcaatgtgcaaatccggaatgtcaatgtggagatggatgcggcagacaggagctgcacagtgtctgtgcactgcagcaaccatcgtgtcaagatgctggtgaagttccctgcacagtacccaaacaacgccgccccttccttccagtttattaaccccacaaccatcacatccaccatgaaagctaagctgctgaagatcctgaaggacacagccctgcagaaagtgaagcgtggccagagctgcctggagccctgcctgcgccagctcgtctcctgccttgagtcctttgtgaaccaggaagacagcgcttccagcaacccgtttgcactccccaactctgtcactccccccttaccgacgtttgcgcgggtgaccacggcttacgggtcgtaccaggacgccaacattccctttcctaggacttctggggccaggttctgcggagcaggttacctggtatatttcacaaggcccatgacaatgcatcgggcggtgtctcccacagagcctactccgagatctctctcagccttgtctgcttatcacactggcttgatcgcgcccatgaagatccgcacagaggcccctgggaaccttcgtttatacagtgggagccccactcgcagcgagaaagagcaggtctccatcagctccttctactacaaggagcggaaatcaagacgatggaaaagtaagcgtgagggatcagactctggcaatcgacagatcaaggctgctgggaaagtcatcatccaggatattgcttgcctcctgcctgttcacaaatcgctgggagagctgtacatattgaatgtgaatgatattcaggaaacatgtcagaagaatgccgcctctgccttgctcgttggaagaaaggatcttgtccaggtttggtcgctggctacggtagctacagatctttgccttggtccgaaatctgacccagatttggaaacaccctgggctcgacatccatttgggcggcagctgctggagtccctgttggctcactattgccggctccgggatgttcagacactggcgatgctctgtagcgtgtttgaagcccagtctcggcctcaggggctaccaaacccctttgggccttttcctaaccgttcttctaatcttgtggtgtcccatagtcgatatcctagctttacctcttctggttcctgctccagtatgtcagacccagggctcaacactggcggctggaacatagcgggaagagaggcagagcacttgtcctccccttggggagaatcctcaccagaagagctccgctttgggagtctgacctacagtgatccccgtgagcgagaacgcgaccagcatgataaaaataaaaggctcctggaccccgccaatacccagcaatttgatgactttaagaaatgctatggggaaatcctctaccgttggggtctgagagagaagcgagctgaagtgttgaagtttgtctcctgtcctcctgaccctcacaaagggatcgagttcggcgtgtactgcagccactgccggagtgaggtccgtggcacgcagtgtgccatctgcaaaggcttcacgttccagtgtgccatctgtcacgtggctgtgcggggatcgtccaatttctgcctgacctgtgggcacggtggccacaccagccacatgatggagtggtttcggacccaggaggtgtgtcccaccgggtgtgggtgccactgcctgcttgaaagcactttctgaacctacagaagttgggtattgtctgaaatcccagaggacccataagtgccggtgacaagctgtctgtcaggggagaggctccagaacctgggttcgtccccagtgagaccggaggatgatcccccaaggactgcgcagcatcagctcttggtgggcctctgccttctcttctgtttggccacctggtgtggatgtcactgtgtgaagataaggacagaagtgcagagctgcgctttgtgtgttgtctatgtcggctgagctaccaaggtggaagttttcatggagaaaagcacctggctccagggccagtgttacagtgttaccctgtaaggtgttagccttaaaccaccgagcagcgttctcttgatgccagtgcagagaccagagtcagatgcccgaggacagtgggtaggaatttcatcaacaaatggacctatggcatcatggctttagaagctggtacatttactgagctgatggacagtggccttctaaaatatgacacttaaattgtaaatatgcactgtacttaaggattcttaagatgtatttttttgttatttctcctccagctgctatcccttggctaataaaattctagtaatttgaaaaaaaaaaaaagagagaa

SEQ ID NO: 40798 - DNA, 3197 bp, Homo sapiens
cttggactacaactcccggcagagctcgcggcagggggtgtgcccgcaatcgcgaggagcgtgggtgactcaaaccaagtgacggaagtgagcgagggcgtgcctgtttgttgcaggcgcggtgtagcaattggaggacccaggaagaaggggcggagcctatgcttgggtcaaccaatggcttgagctcaggagcaaccagggcacggggcgtgtcggggctgattctctggctgtgtggggcgcacggtcccgggatactggggacggcggggtgggagggcgccgtcctggggccgcggcggccgggcgggggagatggcggcgcgatggagcagcgaaaacgtggttgtagagttccgtgactcccaggcaactgcgatgtctgtggactgtcttgggcagcatgcagtgctttctggataaggtcttgccaggttgcccaggctggtcttaactccgggcctcaagcgatgcttctgcctcggcctgcagcactaagagttccagttggaggaagcagaaggaagggtccaaggactatcaactggtgacgtggtcccgggatcagaccttgagaatgtggcgggtggattcccagatgcagaggctttgtgcaaatgacatattagatggtgttgatgagttcattgagagtatttcccttctgccggaacctgagaagaccctgcacactgaagatacagatcaccagcacactgcaagccatggggaggaagaagccctaaaagaagatccccctagaaatctcctggaagagaggaaatcagatcaactggggctgcctcagaccttgcagcaggaattctccctgatcaatgtgcaaatccggaatgtcaatgtggagatggatgcggcagacaggagctgcacagtgtctgtgcactgcagcaaccatcgtgtcaagatgctggtgaagttccctgcacagtacccaaacaacgccgccccttccttccagtttattaaccccacaaccatcacatccaccatgaaagctaagctgctgaagatcctgaaggacacagccctgcagaaagtgaagcgtggccagagctgcctggagccctgcctgcgccagctcgtctcctgccttgagtcctttgtgaaccaggaagacagcgcttccagcaacccgtttgcactccccaactctgtcactccccccttaccgacgtttgcgcgggtgaccacggcttacgggtcgtaccaggacgccaacattccctttcctaggacttctggggccaggttctgcggagcaggttacctggtatatttcacaaggcccatgacaatgcatcgggcggtgtctcccacagagcctactccgagatctctctcagccttgtctgcttatcacactggcttgatcgcgcccatgaagatccgcacagaggcccctgggaaccttcgtttatacagtgggagccccactcgcagcgagaaagagcaggtctccatcagctccttctactacaaggagcggaaatcaagacgatggaaaagtaagcgtgagggatcagactctggcaatcgacagatcaaggctgctgggaaagtcatcatccaggatattgcttgcctcctgcctgttcacaaatcgctgggagagctgtacatattgaatgtgaatgatattcaggaaacatgtcagaagaatgccgcctctgccttgctcgttggaagaaaggatcttgtccaggtttggtcgctggctacggtagctacagatctttgccttggtccgaaatctgacccagatttggaaacaccctgggctcgacatccatttgggcggcagctgctggagtccctgttggctcactattgccggctccgggatgttcagacactggcgatgctctgtagcgtgtttgaagcccagtctcggcctcaggggctaccaaacccctttgggccttttcctaaccgttcttctaatcttgtggtgtcccatagtcgatatcctagctttacctcttctggttcctgctccagtatgtcagacccagggctcaacactggcggctggaacatagcgggaagagaggcagagcacttgtcctccccttggggagaatcctcaccagaagagctccgctttgggagtctgacctacagtgatccccgtgagcgagaacgcgaccagcatgataaaaataaaaggctcctggaccccgccaatacccagcaatttgatgactttaagaaatgctatggggaaatcctctaccgttggggtctgagagagaagcgagctgaagtgttgaagtttgtctcctgtcctcctgaccctcacaaagggatcgagttcggcgtgtactgcagccactgccggagtgaggtccgtggcacgcagtgtgccatctgcaaaggcttcacgttccagtgtgccatctgtcacgtggctgtgcggggatcgtccaatttctgcctgacctgtgggcacggtggccacaccagccacatgatggagtggtttcggacccaggaggtgtgtcccaccgggtgtgggtgccactgcctgcttgaaagcactttctgaacctacagaagttgggtattgtctgaaatcccagaggacccataagtgccggtgacaagctgtctgtcaggggagaggctccagaacctgggttcgtccccagtgagaccggaggatgatcccccaaggactgcgcagcatcagctcttggtgggcctctgccttctcttctgtttggccacctggtgtggatgtcactgtgtgaagataaggacagaagtgcagagctgcgctttgtgtgttgtctatgtcggctgagctaccaaggtggaagttttcatggagaaaagcacctggctccagggccagtgttacagtgttaccctgtaaggtgttagccttaaaccaccgagcagcgttctcttgatgccagtgcagagaccagagtcagatgcccgaggacagtgggtaggaatttcatcaacaaatggacctatggcatcatggctttagaagctggtacatttactgagctgatggacagtggccttctaaaatatgacacttaaattgtaaatatgcactgtacttaaggattcttaagatgtatttttttgttatttctcctccagctgctatcccttggctaataaaattctagtaatttgaaaaaaaaaaaaagagagaa

SEQ ID NO: 40799 - DNA, 2455 bp, Homo sapiens
atgagccgagatcgtaccactacactccagcctgggcaacaaagagagactctgtctcaaaaaaaaaaaaaaaaacctatcagagaaatgtgttcctcttcttgactgtgttttgggccttttctagatcctgaaggacacagccctgcagaaagtgaagcgtggccagagctgcctggagccctgcctgcgccagctcgtctcctgccttgagtcctttgtggtgggaagcatgaaactgtcataccaacttaggctttggtgttttgtttcatttctttctccctaaaatcatgggttttctggttttgtcatactgggtctttattttgtagttcagctttaagacaggttgtggtttttagcttgtggatttttaaatttcagaaccaggaagacagcgcttccagcaacccgtttgcactccccaactctgtcactccccccttaccgacgtttgcgcgggtgaccacggcttacgggtcgtaccaggacgccaacattccctttcctaggacttctggggccaggttctgcggagcaggttacctggtatatttcacaaggcccatgacaatgcatcgggcggtgtctcccacagagcctactccgagatctctctcagccttgtctgcttatcacactggcttgatcgcgcccatgaagatccgcacagaggcccctgggaaccttcgtttatacagtgggagccccactcgcagcgagaaagagcaggtctccatcagctccttctactacaaggagcggaaatcaagacgatggaaaagtaagcgtgagggatcagactctggcaatcgacagatcaaggctgctgggaaagtcatcatccaggatattgcttgcctcctgcctgttcacaaatcgctgggagagctgtacatattgaatgtgaatgatattcaggaaacatgtcagaagaatgccgcctctgccttgctcgttggaagaaaggatcttgtccaggtttggtcgctggctacggtagctacagatctttgccttggtccgaaatctgacccagatttggaaacaccctgggctcgacatccatttgggcggcagctgctggagtccctgttggctcactattgccggctccgggatgttcagacactggcgatgctctgtagcgtgtttgaagcccagtctcggcctcaggggctaccaaacccctttgggccttttcctaaccgttcttctaatcttgtggtgtcccatagtcgatatcctagctttacctcttctggttcctgctccagtatgtcagacccagggctcaacactggcggctggaacatagcgggaagagaggcagagcacttgtcctccccttggggagaatcctcaccagaagagctccgctttgggagtctgacctacagtgatccccgtgagcgagaacgcgaccagcatgataaaaataaaaggctcctggaccccgccaatacccagcaatttgatgactttaagaaatgctatggggaaatcctctaccgttggggtctgagagagaagcgagctgaagtgttgaagtttgtctcctgtcctcctgaccctcacaaagggatcgagttcggcgtgtactgcagccactgccggagtgaggtccgtggcacgcagtgtgccatctgcaaaggcttcacgttccagtgtgccatctgtcacgtggctgtgcggggatcgtccaatttctgcctgacctgtgggcacggtggccacaccagccacatgatggagtggtttcggacccaggaggtgtgtcccaccgggtgtgggtgccactgcctgcttgaaagcactttctgaacctacagaagttgggtattgtctgaaatcccagaggacccataagtgccggtgacaagctgtctgtcaggggagaggctccagaacctgggttcgtccccagtgagaccggaggatgatcccccaaggactgcgcagcatcagctcttggtgggcctctgccttctcttctgtttggccacctggtgtggatgtcactgtgtgaagataaggacagaagtgcagagctgcgctttgtgtgttgtctatgtcggctgagctaccaaggtggaagttttcatggagaaaagcacctggctccagggccagtgttacagtgttaccctgtaaggtgttagccttaaaccaccgagcagcgttctcttgatgccagtgcagagaccagagtcagatgcccgaggacagtgggtaggaatttcatcaacaaatggacctatggcatcatggctttagaagctggtacatttactgagctgatggacagtggccttctaaaatatgacacttaaattgtaaatatgcactgtacttaaggattcttaagatgtatttttttgttatttctcctccagctgctatcccttggctaataaaattctagtaatttgaaaaaaaaaaaaagagagaa

SEQ ID NO: 40800 - DNA, 1413 bp, Homo sapiens
gtgctgggattccaggcatgagccacaacggcccagcccatcatttgcgttagcatcatgtgtgtgtacttagtgatcaagttctcttagtaataaatacctgcgcaaaaaggcaagggtaggagagagttctatttagttatatttctcagaatattcagcctcgcttaacatttcttctgggaaatccattggccacatgctgtcttatgagactcttcagatattttccatgccttctctgattgccatcttcccttcccatttgattttcttcagcgggaagagaggcagagcacttgtcctccccttggggagaatcctcaccagaagagctccgctttgggagtctgacctacagtgatccccgtgagcgagaacgcgaccagcatgataaaaataaaaggctcctggaccccgccaatacccagcaatttgatgactttaagaaatgctatggggaaatcctctaccgttggggtctgagagagaagcgagctgaagtgttgaagtttgtctcctgtcctcctgaccctcacaaagggatcgagttcggcgtgtactgcagccactgccggagtgaggtccgtggcacgcagtgtgccatctgcaaaggcttcacgttccagtgtgccatctgtcacgtggctgtgcggggatcgtccaatttctgcctgacctgtgggcacggtggccacaccagccacatgatggagtggtttcggacccaggaggtgtgtcccaccgggtgtgggtgccactgcctgcttgaaagcactttctgaacctacagaagttgggtattgtctgaaatcccagaggacccataagtgccggtgacaagctgtctgtcaggggagaggctccagaacctgggttcgtccccagtgagaccggaggatgatcccccaaggactgcgcagcatcagctcttggtgggcctctgccttctcttctgtttggccacctggtgtggatgtcactgtgtgaagataaggacagaagtgcagagctgcgctttgtgtgttgtctatgtcggctgagctaccaaggtggaagttttcatggagaaaagcacctggctccagggccagtgttacagtgttaccctgtaaggtgttagccttaaaccaccgagcagcgttctcttgatgccagtgcagagaccagagtcagatgcccgaggacagtgggtaggaatttcatcaacaaatggacctatggcatcatggctttagaagctggtacatttactgagctgatggacagtggccttctaaaatatgacacttaaattgtaaatatgcactgtacttaaggattcttaagatgtatttttttgttatttctcctccagctgctatcccttggctaataaaattctagtaatttgaaaaaaaaaaaaagagagaa

SEQ ID NO: 40801 - DNA, 970 bp, Homo sapiens
tgggtcactctagagtatccccgtcctccccgttggggtctgagagagaagcgagctgaagtgttgaagtttgtctcctgtcctcctgaccctcacaaagggatcgagttcggcgtgtactgcagccactgccggagtgaggtccgtggcacgcagtgtgccatctgcaaaggcttcacgttccagtgtgccatctgtcacgtggctgtgcggggatcgtccaatttctgcctgacctgtgggcacggtggccacaccagccacatgatggagtggtttcggacccaggaggtgtgtcccaccgggtgtgggtgccactgcctgcttgaaagcactttctgaacctacagaagttgggtattgtctgaaatcccagaggacccataagtgccggtgacaagctgtctgtcaggggagaggctccagaacctgggttcgtccccagtgagaccggaggatgatcccccaaggactgcgcagcatcagctcttggtgggcctctgccttctcttctgtttggccacctggtgtggatgtcactgtgtgaagataaggacagaagtgcagagctgcgctttgtgtgttgtctatgtcggctgagctaccaaggtggaagttttcatggagaaaagcacctggctccagggccagtgttacagtgttaccctgtaaggtgttagccttaaaccaccgagcagcgttctcttgatgccagtgcagagaccagagtcagatgcccgaggacagtgggtaggaatttcatcaacaaatggacctatggcatcatggctttagaagctggtacatttactgagctgatggacagtggccttctaaaatatgacacttaaattgtaaatatgcactgtacttaaggattcttaagatgtatttttttgttatttctcctccagctgctatcccttggctaataaaattctagtaatttgaaaaaaaaaaaaagagagaa

SEQ ID NO: 40802 - DNA, 2791 bp, Homo sapiens
cttggactacaactcccggcagagctcgcggcagggggtgtgcccgcaatcgcgaggagcgtgggtgactcaaaccaagtgacggaagtgagcgagggcgtgcctgtttgttgcaggcgcggtgtagcaattggaggacccaggaagaaggggcggagcctatgcttgggtcaaccaatggcttgagctcaggagcaaccagggcacggggcgtgtcggggctgattctctggctgtgtggggcgcacggtcccgggatactggggacggcggggtgggagggcgccgtcctggggccgcggcggccgggcgggggagatggcggcgcgatggagcagcgaaaacgtggttgtagagttccgtgactcccaggcaactgcgatgtctgtggactgtcttgggcagcatgcagtgctttctggccgcagattcttatacatcgtcaatctagatgcccctttcgaaggtcaccgaaagatctctcgccagagcaaatgggacattggagctgtgcagtggaatcctcatgacagctttgcacactattttgcggcttcgagtaaccaacgagtagacctttacaagtggaaagacggcagtggggaagttggcacaaccttacaaggccacactcgtgtcatcagcgacttggactgggcggtgtttgagcctgacctcctggttaccagctctgtggacacctacatctacatttgggatatcaaagacacaaggaaacctactgttgcactgtctgctgttgcgggtgcctcccaggtcaaatggaataaaaaaaatgctaactgccttgccaccagccatgacggcgatgtgcggatatgggataagaggaaacccagtacagcagtggaatatctagccgcccacctctccaaaatccatggcctggactggcacccagacagcgagcacattcttgctacctccagtcaagacaattctgtgaagttctgggattaccgccagcctcggaaatacctcaatattcttccttgccaggtgcctgtctggaaggccagatacacacctttcagcaatggattggtgactgtgatggttccccagctgcggagggaaaacagccttctcctgtggaatgtctttgacttgaacaccccagtccacaccttcgtggggcatgatgatgtggtcctggagttccagtggaggaagcagaaggaagggtccaaggactatcaactggtgacgtggtcccgggatcagaccttgagaatgtggcgggtggattcccagatgcagaggctttgtgcaaatgacatattagatggtgttgatgagttcattgagagtatttcccttctgccggaacctgagaagaccctgcacactgaagatacagatcaccagcacactgcaagccatggggaggaagaaggtaatttgtcaaactgatgtctcaggtaaggtgccactctacgcattgcagagttgtggcagataccccagacctgttctctgtttcattttcaaaaatgctttccaacattgaacttctctctcctgctagccctaaaagaagatccccctagaaatctcctggaagagaggaaatcagatcaactggggctgcctcagaccttgcagcaggaattctccctgatcaatgtgcaaatccggaatgtcaatgtggagatggatgcggcagacaggagctgcacagtgtctgtgcactgcagcaaccatcgtgtcaagatgctggtgaagttccctgcacagtacccaaacaacgccgccccttccttccagtttattaaccccacaaccatcacatccaccatgaaagctaagctgctgaaggtgggggtctgggttcccaaattctccttgctgttctgcatcattgtctagatggattagtaaagaagaatgaaaactccagtagatgagattcggaagtcatctgtttcgtacacacactagtattagcaacgtaacctctgaacttgccatttactttgtgcagaaaacatcagagcagtggttcttaaccttttttgggtcatagacttcctttgaattctaatgaaaattatggacccttcctcagaaaaatctgcacaatgattgcatatgatttgagaaatattgcctgtaaatatgtgaattgcatagaatctgcccacagatctcattaatactatgcattcatctccggttaggagatttgcaatccaatttcatttagcagcccaggttaggagccctgcagtccaatttcatttacctgaaaacaacaagcaagatgtattctgaagctaaaagatattttataattagaaaaaaacatatgtaaggtcataaaaaaaattttatcccatagaaggagctggtgttatcctagagacaggctggctagctgcacagtaggtgtccaggtggaggcaccacagcctggcatctgtgtttaattctgcagattcagagatttaatgcatcagttcatccagagcaaatcaggtggaatctccatgacaaagccccatgagcctcttcatacccgttcagtctgagcagtgtcacaagtgaagggactgaagtattctgacaaactcaggccaagctgaatgttgctcattttttgtccagtttgggtcgtggacacttgattgttccaccttgttgggggtatcacatggaaccaggaaattttcaagtggcttaaggatctctgaaatgccagtaactcagatcttgtggtatttgacatgttaaacttggaatctgaatatgccgttgcctagtttggaca

SEQ ID NO: 40803 - DNA, 2023 bp, Homo sapiens
cttggactacaactcccggcagagctcgcggcagggggtgtgcccgcaatcgcgaggagcgtgggtgactcaaaccaagtgacggaagtgagcgagggcgtgcctgtttgttgcaggcgcggtgtagcaattggaggacccaggaagaaggggcggagcctatgcttgggtcaaccaatggcttgagctcaggagcaaccagggcacggggcgtgtcggggctgattctctggctgtgtggggcgcacggtcccgggatactggggacggcggggtgggagggcgccgtcctggggccgcggcggccgggcgggggagatggcggcgcgatggagcagcgaaaacgtggttgtagagttccgtgactcccaggcaactgcgatgtctgtggactgtcttgggcagcatgcagtgctttctggccgcagattcttatacatcgtcaatctagatgcccctttcgaaggtcaccgaaagatctctcgccagagcaaatgggacattggagctgtgcagtggaatcctcatgacagctttgcacactattttgcggcttcgagtaaccaacgagtagacctttacaagtggaaagacggcagtggggaagttggcacaaccttacaaggccacactcgtgtcatcagcgacttggactgggcggtgtttgagcctgacctcctggttaccagctctgtggacacctacatctacatttgggatatcaaagacacaaggaaacctactgttgcactgtctgctgttgcgggtgcctcccaggtcaaatggaataaaaaaaatgctaactgccttgccaccagccatgacggcgatgtgcggatatgggataagaggaaacccagtacagcagtggaatatctagccgcccacctctccaaaatccatggcctggactggcacccagacagcgagcacattcttgctacctccagtcaagacaattctgtgaagttctgggattaccgccagcctcggaaatacctcaatattcttccttgccagtttattaaccccacaaccatcacatccaccatgaaagctaagctgctgaaggtgggggtctgggttcccaaattctccttgctgttctgcatcattgtctagatggattagtaaagaagaatgaaaactccagtagatgagattcggaagtcatctgtttcgtacacacactagtattagcaacgtaacctctgaacttgccatttactttgtgcagaaaacatcagagcagtggttcttaaccttttttgggtcatagacttcctttgaattctaatgaaaattatggacccttcctcagaaaaatctgcacaatgattgcatatgatttgagaaatattgcctgtaaatatgtgaattgcatagaatctgcccacagatctcattaatactatgcattcatctccggttaggagatttgcaatccaatttcatttagcagcccaggttaggagccctgcagtccaatttcatttacctgaaaacaacaagcaagatgtattctgaagctaaaagatattttataattagaaaaaaacatatgtaaggtcataaaaaaaattttatcccatagaaggagctggtgttatcctagagacaggctggctagctgcacagtaggtgtccaggtggaggcaccacagcctggcatctgtgtttaattctgcagattcagagatttaatgcatcagttcatccagagcaaatcaggtggaatctccatgacaaagccccatgagcctcttcatacccgttcagtctgagcagtgtcacaagtgaagggactgaagtattctgacaaactcaggccaagctgaatgttgctcattttttgtccagtttgggtcgtggacacttgattgttccaccttgttgggggtatcacatggaaccaggaaattttcaagtggcttaaggatctctgaaatgccagtaactcagatcttgtggtatttgacatgttaaacttggaatctgaatatgccgttgcctagtttggaca

SEQ ID NO: 40804 - DNA, 1639 bp, Homo sapiens
cttggactacaactcccggcagagctcgcggcagggggtgtgcccgcaatcgcgaggagcgtgggtgactcaaaccaagtgacggaagtgagcgagggcgtgcctgtttgttgcaggcgcggtgtagcaattggaggacccaggaagaaggggcggagcctatgcttgggtcaaccaatggcttgagctcaggagcaaccagggcacggggcgtgtcggggctgattctctggctgtgtggggcgcacggtcccgggatactggggacggcggggtgggagggcgccgtcctggggccgcggcggccgggcgggggagatggcggcgcgatggagcagcgaaaacgtggttgtagagttccgtgactcccaggcaactgcgatgtctgtggactgtcttgggcagcatgcagtgctttctggccgcagattcttatacatcgtcaatctagatgcccctttcgaaggtcaccgaaagatctctcgccagagcaaatgggacattggagctgtgcagtggaatcctcatgacagctttgcacactattttgcggcttcgagtaaccaacgagtagacctttacaagtggaaagacggcagtggggaagttggcacaaccttacaaggccacactcgtgtcatcagcgacttggactgggcggtgtttgagcctgacctcctggttaccagctctgtggacacctacatctacatttgggatatcaaagacacaaggaaacctactgttgcactgtctgctgttgcgggtgcctcccaggtcaaatggaataaaaaaaatgctaactgccttgccaccagccatgacggcgatgtgcggatatgggataagaggaaacccagtacagcagtggaatatctagccgcccacctctccaaaatccatggcctggactggcacccagacagcgagcacattcttgctacctccagtcaagacaattctgtgaagttctgggattaccgccagcctcggaaatacctcaatattcttccttgccaggtgcctgtctggaaggccagatacacacctttcagcaatggattggtgactgtgatggttccccagctgcggagggaaaacagccttctcctgtggaatgtctttgacttgaacaccccagtccacaccttcgtggggcatgatgatgtggtcctggagttccagtggaggaagcagaaggaaggtgagtgggagaggcctgctgcccactttccttctgagctctggtgacagcggtgccagtcagtgttgccatggagtccagtaaagaagacatagagagagctgggctttaggaaccagagagccagggctgttgccacctttcgtcataggtgagtaaagggactatataaggctgctgttactcttccaaattctgtcctcttccacaattgtcagcgtagtctctcttgcttggaagagatatgctccagtaagagacggaagatagagatttgctgttggattgtttctgggactgaaagactctgggctcagaagtccagggcatttgccccttgccactctgttgatgagggagacccaaggtggtctttagtactgcctactacataccctcagttgtcttcacaagcatgtagtgctctgtctcaaa

SEQ ID NO: 40805 - DNA, 1985 bp, Homo sapiens
cttggactacaactcccggcagagctcgcggcagggggtgtgcccgcaatcgcgaggagcgtgggtgactcaaaccaagtgacggaagtgagcgagggcgtgcctgtttgttgcaggcgcggtgtagcaattggaggacccaggaagaaggggcggagcctatgcttgggtcaaccaatggcttgagctcaggagcaaccagggcacggggcgtgtcggggctgattctctggctgtgtggggcgcacggtcccgggatactggggacggcggggtgggagggcgccgtcctggggccgcggcggccgggcgggggagatggcggcgcgatggagcagcgaaaacgtggttgtagagttccgtgactcccaggcaactgcgatgtctgtggactgtcttgggcagcatgcagtgctttctggataaggtcttgccaggttgcccaggctggtcttaactccgggcctcaagcgatgcttctgcctcggcctgcagcactaagagttccagttggaggaagcagaaggaagggtccaaggactatcaactggtgacgtggtcccgggatcagaccttgagaatgtggcgggtggattcccagatgcagaggctttgtgcaaatgacatattagatggtgttgatgagttcattgagagtatttcccttctgccggaacctgagaagaccctgcacactgaagatacagatcaccagcacactgcaagccatggggaggaagaagccctaaaagaagatccccctagaaatctcctggaagagaggaaatcagatcaactggggctgcctcagaccttgcagcaggaattctccctgatcaatgtgcaaatccggaatgtcaatgtggagatggatgcggcagacaggagctgcacagtgtctgtgcactgcagcaaccatcgtgtcaagatgctggtgaagttccctgcacagtacccaaacaacgccgccccttccttccagtttattaaccccacaaccatcacatccaccatgaaagctaagctgctgaaggtgggggtctgggttcccaaattctccttgctgttctgcatcattgtctagatggattagtaaagaagaatgaaaactccagtagatgagattcggaagtcatctgtttcgtacacacactagtattagcaacgtaacctctgaacttgccatttactttgtgcagaaaacatcagagcagtggttcttaaccttttttgggtcatagacttcctttgaattctaatgaaaattatggacccttcctcagaaaaatctgcacaatgattgcatatgatttgagaaatattgcctgtaaatatgtgaattgcatagaatctgcccacagatctcattaatactatgcattcatctccggttaggagatttgcaatccaatttcatttagcagcccaggttaggagccctgcagtccaatttcatttacctgaaaacaacaagcaagatgtattctgaagctaaaagatattttataattagaaaaaaacatatgtaaggtcataaaaaaaattttatcccatagaaggagctggtgttatcctagagacaggctggctagctgcacagtaggtgtccaggtggaggcaccacagcctggcatctgtgtttaattctgcagattcagagatttaatgcatcagttcatccagagcaaatcaggtggaatctccatgacaaagccccatgagcctcttcatacccgttcagtctgagcagtgtcacaagtgaagggactgaagtattctgacaaactcaggccaagctgaatgttgctcattttttgtccagtttgggtcgtggacacttgattgttccaccttgttgggggtatcacatggaaccaggaaattttcaagtggcttaaggatctctgaaatgccagtaactcagatcttgtggtatttgacatgttaaacttggaatctgaatatgccgttgcctagtttggaca

SEQ ID NO: 40806 - DNA, 2204 bp, Homo sapiens
cttggactacaactcccggcagagctcgcggcagggggtgtgcccgcaatcgcgaggagcgtgggtgactcaaaccaagtgacggaagtgagcgagggcgtgcctgtttgttgcaggcgcggtgtagcaattggaggacccaggaagaaggggcggagcctatgcttgggtcaaccaatggcttgagctcaggagcaaccagggcacggggcgtgtcggggctgattctctggctgtgtggggcgcacggtcccgggatactggggacggcggggtgggagggcgccgtcctggggccgcggcggccgggcgggggagatggcggcgcgatggagcagcgaaaacgtggttgtagagttccgtgactcccaggcaactgcgatgtctgtggactgtcttgggcagcatgcagtgctttctggccgcagattcttatacatcgtcaatctagatgcccctttcgaaggtcaccgaaagatctctcgccagagcaaatgggacattggagctgtgcagtggaatcctcatgacagctttgcacactattttgcggcttcgagtaaccaacgagtagacctttacaagtggaaagacggcagtggggaagttggcacaaccttacaaggccacactcgtgtcatcagcgacttggactgggcggtgtttgagcctgacctcctggttaccagctctgtggacacctacatctacatttgggatatcaaagacacaaggaaacctactgttgcactgtctgctgttgcgggtgcctcccaggtcaaatggaataaaaaaaatgctaactgccttgccaccagccatgacggcgatgtgcggatatgggataagaggaaacccagtacagcagtggaatatctagccgcccacctctccaaaatccatggcctggactggcacccagacagcgagcacattcttgctacctccagtcaagacaattctgtgaagttctgggattaccgccagcctcggaaatacctcaatattcttccttgccaggtgcctgtctggaaggccagatacacacctttcagcaatggattggtgactgtgatggttccccagctgcggagggaaaacagccttctcctgtggaatgtctttgacttgaacaccccagtccacaccttcgtggggcatgatgatgtggtcctggagttccagtggaggaagcagaaggaagggtccaaggactatcaactggtgacgtggtcccgggatcagaccttgagaatgtggcgggtggattcccagatgcagaggctttgtgcaaatgacatattagatggtgttgatgagttcattgagagtatttcccttctgccggaacctgagaagaccctgcacactgaagatacagatcaccagcacactgcaagccatggggaggaagaagccctaaaagaagatccccctagaaatctcctggaagagaggaaatcagatcaactggggctgcctcagaccttgcagcaggaattctccctgatcaatgtgcaaatccggaatgtcaatgtggagatggatgcggcagacaggagctgcacagtgtctgtgcactgcagcaaccatcgtgtcaagatgctggtgaagttccctgcacagtacccaaacaacgccgccccttccttccagtttattaaccccacaaccatcacatccaccatgaaagctaagctgctgaagatcctgaaggacacagccctgcagaaagtgaagcgtggccagagctgcctggagccctgcctgcgccagctcgtctcctgccttgagtcctttgtgaaccaggaagacagcgcttccagcaacccgtttgcactccccaactctgtcactccccccttaccgacgtttgcgcgggtgaccacggcttacgggtcgtaccaggacgccaacattccctttcctaggacttctggggccaggttctgcggagcaggttacctggtatatttcacaaggcccatgacaatgcatcgggcggtgtctcccacagagcctactccgaggtgagtcagggagatgcagaagccgctctacgttcccggggccagaagtggccagagacctgggaaggaccactgagtttgcttttggacagtgcatttcagttcttcagtaaactcccattataagatttatttgagaaagattgaagtcaattaaattgcaaaaaagctgtg

SEQ ID NO: 40807 - DNA, 783 bp, Homo sapiens
cttggactacaactcccggcagagctcgcggcagggggtgtgcccgcaatcgcgaggagcgtgggtgactcaaaccaagtgacggaagtgagcgagggcgtgcctgtttgttgcaggcgcggtgtagcaattggaggacccaggaagaaggggcggagcctatgcttgggtcaaccaatggcttgagctcaggagcaaccagggcacggggcgtgtcggggctgattctctggctgtgtggggcgcacggtcccgggatactggggacggcggggtgggagggcgccgtcctggggccgcggcggccgggcgggggagatggcggcgcgatggagcagcgaaaacgtggttgtagagttccgtgactcccagaaaaataactaaacatgggcaaaggagatcctaagaagccgagaggcaaaatgtcatcatatgcattttttgtgcaaacttgtcgggaggagcataagaagaagcacccagatgcttcagtcaacttctcagagttttctaagaagtgctcagagaggtggaagaccatgtctgctaaagagaaaggaaaatttgaagatatggcaaaagcggacaaggcccgttatgaaagagaaatgaaaacctatatccctcccaaaggggagacaaaaaagaagttcaaggatcccaatgcacccaagaggcctccttcggccttcttcctcttctgctctgagtatcgcccaaaaatcaaaggagaacatcctggcctgtccattggtgatgttgcgaagaaactgggagagatgt

SEQ ID NO: 40808 - DNA, 3606 bp, Homo sapiens
gctctctctctctctctctccccggctggggccgcggcggccgggcgggggagatggcggcgcgatggagcagcgaaaacgtggttgtagagttccgtgactcccaggcaactgcgatgtctgtggactgtcttgggcagcatgcagtgctttctggccgcagattcttatacatcgtcaatctagatgcccctttcgaaggtcaccgaaagatctctcgccagagcaaatgggacattggagctgtgcagtggaatcctcatgacagctttgcacactattttgcggcttcgagtaaccaacgagtagacctttacaagtggaaagacggcagtggggaagttggcacaaccttacaaggccacactcgtgtcatcagcgacttggactgggcggtgtttgagcctgacctcctggttaccagctctgtggacacctacatctacatttgggatatcaaagacacaaggaaacctactgttgcactgtctgctgttgcgggtgcctcccaggtcaaatggaataaaaaaaatgctaactgccttgccaccagccatgacggcgatgtgcggatatgggataagaggaaacccagtacagcagtggaatatctagccgcccacctctccaaaatccatggcctggactggcacccagacagcgagcacattcttgctacctccagtcaagacaattctgtgaagttctgggattaccgccagcctcggaaatacctcaatattcttccttgccaggtgcctgtctggaaggccagatacacacctttcagcaatggattggtgactgtgatggttccccagctgcggagggaaaacagccttctcctgtggaatgtctttgacttgaacaccccagtccacaccttcgtggggcatgatgatgtggtcctggagttccagtggaggaagcagaaggaagggtccaaggactatcaactggtgacgtggtcccgggatcagaccttgagaatgtggcgggtggattcccagatgcagaggctttgtgcaaatgacatattagatggtgttgatgagttcattgagagtatttcccttctgccggaacctgagaagaccctgcacactgaagatacagatcaccagcacactgcaagccatggggaggaagaagccctaaaagaagatccccctagaaatctcctggaagagaggaaatcagatcaactggggctgcctcagaccttgcagcaggaattctccctgatcaatgtgcaaatccggaatgtcaatgtggagatggatgcggcagacaggagctgcacagtgtctgtgcactgcagcaaccatcgtgtcaagatgctggtgaagttccctgcacagtacccaaacaacgccgccccttccttccagtttattaaccccacaaccatcacatccaccatgaaagctaagctgctgaagatcctgaaggacacagccctgcagaaagtgaagcgtggccagagctgcctggagccctgcctgcgccagctcgtctcctgccttgagtcctttgtgaaccaggaagacagcgcttccagcaacccgtttgcactccccaactctgtcactccccccttaccgacgtttgcgcgggtgaccacggcttacgggtcgtaccaggacgccaacattccctttcctaggacttctggggccaggttctgcggagcaggttacctggtatatttcacaaggcccatgacaatgcatcgggcggtgtctcccacagagcctactccgagatctctctcagccttgtctgcttatcacactggcttgatcgcgcccatgaagatccgcacagaggcccctgggaaccttcgtttatacagtgggagccccactcgcagcgagaaagagcaggtctccatcagctccttctactacaaggagcggaaatcaagacgatggaaaagtaagcgtgagggatcagactctggcaatcgacagatcaaggctgctgggaaagtcatcatccaggatattgcttgcctcctgcctgttcacaaatcgctgggagagctgtacatattgaatgtgaatgatattcaggaaacatgtcagaagaatgccgcctctgccttgctcgttggaagaaaggatcttgtccaggtttggtcgctggctacggtagctacagatctttgccttggtccgaaatctgacccagatttggaaacaccctgggctcgacatccatttgggcggcagctgctggagtccctgttggctcactattgccggctccgggatgttcagacactggcgatgctctgtagcgtgtttgaagcccagtctcggcctcaggggctaccaaacccctttgggccttttcctaaccgttcttctaatcttgtggtgtcccatagtcgatatcctagctttacctcttctggttcctgctccagtatgtcagacccagggctcaacactggcggctggaacatagcgggaagagaggcagagcacttgtcctccccttggggagaatcctcaccagaagagctccgctttgggagtctgacctacagtgatccccgtgagcgagaacgcgaccagcatgataaaaataaaaggctcctggaccccgccaatacccagcaatttgatgactttaagaaatgctatggggaaatcctctaccgttggggtctgagagagaagcgagctgaagtgttgaagtttgtctcctgtcctcctgaccctcacaaagggatcgagttcggcgtgtactgcagccactgccggagtgaggtccgtggcacgcagtgtgccatctgcaaaggcttcacgttccagtgtgccatctgtcacgtggctgtgcggggatcgtccaatttctgcctgacctgtgggcacggtggccacaccagccacatgatggagtggtttcggacccaggaggtgtgtcccaccgggtgtgggtgccactgcctgcttgaaagcactttctgaacctacagaagttgggtattgtctgaaatcccagaggacccataagtgccggtgacaagctgtctgtcaggggagaggctccagaacctgggttcgtccccagtgagaccggaggatgatcccccaaggactgcgcagcatcagctcttggtgggcctctgccttctcttctgtttggccacctggtgtggatgtcactgtgtgaagataaggacagaagtgcagagctgcgctttgtgtgttgtctatgtcggctgagctaccaaggtggaagttttcatggagaaaagcacctggctccagggccagtgttacagtgttaccctgtaaggtgttagccttaaaccaccgagcagcgttctcttgatgccagtgcagagaccagagtcagatgcccgaggacagtgggtaggaatttcatcaacaaatggacctatggcatcatggctttagaagctggtacatttactgagctgatggacagtggccttctaaaatatgacacttaaattgtaaatatgcactgtacttaaggattcttaagatgtatttttttgttatttctcctccagctgctatcccttggctaataaaattctagtaatttgaaaaaaaaaaaaagagagaa

SEQ ID NO: 40809 - DNA, 3607 bp, Homo sapiens
cttggactacaactcccggcagagctcgcggcagggggtgtgcccgcaatcgcgaggagcgtgggtgactcaaaccaagtgacggaagtgagcgagggcgtgcctgtttgttgcaggcgcggtgtagcaattggaggacccaggaagaaggggcggagcctatgcttgggtcaaccaatggcttgagctcaggagcaaccagggcacggggcgtgtcggggctgattctctggctgtgtggggcgcacggtcccgggatactggggacggcggggtgggagggcgccgtcctggggccgcggcggccgggcgggggagatggcggcgcgatggagcagcgaaaacgtggttgtagagttccgtgactcccaggcaactgcgatgtctgtggactgtcttgggcagcatgcagtgctttctggccgcagattcttatacatcgtcaatctagatgcccctttcgaaggtcaccgaaagatctctcgccagagcaaatgggacattggagctgtgcagtggaatcctcatgacagctttgcacactattttgcggcttcgagtaaccaacgagtagacctttacaagtggaaagacggcagtggggaagttggcacaaccttacaaggccacactcgtgtcatcagcgacttggactgggcggtgtttgagcctgacctcctggttaccagctctgtggacacctacatctacatttgggatatcaaagacacaaggaaacctactgttgcactgtctgctgttgcgggtgcctcccaggtcaaatggaataaaaaaaatgctaactgccttgccaccagccatgacggcgatgtgcggatatgggataagaggaaacccagtacagcagtggaatatctagccgcccacctctccaaaatccatggcctggactggcacccagacagcgagcacattcttgctacctccagtcaagacaattctgtgaagttctgggattaccgccagcctcggaaatacctcaatattcttccttgccaggtgcctgtctggaaggccagatacacacctttcagcaatggattggtgactgtgatggttccccagctgcggagggaaaacagccttctcctgtggaatgtctttgacttgaacaccccagtccacaccttcgtggggcatgatgatgtggtcctggagttccagtggaggaagcagaaggaagggtccaaggactatcaactggtgacgtggtcccgggatcagaccttgagaatgtggcgggtggattcccagatgcagaggctttgtgcaaatgacatattagatggtgttgatgagttcattgagagtatttcccttctgccggaacctgagaagaccctgcacactgaagatacagatcaccagcacactgcaagccatggggaggaagaagccctaaaagaagatccccctagaaatctcctggaagagaggaaatcagatcaactggggctgcctcagaccttgcagcaggaattctccctgatcaatgtgcaaatccggaatgtcaatgtggagatggatgcggcagacaggagctgcacagtgtctgtgcactgcagcaaccatcgtgtcaagatgctggtgaagttccctgcacagtacccaaacaacgccgccccttccttccagtttattaaccccacaaccatcacatccaccatgaaagctaagctgctgaagatcctgaaggacacagccctgcagaaagtgaagcgtggccagagctgcctggagccctgcctgcgccagctcgtctcctgccttgagtcctttgtgaaccaggaagacagcgcttccagcaacccgtttgcactccccaactctgtcactccccccttaccgacgtttgcgcgggtgaccacggcttacgggtcgtaccaggacgccaacattccctttcctaggacttctggggccaggttctgcggagcaggttacctggtatatttcacaaggcccatgacaatgcatcgggcggtgtctcccacagagcctactccgagatctctctcagccttgtctgcttatcacactggcttgatcgcgcccatgaagatccgcacagaggcccctgggaaccttcgtttatacagtgggagccccactcgcagcgagaaagagcaggtctccatcagctccttctactacaaggagcggaaatcaagacgatggaaaagtaagcgtgagggatcagactctggcaatcgacagatcaaggctgctgggaaagtcatcatccaggatattgcttgcctcctgcctgttcacaaatcgctgggagagctgtacatattgaatgtgaatgatattcaggaaacatgtcagaagaatgccgcctctgccttgctcgttggaagaaaggatcttgtccagcctagctttacctcttctggttcctgctccagtatgtcagacccagggctcaacactggcggctggaacatagcgggaagagaggcagagcacttgtcctccccttggggagaatcctcaccagaagagctccgctttgggagtctgacctacagtgatccccgtgagcgagaacgcgaccagcatgataaaaataaaaggctcctggaccccgccaatacccagcaatttgatgactttaagaaatgctatggggaaatcctctaccgttggggtctgagagagaagcgagctgaagtgttgaagtttgtctcctgtcctcctgaccctcacaaagggatcgagttcggcgtgtactgcagccactgccggagtgaggtccgtggcacgcagtgtgccatctgcaaaggcttcacgttccagtgtgccatctgtcacgtggctgtgcggggatcgtccaatttctgcctgacctgtgggcacggtggccacaccagccacatgatggagtggtttcggacccaggaggtgtgtcccaccgggtgtgggtgccactgcctgcttgaaagcactttctgaacctacagaagttgggtattgtctgaaatcccagaggacccataagtgccggtgacaagctgtctgtcaggggagaggctccagaacctgggttcgtccccagtgagaccggaggatgatcccccaaggactgcgcagcatcagctcttggtgggcctctgccttctcttctgtttggccacctggtgtggatgtcactgtgtgaagataaggacagaagtgcagagctgcgctttgtgtgttgtctatgtcggctgagctaccaaggtggaagttttcatggagaaaagcacctggctccagggccagtgttacagtgttaccctgtaaggtgttagccttaaaccaccgagcagcgttctcttgatgccagtgcagagaccagagtcagatgcccgaggacagtgggtaggaatttcatcaacaaatggacctatggcatcatggctttagaagctggtacatttactgagctgatggacagtggccttctaaaatatgacacttaaattgtaaatatgcactgtacttaaggattcttaagatgtatttttttgttatttctcctccagctgctatcccttggctaataaaattctagtaatttgaaaaaaaaaaaaagagagaa

SEQ ID NO: 40810 - DNA, 2508 bp, Homo sapiens
agaaccatacattacttgtcatttataacaaggatttgagacccctgagactcatgtatcctttagagattcatgctttagtccataaatcacatcagtctgaatacaggagtttgagctcatgagatggtaagtttcttcttgaaagctctagggtctcacccttgagaatggattagagaattgcatgttggtgttcatgtttgccaaagaccacgacgctttcaccctgttaggcaatttgagaaaacattgcctttgcgttcagtttattgcactgacatatggaaaactagggtatactatacaaaataatttaacaccaagtaaaaccacttgaatctccataacttggaggcccagggcctggggagagaaacgctcctgacttcaagttgaagtttgcttaatttatgcattaaggccacccctgggacacgtgttcgtgcttccgtttccttgtcactaacacagggatgataaggtttactctacttatttcgtgtaagactcaaataagatagtgagtgtgtaaaggcaaagcccctctgattccttactcacattctagcataatcttcctgaaaggacaaaggggatatgagtacctaaaggacagaaacactccttgttgttcttacctaatagctcatcttcataactgcacctccagagtcgattgcctgctagcatgctgtggcggtccagtgtcctctgagctccttcatgtagctttaggttatataaatgacatgtgtgggaatcccccaaaagcagtgtgattcttccttggagctgggaagacagagcatgtattggctcgctcagatgtcaggttagtccacttagttcttggagaagccacattcatgtttaagcccatgcctgaaagttagccagaggctttgagatgcgttctctagatcatttgtagtacgtggatgccttatattccaaaacaagtttaggcaaactcaaagtaggtcaaactgccggatctgtagaaagccccatttcctgatgggtttttgaggcagaatcaagactcctcccttcccacccctgtggcagtaacacgccatgactgtgaccgctttcctcctcaatccctcctcctgacttgttttctttcctcttatcttttcctcaggttggctcactattgccggctccgggatgttcagacactggcgatgctctgtagcgtgtttgaagcccagtctcggcctcaggggctaccaaacccctttgggccttttcctaaccgttcttctaatcttgtggtgtcccatagtcgatatcctagctttacctcttctggttcctgctccagtatgtcagacccagggctcaacactggcggctggaacatagcgggaagagaggcagagcacttgtcctccccttggggagaatcctcaccagaagagctccgctttgggagtctgacctacagtgatccccgtgagcgagaacgcgaccagcatgataaaaataaaaggctcctggaccccgccaatacccagcaatttgatgactttaagaaatgctatggggaaatcctctaccgttggggtctgagagagaagcgagctgaagtgttgaagtttgtctcctgtcctcctgaccctcacaaagggatcgagttcggcgtgtactgcagccactgccggagtgaggtccgtggcacgcagtgtgccatctgcaaaggcttcacgttccagtgtgccatctgtcacgtggctgtgcggggatcgtccaatttctgcctgacctgtgggcacggtggccacaccagccacatgatggagtggtttcggacccaggaggtgtgtcccaccgggtgtgggtgccactgcctgcttgaaagcactttctgaacctacagaagttgggtattgtctgaaatcccagaggacccataagtgccggtgacaagctgtctgtcaggggagaggctccagaacctgggttcgtccccagtgagaccggaggatgatcccccaaggactgcgcagcatcagctcttggtgggcctctgccttctcttctgtttggccacctggtgtggatgtcactgtgtgaagataaggacagaagtgcagagctgcgctttgtgtgttgtctatgtcggctgagctaccaaggtggaagttttcatggagaaaagcacctggctccagggccagtgttacagtgttaccctgtaaggtgttagccttaaaccaccgagcagcgttctcttgatgccagtgcagagaccagagtcagatgcccgaggacagtgggtaggaatttcatcaacaaatggacctatggcatcatggctttagaagctggtacatttactgagctgatggacagtggccttctaaaatatgacacttaaattgtaaatatgcactgtacttaaggattcttaagatgtatttttttgttatttctcctccagctgctatcccttggctaataaaattctagtaatttgaaaaaaaaaaaaagagagaa

SEQ ID NO: 40811 - DNA, 2659 bp, Homo sapiens
cttggactacaactcccggcagagctcgcggcagggggtgtgcccgcaatcgcgaggagcgtgggtgactcaaaccaagtgacggaagtgagcgagggcgtgcctgtttgttgcaggcgcggtgtagcaattggaggacccaggaagaaggggcggagcctatgcttgggtcaaccaatggcttgagctcaggagcaaccagggcacggggcgtgtcggggctgattctctggctgtgtggggcgcacggtcccgggatactggggacggcggggtgggagggcgccgtcctggggccgcggcggccgggcgggggagatggcggcgcgatggagcagcgaaaacgtggttgtagagttccgtgactcccaggcaactgcgatgtctgtggactgtcttgggcagcatgcagtgctttctggccgcagattcttatacatcgtcaatctagatgcccctttcgaaggtcaccgaaagatctctcgccagagcaaatgggacattggagctgtgcagtggaatcctcatgacagctttgcacactattttgcggcttcgagtaaccaacgagtagacctttacaagtggaaagacggcagtggggaagttggcacaaccttacaaggccacactcgtgtcatcagcgacttggactgggcggtgtttgagcctgacctcctggttaccagctctgtggacacctacatctacatttgggatatcaaagacacaaggaaacctactgttgcactgtctgctgttgcgggtgcctcccaggtcaaatggaataaaaaaaatgctaactgccttgccaccagccatgacggcgatgtgcggatatgggataagaggaaacccagtacagcagtggaatatctagccgcccacctctccaaaatccatggcctggactggcacccagacagcgagcacattcttgctacctccagtcaagacaattctgtgaagttctgggattaccgccagcctcggaaatacctcaatattcttccttgccaggtgcctgtctggaaggccagatacacacctttcagcaatggattggtgactgtgatggttccccagctgcggagggaaaacagccttctcctgtggaatgtctttgacttgaacaccccagtccacaccttcgtggggcatgatgatgtggtcctggagttccagtggaggaagcagaaggaagggtccaaggactatcaactggtgacgtggtcccgggatcagaccttgagaatgtggcgggtggattcccagatgcagaggctttgtgcaaatgacatattagatggtgttgatgagttcattgagagtatttcccttctgccggaacctgagaagaccctgcacactgaagatacagatcaccagcacactgcaagccatggggaggaagaagccctaaaagaagatccccctagaaatctcctggaagagaggaaatcagatcaactggggctgcctcagaccttgcagcaggaattctccctgatcaatgtgcaaatccggaatgtcaatgtggagatggatgcggcagacaggagctgcacagtgtctgtgcactgcagcaaccatcgtgtcaagatgctggtgaagttccctgcacagtacccaaacaacgccgccccttccttccagtttattaaccccacaaccatcacatccaccatgaaagctaagctgctgaaggtgggggtctgggttcccaaattctccttgctgttctgcatcattgtctagatggattagtaaagaagaatgaaaactccagtagatgagattcggaagtcatctgtttcgtacacacactagtattagcaacgtaacctctgaacttgccatttactttgtgcagaaaacatcagagcagtggttcttaaccttttttgggtcatagacttcctttgaattctaatgaaaattatggacccttcctcagaaaaatctgcacaatgattgcatatgatttgagaaatattgcctgtaaatatgtgaattgcatagaatctgcccacagatctcattaatactatgcattcatctccggttaggagatttgcaatccaatttcatttagcagcccaggttaggagccctgcagtccaatttcatttacctgaaaacaacaagcaagatgtattctgaagctaaaagatattttataattagaaaaaaacatatgtaaggtcataaaaaaaattttatcccatagaaggagctggtgttatcctagagacaggctggctagctgcacagtaggtgtccaggtggaggcaccacagcctggcatctgtgtttaattctgcagattcagagatttaatgcatcagttcatccagagcaaatcaggtggaatctccatgacaaagccccatgagcctcttcatacccgttcagtctgagcagtgtcacaagtgaagggactgaagtattctgacaaactcaggccaagctgaatgttgctcattttttgtccagtttgggtcgtggacacttgattgttccaccttgttgggggtatcacatggaaccaggaaattttcaagtggcttaaggatctctgaaatgccagtaactcagatcttgtggtatttgacatgttaaacttggaatctgaatatgccgttgcctagtttggaca

SEQ ID NO: 40812 - DNA, 3163 bp, Homo sapiens
cttggactacaactcccggcagagctcgcggcagggggtgtgcccgcaatcgcgaggagcgtgggtgactcaaaccaagtgacggaagtgagcgagggcgtgcctgtttgttgcaggcgcggtgtagcaattggaggacccaggaagaaggggcggagcctatgcttgggtcaaccaatggcttgagctcaggagcaaccagggcacggggcgtgtcggggctgattctctggctgtgtggggcgcacggtcccgggatactggggacggcggggtgggagggcgccgtcctggggccgcggcggccgggcgggggagatggcggcgcgatggagcagcgaaaacgtggttgtagagttccgtgactcccaggcaactgcgatgtctgtggactgtcttgggcagcatgcagtgctttctggccgcagattcttatacatcgtcaatctagatgcccctttcgaaggtcaccgaaagatctctcgccagagcaaatgggacattggagctgtgcagtggaatcctcatgacagctttgcacactattttgcggcttcgagtaaccaacgagtagacctttacaagtggaaagacggcagtggggaagttggcacaaccttacaaggccacactcgtgtcatcagcgacttggactgggcggtgtttgagcctgacctcctggttaccagctctgtggacacctacatctacatttgggatatcaaagacacaaggaaacctactgttgcactgtctgctgttgcgggtgcctcccaggtcaaatggaataaaaaaaatgctaactgccttgccaccagccatgacggcgatgtgcggatatgggataagaggaaacccagtacagcagtggaatatctagccgcccacctctccaaaatccatggcctggactggcacccagacagcgagcacattcttgctacctccagtcaagacaattctgtgaagttctgggattaccgccagcctcggaaatacctcaatattcttccttgccaggtgcctgtctggaaggccagatacacacctttcagcaatggattggtgactgtgatggttccccagctgcggagggaaaacagccttctcctgtggaatgtctttgacttgaacaccccagtccacaccttcgtggggcatgatgatgtggtcctggagttccagtggaggaagcagaaggaagggtccaaggactatcaactggtgacgtggtcccgggatcagaccttgagaatgtggcgggtggattcccagatgcagaggctttgtgcaaatgacatattagatggtgttgatgagttcattgagagtatttcccttctgccggaacctgagaagaccctgcacactgaagatacagatcaccagcacactgcaagccatggggaggaagaagccctaaaagaagatccccctagaaatctcctggaagagaggaaatcagatcaactggggctgcctcagaccttgcagcaggaattctccctgatcaatgtgcaaatccggaatgtcaatgtggagatggatgcggcagacaggagctgcacagtgtctgtgcactgcagcaaccatcgtgtcaagatgctggtgaagttccctgcacagtacccaaacaacgccgccccttccttccagtttattaaccccacaaccatcacatccaccatgaaagctaagctgctgaagatcctgaaggacacagccctgcagaaagtgaagcgtggccagagctgcctggagccctgcctgcgccagctcgtctcctgccttgagtcctttgtgaaccaggaagacagcgcttccagcaacccgtttgcactccccaactctgtcactccccccttaccgacgtttgcgcgggtgaccacggcttacgggtcgtaccaggacgccaacattccctttcctaggacttctggggccaggttctgcggagcaggttacctggtatatttcacaaggcccatgacaatgcatcgggcggtgtctcccacagagcctactccgagatctctctcagccttgtctgcttatcacactggcttgatcgcgcccatgaagatccgcacagaggcccctgggaaccttcgtttatacagtgggagccccactcgcagcgagaaagagcaggtctccatcagctccttctactacaaggagcggaaatcaagacgatggaaaagtaagcgtgagggatcagactctggcaatcgacagatcaaggctgctgggaaagtcatcatccaggatattgcttgcctcctgcctgttcacaaatcgctgggagagctgtacatattgaatgtgaatgatattcaggaaacatgtcagaagaatgccgcctctgccttgctcgttggaagaaaggatcttgtccaggtttggtcgctggctacggtagctacagatctttgccttggtccgaaatctgacccagatttggaaacaccctgggctcgacatccatttgggcggcagctgctggagtccctgttggctcactattgccggctccgggatgttcagacactggcgatgctctgtagcgtgtttgaagcccagtctcggcctcaggggctaccaaacccctttgggccttttcctaaccgttcttctaatcttgtggtgtcccatagtcgatatcctagctttacctcttctggttcctgctccagtatgtcagacccagggctcaacactggcggctggaacataggtttgtatggaaatgacttagcccacgctggatttttagttctcccagagctgtgcatatgtaacctttagttgatgcttagtctccatattttttcttatttcttatttctctttacatttactgtgatagggatactcttgctggaggcctgactttgcatgttgaacagaccacgttctgggggtctttgtgccttgctgtgttgcttttcatctcttaaccttgagaaactgacaatgggacttcccactgttcacccccaaaacctaacccttatcctttctccttcacatgctctttccatgttcatctgccacctaccgcttcccatgaatgctttcagtgtagacaaatacagctgggcctgactccagttgatcataaagctgtttgctgagtaaggtgtatttgtgtttcctggat

SEQ ID NO: 40813 - DNA, 5904 bp, Homo sapiens
  misc_feature (1415)..(1415): n is a, c, g, or t
catgccaccacgccccgcctaacttttgttagagatgggatttcaccatgttgttcaggctggtcttgaactcttgacatcaagttattcacccgccttggcctcccaaagtgctgggattacaggcatgagccactgcacctggccaactttataagtaaaaagtaaagaagttaaaagcgtttagtggcgacgtgtcgaagctgtctctggcagattcctttctgtatggcttaattcaggtgccaaactattcacttcggattgaagccatggtgctaaagaaggaatttctaccttcttgctcttctctatatacagatataacagttttaagaactgctataaaagaactgatgtcatgtgaagagctacattcaatattacacttggtgctccaggctgggaatatcatgaatgcaggagggtatgccggcaatgcagtaggatttaaactgtcttctttgctcaaattggcagacacaaaagcaaacaaacctgggatgaatctcctgcactttgttgcacaggaagcccaaaagaaagataccattcttctaacttttcagaaaaattgcatcatgttcagaagactgctagattatctctggagaacacggaggcagaactgcacttgctgtttgtcaggacaaaatcactaaaagaaaacatccagcgggatggtgaactttgtcagcagatggaagattttcttcagtttgccatagaaaagctgagggaactggaatgctggaaacaagagctccaggatgaggcctacacccttatagattttttctgtgaagacaaaaaaaccatgaaactggatgaatgctttcagatatttagagatttctgtaccaaattcaacaaagcagttaaggacaaccacgaccgggaggcgcaggagctgaggcagctgcagaggctgaaggagcaggagcagaagcagcgctcctgggcaactggggagctgggggcatttggccggagcagcagtgagaatgatgtggagctgctgaccaagaagggtgcagagggcctgctccctttcctgcaccccaggcccatcagcccctccagcccctcctaccggcccccgaacacccgccgctcccgcctctccctgggtccctctgctgaccgggagctgctgaccttcttggagagctccaccggcagccctgaggagcccaataagttccacagcctgccccggagcagcccccggcaggcccggcccacgatagcctgcctggagcctgcagaagtgaggcaccaggactccagctttgcacacaaacctcaggcctcggggggccaggaggaggcccccaacccaccctcagcacaggcgcaccagcttgcagccgcccagcctgagaaccatgcctctgccttccccagagctcggngccagggcgtcagtgtcctccgaaagaggtacagtgagccggtgagcctgggctcagcacagtcccctcctctctcgccattggctctgggaattaaggagcatgagctggtgacagggctggcccagttcaacctccagggttcccagggcatggaggagacctcccagctgactctgagtgacttcagcccgatggagctagagtctgtggggcataggggcccgcagtccctcagtgccagcagcagcagcctgacacccatgggcagagatgccctggggagtctcagcccagcgctggaggatggcaaggctgcccccgatgagcctggaagtgcagctttgggatctgtgggtagcagcgaccctgagaacaaagatcctagacctctgttctgcatctcggacaccaccgactgctcactgaccctggactgctcagagggaaccgactccagacccagaggcggggacccggaggaaggcggggaaggggatggctccatgtcctctggggttggagaaatgggggacagccaagtctcctccaaccctacatccagcccccctggggaggctcctgcccccgtctctgtggatagtgagcccagctgcaagggcggcctgcccagggacaaacccaccaaaaggaaagatgttgtagcaccaaagagaggctccctgaaagaggcgtctcccggggcctccaagcccgggagcgcccggcggagccagggggcagtggccaagtctgtgcggaccctgaccgcctcagagaacgagagcatgcgcaaggtcatgcccatcaccaagtccagcagaggcgccggctggaggcgaccagagctgtcatcccgggggccctcccagaatccccccagcagcacagatactgtgtggtcacgccagaactccgtgcggagggcctccacaggcgccgaagagcagaggctgccgcgggggagcagcggctccagcagcacccgtccggggagggacgttcccctgcagcccaggggttctttcaagaagcccagtgccaaaccactcaggaacctccccagacagaagcctgaggaaaataagacctgccgcgcccactccgagggccctgagagtcccaaagaagagcccaagaccccgtcagtgcccagcgtcccccacgaactaccccgtgtcccgagctttgcccggaacacagtggcctcctcctctcgaagcatgagaacagatcttcctcccgtggccaaagcccccggcatcactcggacagtgtcgcagcggcagctgagggtgaaaggggaccccgaggatgccgctcccaaggacagcagcactttgaggcgagccagcagtgcccgggcccccaagaagcgcccagagtctgcggagggtcccagtgccaacacggaggcccctctgaaggccagaggggctggggaaagggcctccctccgtcggaaggactccagtcggaccacgctggggagaatcctcaatcccttacggaagtgatgggtgcctgtcctctcctgcctcctgggattcagacggtgaagactgacttctgggacgaggatggggaaagaggcagcatgtctttgttacagataaagcagccactggtgccactgctagtgacgctgttgggatggcacagtccaggaggcctgtggactgcagcctgctgtgctgagccctgctgcagtccagcgtccagatggatgcacgttcactactgtgacggccgcacctcccccatgcaccccaccctcccccaaagcccggatcccgagaaagatttagtaggagtgtaaggtgacattcttatgaaacaagtcaaaaaagtttttttcaggccagtttttatatatcaaagactttctttttaatataaaaattagctaggtgcagtggttcatgcctgtaatccagcactttgggaggctaagatgagtggattgcttgagcctaggagttcgagaccagcctaggcaacatggagaaaccccgtctctatcagaaatacaaaatttggccgagtgtggtggcacatgcctgtggccccagccactctgaacgctgagatgggaaggtcacttgagcccaggaccccaccactgcactccagcctggatgacagagtgagaccttgtctcaaacaaaacaaaacaaaaatgaaatgttctagttttggttccttttgcagagtgaaatgcctcccaggaaaaaaatacatatgtatttttttgcgacagggtcgtgctcttgtctcccagactggactgcagtggcacaatcatagctcactgcagctttgacctcccagacccaagtgatcctcccacctcagcctccctcagagctgggactacaggcgtgcaccaccacgcctggttaattgtttttttttaatttatcttttgtagagatgggatctcactatgttgctcaggctgatctcgagctcctgggctcaagtgatcctcccacctcagcctcccaaagtgctgggattacaggtgtgagccaccacacttggccagtatatcctcagtatgaagatatttttatcttcctgtgttctctggcttcagagtttcacctgcccacacagggtccgttgctggcaactggacttccccataagccttgggtatcctgtgatgggctgtgtctccctgaagattgtctggcttgcccacttctccgtgcatgactctgggtgtgagtctgtctaggaacaggagggaaagttggactcagacagaaatcagatgcttccatgtattcagggcgcgcattgtgagcagtggagtatgagccttgagggcctcatggttgcagggcaggcttccctgcagatgggtggcagcccctggtagaatgctggatttctctggaatctagaagtgccatattttagtggaaaggcatcagggctgtttgacagtgtgcgtctttccaatcccatgttcctccattcgtgtgtctgttataaaactgagtgaaggctgctatgacctgtgttcactctggttacagggaggtgcaaaccattctgtctcccagcctttcttctctctttgtgtgctcccagcacttccttcttttctaacatggcctggagagagtctctctctccttgtctctgtctcttaataatagtttttaacgtggacatctcttccttggtacagtggtttttaaatcctgagaagaaccaagtcaggttttttaaagcagactaaaagcatgaaattgctttcagaagaatgtatatcatcgggaaaagtttgggggcagagtgggggaatcaggctttattcaaaagaaacagttgaaaacatggactttttctacccaatgcccatttcacgactcctctgagactaattgggaaacggggaaattcttggaattttttttttaagaaacttttttgtgttttttttaattttaggtcacttattagtgaaacctcattttagatctgacattggtagatagatggatttaggcaaatatgatgcgtttgtggggaatccacgtggttgacgttagaacctcccttctgcagactgttgcctgtcatctaagcgaattggaaatgctgagcttccataagtcagctgagttttaaaggtaaacgttatggctgaagtagtaaagcacctgaccacaaaacctcttgtaaaaacagccctgagtaggtatttccagggctccacaaagttgcttatgggaatcctgagctgcttttcaccatctcaagaagcctaagaagttatatatttaatcaggtagacaaaacagttcaaagcataaggtccatggtggtggaaaatggatgcaagtgattctaagtttgtggatttgtggatagcagagggatcgggacctcttggaggaaccctgggtaccaagctcccaggcccttcctctatcatggatgctgggtgactttgggaagtcaccacctcttcccaagcctgtttcccatatcacagatgtggggccatggcctcgatgatggtctccacaggtctttccacctctgtgagtccaagtcaggtcaatcagcaaggacccatctctgccctgggtcagctcctcagaaccaacccccagcatctctaaagcaaaagcctcacctcaagggctgctcagaagagagcaccttcagcatgagttgttgctggaagatctaataagctgtgtttcctgggaagtggtgctttacttagccctgtggacaacttctctatgcatctgtgtgagcagatgatcattgtattaccttttatcggtagtaagcttggaaaaataatttaagaatacaatggagaaatgtaaataagtatctatgtaaatttgtttaaaataaactgaatgtatttaatggtccatttatatgttcttttatgtaacatgtagtttaataaagttcctgtttatgagagtcatgtttcatctcagcttcttcc

SEQ ID NO: 40814 - DNA, 4201 bp, Homo sapiens
aggttcctgagtggtttggcactgggcttcttgaaagaacccctggaagtgcagctttgggatctgtgggtagcagcgaccctgagaacaaagatcctagacctctgttctgcatctcggacaccaccgactgctcactgaccctggactgctcagagggaaccgactccagacccagaggcggggacccggaggaaggcggggaaggggatggctccatgtcctctggggttggagaaatgggggacagccaagtctcctccaaccctacatccagcccccctggggaggctcctgcccccgtctctgtggatagtgagcccagctgcaagggcggcctgcccagggacaaacccaccaaaaggaaagatgttgtagcaccaaagagaggctccctgaaagaggcgtctcccggggcctccaagcccgggagcgcccggcggagccagggggcagtggccaagtctgtgcggaccctgaccgcctcagagaacgagagcatgcgcaaggtcatgcccatcaccaagtccagcagaggcgccggctggaggcgaccagagctgtcatcccgggggccctcccagaatccccccagcagcacagatactgtgtggtcacgccagaactccgtgcggagggcctccacaggcgccgaagagcagaggctgccgcgggggagcagcggctccagcagcacccgtccggggagggacgttcccctgcagcccaggggttctttcaagaagcccagtgccaaaccactcaggaacctccccagacagaagcctgaggaaaataagacctgccgcgcccactccgagggccctgagagtcccaaagaagagcccaagaccccgtcagtgcccagcgtcccccacgaactaccccgtgtcccgagctttgcccggaacacagtggcctcctcctctcgaagcatgagaacagatcttcctcccgtggccaaagcccccggcatcactcggacagtgtcgcagcggcagctgagggtgaaaggggaccccgaggatgccgctcccaaggacagcagcactttgaggcgagccagcagtgcccgggcccccaagaagcgcccagagtctgcggagggtcccagtgccaacacggaggcccctctgaaggccagaggggctggggaaagggcctccctccgtcggaaggactccagtcggaccacgctggggagaatcctcaatcccttacggaagtgatgggtgcctgtcctctcctgcctcctgggattcagacggtgaagactgacttctgggacgaggatggggaaagaggcagcatgtctttgttacagataaagcagccactggtgccactgctagtgacgctgttgggatggcacagtccaggaggcctgtggactgcagcctgctgtgctgagccctgctgcagtccagcgtccagatggatgcacgttcactactgtgacggccgcacctcccccatgcaccccaccctcccccaaagcccggatcccgagaaagatttagtaggagtgtaaggtgacattcttatgaaacaagtcaaaaaagtttttttcaggccagtttttatatatcaaagactttctttttaatataaaaattagctaggtgcagtggttcatgcctgtaatccagcactttgggaggctaagatgagtggattgcttgagcctaggagttcgagaccagcctaggcaacatggagaaaccccgtctctatcagaaatacaaaatttggccgagtgtggtggcacatgcctgtggccccagccactctgaacgctgagatgggaaggtcacttgagcccaggaccccaccactgcactccagcctggatgacagagtgagaccttgtctcaaacaaaacaaaacaaaaatgaaatgttctagttttggttccttttgcagagtgaaatgcctcccaggaaaaaaatacatatgtatttttttgcgacagggtcgtgctcttgtctcccagactggactgcagtggcacaatcatagctcactgcagctttgacctcccagacccaagtgatcctcccacctcagcctccctcagagctgggactacaggcgtgcaccaccacgcctggttaattgtttttttttaatttatcttttgtagagatgggatctcactatgttgctcaggctgatctcgagctcctgggctcaagtgatcctcccacctcagcctcccaaagtgctgggattacaggtgtgagccaccacacttggccagtatatcctcagtatgaagatatttttatcttcctgtgttctctggcttcagagtttcacctgcccacacagggtccgttgctggcaactggacttccccataagccttgggtatcctgtgatgggctgtgtctccctgaagattgtctggcttgcccacttctccgtgcatgactctgggtgtgagtctgtctaggaacaggagggaaagttggactcagacagaaatcagatgcttccatgtattcagggcgcgcattgtgagcagtggagtatgagccttgagggcctcatggttgcagggcaggcttccctgcagatgggtggcagcccctggtagaatgctggatttctctggaatctagaagtgccatattttagtggaaaggcatcagggctgtttgacagtgtgcgtctttccaatcccatgttcctccattcgtgtgtctgttataaaactgagtgaaggctgctatgacctgtgttcactctggttacagggaggtgcaaaccattctgtctcccagcctttcttctctctttgtgtgctcccagcacttccttcttttctaacatggcctggagagagtctctctctccttgtctctgtctcttaataatagtttttaacgtggacatctcttccttggtacagtggtttttaaatcctgagaagaaccaagtcaggttttttaaagcagactaaaagcatgaaattgctttcagaagaatgtatatcatcgggaaaagtttgggggcagagtgggggaatcaggctttattcaaaagaaacagttgaaaacatggactttttctacccaatgcccatttcacgactcctctgagactaattgggaaacggggaaattcttggaattttttttttaagaaacttttttgtgttttttttaattttaggtcacttattagtgaaacctcattttagatctgacattggtagatagatggatttaggcaaatatgatgcgtttgtggggaatccacgtggttgacgttagaacctcccttctgcagactgttgcctgtcatctaagcgaattggaaatgctgagcttccataagtcagctgagttttaaaggtaaacgttatggctgaagtagtaaagcacctgaccacaaaacctcttgtaaaaacagccctgagtaggtatttccagggctccacaaagttgcttatgggaatcctgagctgcttttcaccatctcaagaagcctaagaagttatatatttaatcaggtagacaaaacagttcaaagcataaggtccatggtggtggaaaatggatgcaagtgattctaagtttgtggatttgtggatagcagagggatcgggacctcttggaggaaccctgggtaccaagctcccaggcccttcctctatcatggatgctgggtgactttgggaagtcaccacctcttcccaagcctgtttcccatatcacagatgtggggccatggcctcgatgatggtctccacaggtctttccacctctgtgagtccaagtcaggtcaatcagcaaggacccatctctgccctgggtcagctcctcagaaccaacccccagcatctctaaagcaaaagcctcacctcaagggctgctcagaagagagcaccttcagcatgagttgttgctggaagatctaataagctgtgtttcctgggaagtggtgctttacttagccctgtggacaacttctctatgcatctgtgtgagcagatgatcattgtattaccttttatcggtagtaagcttggaaaaataatttaagaatacaatggagaaatgtaaataagtatctatgtaaatttgtttaaaataaactgaatgtatttaatggtccatttatatgttcttttatgtaacatgtagtttaataaagttcctgtttatgagagtcatgtttcatctcagcttcttcc

SEQ ID NO: 40815 - DNA, 5177 bp, Homo sapiens
  misc_feature (1415)..(1415): n is a, c, g, or t
catgccaccacgccccgcctaacttttgttagagatgggatttcaccatgttgttcaggctggtcttgaactcttgacatcaagttattcacccgccttggcctcccaaagtgctgggattacaggcatgagccactgcacctggccaactttataagtaaaaagtaaagaagttaaaagcgtttagtggcgacgtgtcgaagctgtctctggcagattcctttctgtatggcttaattcaggtgccaaactattcacttcggattgaagccatggtgctaaagaaggaatttctaccttcttgctcttctctatatacagatataacagttttaagaactgctataaaagaactgatgtcatgtgaagagctacattcaatattacacttggtgctccaggctgggaatatcatgaatgcaggagggtatgccggcaatgcagtaggatttaaactgtcttctttgctcaaattggcagacacaaaagcaaacaaacctgggatgaatctcctgcactttgttgcacaggaagcccaaaagaaagataccattcttctaacttttcagaaaaattgcatcatgttcagaagactgctagattatctctggagaacacggaggcagaactgcacttgctgtttgtcaggacaaaatcactaaaagaaaacatccagcgggatggtgaactttgtcagcagatggaagattttcttcagtttgccatagaaaagctgagggaactggaatgctggaaacaagagctccaggatgaggcctacacccttatagattttttctgtgaagacaaaaaaaccatgaaactggatgaatgctttcagatatttagagatttctgtaccaaattcaacaaagcagttaaggacaaccacgaccgggaggcgcaggagctgaggcagctgcagaggctgaaggagcaggagcagaagcagcgctcctgggcaactggggagctgggggcatttggccggagcagcagtgagaatgatgtggagctgctgaccaagaagggtgcagagggcctgctccctttcctgcaccccaggcccatcagcccctccagcccctcctaccggcccccgaacacccgccgctcccgcctctccctgggtccctctgctgaccgggagctgctgaccttcttggagagctccaccggcagccctgaggagcccaataagttccacagcctgccccggagcagcccccggcaggcccggcccacgatagcctgcctggagcctgcagaagtgaggcaccaggactccagctttgcacacaaacctcaggcctcggggggccaggaggaggcccccaacccaccctcagcacaggcgcaccagcttgcagccgcccagcctgagaaccatgcctctgccttccccagagctcggngccagggcgtcagtgtcctccgaaagaggtacagtgagccggtgagcctgggctcagcacagtcccctcctctctcgccattggctctgggaattaaggagcatgagctggtgacagggctggcccagttcaacctccagggttcccagggcatggaggagacctcccagctgactctgagtgacttcagcccgatggagctagagtctgtggggcataggggcccgcagtccctcagtgccagcagcagcagcctgacacccatgggcagagatgccctggggagtctcagcccagcgctggaggatggcaaggctgcccccgatgagcctggaagtgcagctttgggatctgtgggtagcagcgaccctgagaacaaagatcctagacctctgttctgcatctcggacaccaccgactgctcactgaccctggactgctcagagggaaccgactccagacccagaggcggggacccggaggaaggcggggaaggggatggctccatgtcctctggggttggagaaatgggggacagccaagtctcctccaaccctacatccagcccccctggggaggctcctgcccccgtctctgtggatagtgagcccagctgcaagggcggcctgcccagggacaaacccaccaaaaggaaagatgttgtagcaccaaagagaggctccctgaaagaggcgtctcccggggcctccaagcccgggagcgcccggcggagccagggggcagtggccaagtctgtgcggaccctgaccgcctcagagaacgagagcatgcgcaaggtcatgcccatcaccaagtccagcagaggcgccggctggaggcgaccagagctgtcatcccgggggccctcccagaatccccccagcagcacagatactgtgtggtcacgccagaactccgtgcggagggcctccacaggcgccgaagagcagaggctgccgcgggggagcagcggctccagcagcacccgtccggggagggacgttcccctgcagcccaggggttctttcaagaagcccagtgccaaaccactcaggaacctccccagacagaagcctgaggaaaataagacctgccgcgcccactccgagggccctgagagtcccaaagaagagcccaagaccccgtcagtgcccagcgtcccccacgaactaccccgtgtcccgagctttgcccggaacacagtggcctcctcctctcgaagcatgagaacagatcttcctcccgtggccaaagcccccggcatcactcggacagtgtcgcagcggcagctgagggtgaaaggggaccccgaggatgccgctcccaaggacagcagcactttgaggcgagccagcagtgcccgggcccccaagaagcgcccagagtctgcggagggtcccagtgccaacacggaggcccctctgaaggccagaggggctggggaaagggcctccctccgtcggaaggactccagtcggaccacgctggggagaatcctcaatcccttacggaagtgatgggtgcctgtcctctcctgcctcctgggattcagacggtgaagactgacttctgggacgaggatggggaaagaggcagcatgtctttgttacagataaagcagccactggtgccactgctagtgacgctgttgggatggcacagtccaggaggcctgtggactgcagcctgctgtgctgagccctgctgcagtccagcgtccagatggatgcacgttcactactgtgacggccgcacctcccccatgcaccccaccctcccaaagtgctgggattacaggtgtgagccaccacacttggccagtatatcctcagtatgaagatatttttatcttcctgtgttctctggcttcagagtttcacctgcccacacagggtccgttgctggcaactggacttccccataagccttgggtatcctgtgatgggctgtgtctccctgaagattgtctggcttgcccacttctccgtgcatgactctgggtgtgagtctgtctaggaacaggagggaaagttggactcagacagaaatcagatgcttccatgtattcagggcgcgcattgtgagcagtggagtatgagccttgagggcctcatggttgcagggcaggcttccctgcagatgggtggcagcccctggtagaatgctggatttctctggaatctagaagtgccatattttagtggaaaggcatcagggctgtttgacagtgtgcgtctttccaatcccatgttcctccattcgtgtgtctgttataaaactgagtgaaggctgctatgacctgtgttcactctggttacagggaggtgcaaaccattctgtctcccagcctttcttctctctttgtgtgctcccagcacttccttcttttctaacatggcctggagagagtctctctctccttgtctctgtctcttaataatagtttttaacgtggacatctcttccttggtacagtggtttttaaatcctgagaagaaccaagtcaggttttttaaagcagactaaaagcatgaaattgctttcagaagaatgtatatcatcgggaaaagtttgggggcagagtgggggaatcaggctttattcaaaagaaacagttgaaaacatggactttttctacccaatgcccatttcacgactcctctgagactaattgggaaacggggaaattcttggaattttttttttaagaaacttttttgtgttttttttaattttaggtcacttattagtgaaacctcattttagatctgacattggtagatagatggatttaggcaaatatgatgcgtttgtggggaatccacgtggttgacgttagaacctcccttctgcagactgttgcctgtcatctaagcgaattggaaatgctgagcttccataagtcagctgagttttaaaggtaaacgttatggctgaagtagtaaagcacctgaccacaaaacctcttgtaaaaacagccctgagtaggtatttccagggctccacaaagttgcttatgggaatcctgagctgcttttcaccatctcaagaagcctaagaagttatatatttaatcaggtagacaaaacagttcaaagcataaggtccatggtggtggaaaatggatgcaagtgattctaagtttgtggatttgtggatagcagagggatcgggacctcttggaggaaccctgggtaccaagctcccaggcccttcctctatcatggatgctgggtgactttgggaagtcaccacctcttcccaagcctgtttcccatatcacagatgtggggccatggcctcgatgatggtctccacaggtctttccacctctgtgagtccaagtcaggtcaatcagcaaggacccatctctgccctgggtcagctcctcagaaccaacccccagcatctctaaagcaaaagcctcacctcaagggctgctcagaagagagcaccttcagcatgagttgttgctggaagatctaataagctgtgtttcctgggaagtggtgctttacttagccctgtggacaacttctctatgcatctgtgtgagcagatgatcattgtattaccttttatcggtagtaagcttggaaaaataatttaagaatacaatggagaaatgtaaataagtatctatgtaaatttgtttaaaataaactgaatgtatttaatggtccatttatatgttcttttatgtaacatgtagtttaataaagttcctgtttatgagagtcatgtttcatctcagcttcttcc

SEQ ID NO: 40816 - DNA, 6365 bp, Homo sapiens
  misc_feature (1876)..(1876): n is a, c, g, or t
agaaaatgggaatattgccacagcacctggattcatgattgggcagacacctcctccagcacctcctccacctcctcctccaccccctccatctccaccatgttcatgttcaagggaagagtgtccttcctcccctcctccacccccaccacctccacttcctggggagcctcccatcccacctcccccaccaggcctacccccaactactcacatgaacggctacagccaccttggtaagaaaaagcggatgagaagctttttttggaaaactattccggaggagcaagttcgaggcaaaaccaacatctggaccttggcagccaggcaggaacatcactaccaaattgatacaaagaccattgaggagctctttgggcagcaggaagacaccaccaagtcttcccttcctaggagaggaagaactttaaattcatccttcagagaagctcgagaagagattactattttggatgcaaaacggagcatgaacattgggatatttcttaagcaatttaagaagtctcctcggtccattgtagaagatattcatcaaggaaaaagtgagcattatggatcagagaccttgcgagaatttcttaagtttttgccagagtcagaagaggtaaagaagttaaaagcgtttagtggcgacgtgtcgaagctgtctctggcagattcctttctgtatggcttaattcaggtgccaaactattcacttcggattgaagccatggtgctaaagaaggaatttctaccttcttgctcttctctatatacagatataacagttttaagaactgctataaaagaactgatgtcatgtgaagagctacattcaatattacacttggtgctccaggctgggaatatcatgaatgcaggagggtatgccggcaatgcagtaggatttaaactgtcttctttgctcaaattggcagacacaaaagcaaacaaacctgggatgaatctcctgcactttgttgcacaggaagcccaaaagaaagataccattcttctaacttttcagaaaaattgcatcatgttcagaagactgctagattatctctggagaacacggaggcagaactgcacttgctgtttgtcaggacaaaatcactaaaagaaaacatccagcgggatggtgaactttgtcagcagatggaagattttcttcagtttgccatagaaaagctgagggaactggaatgctggaaacaagagctccaggatgaggcctacacccttatagattttttctgtgaagacaaaaaaaccatgaaactggatgaatgctttcagatatttagagatttctgtaccaaattcaacaaagcagttaaggacaaccacgaccgggaggcgcaggagctgaggcagctgcagaggctgaaggagcaggagcagaagcagcgctcctgggcaactggggagctgggggcatttggccggagcagcagtgagaatgatgtggagctgctgaccaagaagggtgcagagggcctgctccctttcctgcaccccaggcccatcagcccctccagcccctcctaccggcccccgaacacccgccgctcccgcctctccctgggtccctctgctgaccgggagctgctgaccttcttggagagctccaccggcagccctgaggagcccaataagttccacagcctgccccggagcagcccccggcaggcccggcccacgatagcctgcctggagcctgcagaagtgaggcaccaggactccagctttgcacacaaacctcaggcctcggggggccaggaggaggcccccaacccaccctcagcacaggcgcaccagcttgcagccgcccagcctgagaaccatgcctctgccttccccagagctcggngccagggcgtcagtgtcctccgaaagaggtacagtgagccggtgagcctgggctcagcacagtcccctcctctctcgccattggctctgggaattaaggagcatgagctggtgacagggctggcccagttcaacctccagggttcccagggcatggaggagacctcccagctgactctgagtgacttcagcccgatggagctagagtctgtggggcataggggcccgcagtccctcagtgccagcagcagcagcctgacacccatgggcagagatgccctggggagtctcagcccagcgctggaggatggcaaggctgcccccgatgagcctggaagtgcagctttgggatctgtgggtagcagcgaccctgagaacaaagatcctagacctctgttctgcatctcggacaccaccgactgctcactgaccctggactgctcagagggaaccgactccagacccagaggcggggacccggaggaaggcggggaaggggatggctccatgtcctctggggttggagaaatgggggacagccaagtctcctccaaccctacatccagcccccctggggaggctcctgcccccgtctctgtggatagtgagcccagctgcaagggcggcctgcccagggacaaacccaccaaaaggaaagatgttgtagcaccaaagagaggctccctgaaagaggcgtctcccggggcctccaagcccgggagcgcccggcggagccagggggcagtggccaagtctgtgcggaccctgaccgcctcagagaacgagagcatgcgcaaggtcatgcccatcaccaagtccagcagaggcgccggctggaggcgaccagagctgtcatcccgggggccctcccagaatccccccagcagcacagatactgtgtggtcacgccagaactccgtgcggagggcctccacaggcgccgaagagcagaggctgccgcgggggagcagcggctccagcagcacccgtccggggagggacgttcccctgcagcccaggggttctttcaagaagcccagtgccaaaccactcaggaacctccccagacagaagcctgaggaaaataagacctgccgcgcccactccgagggccctgagagtcccaaagaagagcccaagaccccgtcagtgcccagcgtcccccacgaactaccccgtgtcccgagctttgcccggaacacagtggcctcctcctctcgaagcatgagaacagatcttcctcccgtggccaaagcccccggcatcactcggacagtgtcgcagcggcagctgagggtgaaaggggaccccgaggatgccgctcccaaggacagcagcactttgaggcgagccagcagtgcccgggcccccaagaagcgcccagagtctgcggagggtcccagtgccaacacggaggcccctctgaaggccagaggggctggggaaagggcctccctccgtcggaaggactccagtcggaccacgctggggagaatcctcaatcccttacggaagtgatgggtgcctgtcctctcctgcctcctgggattcagacggtgaagactgacttctgggacgaggatggggaaagaggcagcatgtctttgttacagataaagcagccactggtgccactgctagtgacgctgttgggatggcacagtccaggaggcctgtggactgcagcctgctgtgctgagccctgctgcagtccagcgtccagatggatgcacgttcactactgtgacggccgcacctcccccatgcaccccaccctcccccaaagcccggatcccgagaaagatttagtaggagtgtaaggtgacattcttatgaaacaagtcaaaaaagtttttttcaggccagtttttatatatcaaagactttctttttaatataaaaattagctaggtgcagtggttcatgcctgtaatccagcactttgggaggctaagatgagtggattgcttgagcctaggagttcgagaccagcctaggcaacatggagaaaccccgtctctatcagaaatacaaaatttggccgagtgtggtggcacatgcctgtggccccagccactctgaacgctgagatgggaaggtcacttgagcccaggaccccaccactgcactccagcctggatgacagagtgagaccttgtctcaaacaaaacaaaacaaaaatgaaatgttctagttttggttccttttgcagagtgaaatgcctcccaggaaaaaaatacatatgtatttttttgcgacagggtcgtgctcttgtctcccagactggactgcagtggcacaatcatagctcactgcagctttgacctcccagacccaagtgatcctcccacctcagcctccctcagagctgggactacaggcgtgcaccaccacgcctggttaattgtttttttttaatttatcttttgtagagatgggatctcactatgttgctcaggctgatctcgagctcctgggctcaagtgatcctcccacctcagcctcccaaagtgctgggattacaggtgtgagccaccacacttggccagtatatcctcagtatgaagatatttttatcttcctgtgttctctggcttcagagtttcacctgcccacacagggtccgttgctggcaactggacttccccataagccttgggtatcctgtgatgggctgtgtctccctgaagattgtctggcttgcccacttctccgtgcatgactctgggtgtgagtctgtctaggaacaggagggaaagttggactcagacagaaatcagatgcttccatgtattcagggcgcgcattgtgagcagtggagtatgagccttgagggcctcatggttgcagggcaggcttccctgcagatgggtggcagcccctggtagaatgctggatttctctggaatctagaagtgccatattttagtggaaaggcatcagggctgtttgacagtgtgcgtctttccaatcccatgttcctccattcgtgtgtctgttataaaactgagtgaaggctgctatgacctgtgttcactctggttacagggaggtgcaaaccattctgtctcccagcctttcttctctctttgtgtgctcccagcacttccttcttttctaacatggcctggagagagtctctctctccttgtctctgtctcttaataatagtttttaacgtggacatctcttccttggtacagtggtttttaaatcctgagaagaaccaagtcaggttttttaaagcagactaaaagcatgaaattgctttcagaagaatgtatatcatcgggaaaagtttgggggcagagtgggggaatcaggctttattcaaaagaaacagttgaaaacatggactttttctacccaatgcccatttcacgactcctctgagactaattgggaaacggggaaattcttggaattttttttttaagaaacttttttgtgttttttttaattttaggtcacttattagtgaaacctcattttagatctgacattggtagatagatggatttaggcaaatatgatgcgtttgtggggaatccacgtggttgacgttagaacctcccttctgcagactgttgcctgtcatctaagcgaattggaaatgctgagcttccataagtcagctgagttttaaaggtaaacgttatggctgaagtagtaaagcacctgaccacaaaacctcttgtaaaaacagccctgagtaggtatttccagggctccacaaagttgcttatgggaatcctgagctgcttttcaccatctcaagaagcctaagaagttatatatttaatcaggtagacaaaacagttcaaagcataaggtccatggtggtggaaaatggatgcaagtgattctaagtttgtggatttgtggatagcagagggatcgggacctcttggaggaaccctgggtaccaagctcccaggcccttcctctatcatggatgctgggtgactttgggaagtcaccacctcttcccaagcctgtttcccatatcacagatgtggggccatggcctcgatgatggtctccacaggtctttccacctctgtgagtccaagtcaggtcaatcagcaaggacccatctctgccctgggtcagctcctcagaaccaacccccagcatctctaaagcaaaagcctcacctcaagggctgctcagaagagagcaccttcagcatgagttgttgctggaagatctaataagctgtgtttcctgggaagtggtgctttacttagccctgtggacaacttctctatgcatctgtgtgagcagatgatcattgtattaccttttatcggtagtaagcttggaaaaataatttaagaatacaatggagaaatgtaaataagtatctatgtaaatttgtttaaaataaactgaatgtatttaatggtccatttatatgttcttttatgtaacatgtagtttaataaagttcctgtttatgagagtcatgtttcatctcagcttcttcc

SEQ ID NO: 40817 - DNA, 5816 bp, Homo sapiens
  misc_feature (1415)..(1415): n is a, c, g, or t
catgccaccacgccccgcctaacttttgttagagatgggatttcaccatgttgttcaggctggtcttgaactcttgacatcaagttattcacccgccttggcctcccaaagtgctgggattacaggcatgagccactgcacctggccaactttataagtaaaaagtaaagaagttaaaagcgtttagtggcgacgtgtcgaagctgtctctggcagattcctttctgtatggcttaattcaggtgccaaactattcacttcggattgaagccatggtgctaaagaaggaatttctaccttcttgctcttctctatatacagatataacagttttaagaactgctataaaagaactgatgtcatgtgaagagctacattcaatattacacttggtgctccaggctgggaatatcatgaatgcaggagggtatgccggcaatgcagtaggatttaaactgtcttctttgctcaaattggcagacacaaaagcaaacaaacctgggatgaatctcctgcactttgttgcacaggaagcccaaaagaaagataccattcttctaacttttcagaaaaattgcatcatgttcagaagactgctagattatctctggagaacacggaggcagaactgcacttgctgtttgtcaggacaaaatcactaaaagaaaacatccagcgggatggtgaactttgtcagcagatggaagattttcttcagtttgccatagaaaagctgagggaactggaatgctggaaacaagagctccaggatgaggcctacacccttatagattttttctgtgaagacaaaaaaaccatgaaactggatgaatgctttcagatatttagagatttctgtaccaaattcaacaaagcagttaaggacaaccacgaccgggaggcgcaggagctgaggcagctgcagaggctgaaggagcaggagcagaagcagcgctcctgggcaactggggagctgggggcatttggccggagcagcagtgagaatgatgtggagctgctgaccaagaagggtgcagagggcctgctccctttcctgcaccccaggcccatcagcccctccagcccctcctaccggcccccgaacacccgccgctcccgcctctccctgggtccctctgctgaccgggagctgctgaccttcttggagagctccaccggcagccctgaggagcccaataagttccacagcctgccccggagcagcccccggcaggcccggcccacgatagcctgcctggagcctgcagaagtgaggcaccaggactccagctttgcacacaaacctcaggcctcggggggccaggaggaggcccccaacccaccctcagcacaggcgcaccagcttgcagccgcccagcctgagaaccatgcctctgccttccccagagctcggngccagggcgtcagtgtcctccgaaagaggtacagtgagccggtgagcctgggctcagcacagtcccctcctctctcgccattggctctgggaattaaggagcatgagctggtgacagggctggcccagttcaacctccagggttcccagggcatggaggagacctcccagctgactctgagtgacttcagcccgatggagctagagtctgtggggcataggggcccgcagtccctcagtgccagcagcagcagcctgacacccatgggcagagatgccctggggagtctcagcccagcgctggaggatggcaaggctgcccccgatgagcctggaagtgcagctttgggatctgtgggtagcagcgaccctgagaacaaagatcctagacctctgttctgcatctcggacaccaccgactgctcactgaccctggactgctcagagggaaccgactccagacccagaggcggggacccggaggaaggcggggaaggggatggctccatgtcctctggggttggagaaatgggggacagccaagtctcctccaaccctacatccagcccccctggggaggctcctgcccccgtctctgtggatagtgagcccagctgcaagggcggcctgcccagggacaaacccaccaaaaggaaagatgttgtagcaccaaagagaggctccctgaaagaggcgtctcccggggcctccaagcccgggagcgcccggcggagccagggggcagtggccaagtctgtgcggaccctgaccgcctcagagaacgagagcatgcgcaaggtcatgcccatcaccaagtccagcagaggcgccggctggaggcgaccagagctgtcatcccgggggccctcccagaatccccccagcagcacagatactgtgtggtcacgccagaactccgtgcggagggcctccacaggcgccgaagagcagaggctgccgcgggggagcagcggctccagcagcacccgtccggggagggacgttcccctgcagcccaggggttctttcaagaagcccagtgccaaaccactcaggaacctccccagacagaagcctgaggaaaataagacctgccgcgcccactccgagggccctgagagtcccaaagaagagcccaagaccccgtcagtgcccagcgtcccccacgaactaccccgtgtcccgagctttgcccggaacacagtggcctcctcctctcgaagcatgagaacagatcttcctcccgtggccaaagcccccggcatcactcggacagtgtcgcagcggcagctgagggtgaaaggggaccccgaggatgccgctcccaaggacagcagcactttgaggcgagccagcagtgcccgggcccccaagaagcgcccagagtctgcggagggtcccagtgccaacacggaggcccctctgaaggccagaggggctggggaaagggcctccctccgtcggaaggactccagtcggaccacgctggggagaatcctcaatcccttacggaagtgatgggtgcctgtcctctcctgcctcctgggattcagacggtgaagactgacttctgggacgaggatggggaaagaggcagcatgtctttgttacagataaagcagccactggtgccactgctagtgacgctgttgggatggcacagtccaggaggcctgtggactgcagcctgctgtgctgagccctgctgcagtccagcgtccagatggatgcacgttcactactgtgacggccgcacctcccccatgcaccccaccctcccccaaagcccggatcccgagaaagatttagtaggagtgtaaggtgacattcttatgaaacaagtcaaaaaagtttttttcaggccagtttttatatatcaaagactttctttttaatataaaaattagctaggtgcagtggttcatgcctgtaatccagcactttgggaggctaagatgagtggattgcttgagcctaggagttcgagaccagcctaggcaacatggagaaaccccgtctctatcagaaatacaaaatttggccgagtgtggtggcacatgcctgtggccccagccactctgaacgctgagatgggaaggtcacttgagcccaggaccccaccactgcactccagcctggatgacagagtgagaccttgtctcaaacaaaacaaaacaaaaatgaaatgttctagttttggttccttttgcagagtgaaatgcctcccaggaaaaaaatacatatgtatttttttgcgacagggtcgtgctcttgtctcccagactggactgcagtggcacaatcatagctcactgcagctttgacctcccagacccaagtgatcctcccacctcagcctccctcagagctgggactacaggcgtgcaccaccacgcctggttaattgtttttttttaatttatcttttgtagagatgggatctcactatgttgctcaggctgatctcgagctcctgggctcaagtgatcctcccacctcagcctcccaaagtgctgggattacaggtgtgagccaccacacttggccagtatatcctcagtatgaagatatttttatcttcctgtgttctctggcttcagagtttcacctgcccacacagggtccgttgctggcaactggacttccccataagccttgggtatcctgtgatgggctgtgtctccctgaagattgtctggcttgcccacttctccgtgcatgactctgggtgtgagtctgtctaggaacaggagggaaagttggactcagacagaaatcagatgcttccatgtattcagggcgcgcattgtgagcagtggagtatgagccttgagggcctcatggttgcagggcaggcttccctgcagatgggtggcagcccctggtagaatgctggatttctctggaatctagaagtgccatattttagtggaaaggcatcagggctgtttgacagtgtgcgtctttccaatcccatgttcctccattcgtgtgtctgttataaaactgagtgaaggctgctatgacctgtgttcactctggttacagggaggtgcaaaccattctgtctcccagcctttcttctctctttgtgtgctcccagcacttccttcttttctaacatggcctggagagagtctctctctccttgtctctgtctcttaataatagtttttaacgtggacatctcttccttggtacagtggtttttaaatcctgagaagaaccaagtcaggctttattcaaaagaaacagttgaaaacatggactttttctacccaatgcccatttcacgactcctctgagactaattgggaaacggggaaattcttggaattttttttttaagaaacttttttgtgttttttttaattttaggtcacttattagtgaaacctcattttagatctgacattggtagatagatggatttaggcaaatatgatgcgtttgtggggaatccacgtggttgacgttagaacctcccttctgcagactgttgcctgtcatctaagcgaattggaaatgctgagcttccataagtcagctgagttttaaaggtaaacgttatggctgaagtagtaaagcacctgaccacaaaacctcttgtaaaaacagccctgagtaggtatttccagggctccacaaagttgcttatgggaatcctgagctgcttttcaccatctcaagaagcctaagaagttatatatttaatcaggtagacaaaacagttcaaagcataaggtccatggtggtggaaaatggatgcaagtgattctaagtttgtggatttgtggatagcagagggatcgggacctcttggaggaaccctgggtaccaagctcccaggcccttcctctatcatggatgctgggtgactttgggaagtcaccacctcttcccaagcctgtttcccatatcacagatgtggggccatggcctcgatgatggtctccacaggtctttccacctctgtgagtccaagtcaggtcaatcagcaaggacccatctctgccctgggtcagctcctcagaaccaacccccagcatctctaaagcaaaagcctcacctcaagggctgctcagaagagagcaccttcagcatgagttgttgctggaagatctaataagctgtgtttcctgggaagtggtgctttacttagccctgtggacaacttctctatgcatctgtgtgagcagatgatcattgtattaccttttatcggtagtaagcttggaaaaataatttaagaatacaatggagaaatgtaaataagtatctatgtaaatttgtttaaaataaactgaatgtatttaatggtccatttatatgttcttttatgtaacatgtagtttaataaagttcctgtttatgagagtcatgtttcatctcagcttcttcc

SEQ ID NO: 40818 - DNA, 383 bp, Homo sapiens
gaacaatgagaacacttggacacagaaaggggaacatcacacactggggcctgttgtggggtggggggacgggagagggatagcattaggagacatacctaatgttaaatgacgagctaatgggtgcaggacaccaacatggcacatgtatacatatgtaacaaacctgcacattgtgcacatgtaccctaaaacttaaagtataattaaaaaaaaaagaaataaaatgatgtcttctcaaatatctcggagttaattttagagatcactgtgtgtgttttgtgtgtacataattataggtaatgcttaataaaaaggatgcttaacaatgaacttgctattgtacacagggggatttttagctttcagagcattatgtatgc

SEQ ID NO: 40819 - DNA, 434 bp, Homo sapiens
taacattactacccactcagttatctaatcaatcacccaagccattcttttcactgctgatagaatgattttccaaaaatgaaaaatatgatgattttactcctttgctttcactggcttattaattccatgataaatctgaactacttaacgtggcttacaaaggttgtgtcaaatacttctaggtgttcagcaagatccatgttctcctcttattcctgggtgcacagctgagctactttttctagcctttcttgaaccacatttggccaaatgactgagttctagccaatggatgccatttccagaccagtgcgttttaaaaaacatctgtccctctttcacactctctatttccccttcagctgtgaggatgaagccctaggggatggcaaaatcacaagaaggaattatggcctggagaaaagccattg

SEQ ID NO: 40820 - DNA, 271 bp, Homo sapiens
ctgtctccgccctgcaaagtgttaggattacaggtgtgagccactgcgcccggtcagccactgtcattatttaccagcgttgctctgcctagtgacgtaggagtcacaggttctattttgggtgtgggactgaacagcagggaaacaaagcctaggtgtgtgaaaggaggaaggaggaagctgaaggttctggaatcttgagttctcctttagtctgtctctcaggtcttttctgcccatcctccaggtcactagtattcaaactctcctg

SEQ ID NO: 40821 - DNA, 368 bp, Homo sapiens
atgaaggttgctttctgcttccagggtgacaccttgttgctgtgtcctcacataggtagaagggcaaaaaggggcagatgctgtgtgatgcctcttttactcttttacaaggcattaatcccactcctcaaagcaaagccctcaattctggaaggccttatcttctaatactgttgcattgagaattaagtttcaacatgaattttggaggggacataaacattcaaaccatagtgtacattaattataggtagtaatttcaatgagaatagttaaattaatctttttaaaaaacagatgtagattgttatttaaactagaaactgagattttagcatattaattatgcctgtgatttaaagaagatt

SEQ ID NO: 40822 - DNA, 298 bp, Homo sapiens
tcagtctctggtactacaagatgttcaaggttcatcttctactttcttcaccctatcctagaatcagccatctatgtaaggaactcttggttcctttgattggagagtggtatttataaaccaagatctgagcactggtgtcattttccctcctcctgaagcacttcctttagcatgtcttgcagtacagttctgctggtgatcaattctatcagctgttgtatatctagtggttcttaccttttcttctcacagttttcttacatgcatgagctgatcaatattgtgttgaagacta

SEQ ID NO: 40823 - DNA, 307 bp, Homo sapiens
aagttcattttgtctgatactagtagagccatcctggctctcttttgattactattttcatggaatatatttttctattctttcactttcaacctatttgtgtctttgaatctaaagtaagtttcttgtaggcagcatataattggatcatgtatttttatgcattctactaatccatatatttttactatagagtttaatcaatttacatttaaagtaattacagataggaacagatttacttctatctttttgctacttacttcctatatgcctcataactgtttttgtccctcattttctgcat

SEQ ID NO: 40824 - DNA, 894 bp, Homo sapiens
  misc_feature (3)..(4): n is a, c, g, or t
gtnnaggttcagttgtttatagggctagctttgcttactgtgctcagtttctgctgtagtaaaataatgtaggctggctggaggtggtctctgttcagggttattatgaactggccttgttcttccagtgtgcaggccctggctaatcagagaagtgtacctgtcccatagctaggctctggaaagaccttcaagcatggcatgtgaactgggccctggctcctccccaccaggtccatttggagtcagtggtttctaaatggtggcagtgagtgctttgctctggccctcagccttcttagctttctttaccactgtagagccaggtagctaaaataatctgccctgtttttcttccttatgaggacattttctggaatttttatcccaccttatccattcttctgaaaaacttgtcttcagacctcatttttctaactcccagataaccagaacctacatgcagaggtctaggagatctctaccctgcaagcagaggttcagaaaaggagcagagtgagcaaatgcagataccattgttctgttcccctgtctaacaccccctgtaactcccagttgccaaattcagactcctttctttggtctgtaaagcccagcctgatgggttcctgcgccctctccagcttcttcctgtgcctcacacactgaatgcctcgagtactcacatttccagggacttgataacctctggacttttgacggtgcagtttccttgccaatgctccgcaagaatttcttcccaatttaatcagtgtaattaaccaaaaaaacctcgatgaaggtagagcactaagaaggaagtaggtaactgttaaaagattttatgtctggaaaaaatgcccccttttttttgtatttgcaatattccattac

SEQ ID NO: 40825 - DNA, 678 bp, Homo sapiens
ttcctatgctaaggtacaggaatatggcacaggggccagtgagtcttggaggagccatctctcccgcaaaatgatcttttggatgctaaaaaaaagaaattctcctgggggtcacatggaattaaaagcatctacccagaaagcagactcaaaagcaatctttaagcacaaaatgaaagggctctatacttaccatgtcttgttactaaataatcattccagaactttcttgaattgcatccctttttgggggaagatcatattctagatttagattccataatgcagagtgtagaaatagaaaagggcagttttattttattttattttttctaacagctacactggtggggattctttgccatttatccttccaataggagtaaggagaacacagggagttcttcagtggggctgcccagaaggaaggttttctgagtgaagagccagtgccctcacacgtggagtcgtgtgatggatgactctgagctgagccacaggaaagcaagcagatccccttagccttctgttctctccacaagcaagcagaagcaagggaggcacaggtatccatcaggaagggaaggcatgatcctttacctggtgagttgcagatgctcactcttgaccataagaggaagaagacaaagacagaaaagccagacaccagggattact

SEQ ID NO: 40826 - DNA, 409 bp, Homo sapiens
cctaagccactgtccctggcccacatttctctttataataaaactcccaagcttccctttttcagacataccaaagcccacctcagtctgtgtgtatgccccaaattgctattctgtgattcccaaataaaacatttaatttagagatttgtttctatgttttcttttgattgcaacaggagcgtatggggaaaggcaggataggacagcctgcagaggccatcccaggccccaaagccaccccatttctctgcattacagttggtgtcagcagagcccaagccagggattaggggacactatggctcagaggttcaagctaagcatgggttaaacagtcttgtgaactatcctcagaccctcaccaccatcttcaattttacatctatgaaaaaactttaaaaaaaaa

SEQ ID NO: 40827 - DNA, 408 bp, Homo sapiens
ttttttttttgaaaacggagtttttgctcttcttgcccaagcttgagtgcaatggtgcgatctcgactaacttcaacctccccctcctgagttcaagcgattctcctgcctcagcctcccaagtagctgggattacaggcatgcgccactatgcctggctaatttgttgtatttttagtaggaatggggtttcaccatgttagccaggctggtctcgaactcctgacctcaggtcatccacctgccttggcctccccaagtgctgggattacaggcatgagccaccacacccaactaaaaaaatcttagaagaaaacctaggagaaaaacattggcctaaacattctggacattagcctaggcaaagaatttatgatgaagacctgaaagcaaatggaacaaaatttt

SEQ ID NO: 40828 - DNA, 502 bp, Homo sapiens
gccacttggatttattttcttagtctttggacatgtgtttaaaggaaaagaatacctgtaacttcctatatgacatccagtgccctgaaagggtgcttacaccttcaaaaaaggagagtccagcctatcaaaggcagtaacacataatgagaagaaactcagagttattgcctttcatactgctttccctctgctgttggcccacccttcttgactgcaaagccagaaaataaactagatggtggttttggacaattgtacacaggaacagaatctctaataacctataatttttagtacttaattatgtgatgttttattctaggaaataagaaacagatgacatcattgatgtatctttctttcatcttcagaatttttgcatcttttcagaaaatgacaaattactatttttctgttgcactcagcaattgtgactatacttaacaaaattcttgtagtctgtagagatatcaataaaattgtatatgtttgtacatag

SEQ ID NO: 40829 - DNA, 591 bp, Homo sapiens
tacttgtgtcactgcacacttgagccttatttcataggatgtattttgctaataagtgtaaaatgactctgttattaatttttttgattcctaataatgtgagcatttgtccttgaatatgagtatatgaggaagagccaagtgggtagtgaagagaagtggatgggaatctggcttcagtctttcgactaatccttgcatctctatttcaggcaccatcatgactccaagcggaggagatccgatgaatttaggcctcaaaattaccaccagcaggatttccgacgaatgtctgatcaccgccccgctatgggctaccatggccagggaccctcagaccattaccgctctttccacacagataaactgggggaatataaacagcctctacccccattgcaccctgcagtctcagatcctcgctcacccccttctcagaaatctcctcacgattccaagtcacccctggatcataggtctcctttggagagatcactagaacagaaaaacaacccagattataactggaatgttcggaaaacataaaggacagctcgtaaaggagagagtaagagtcaccaaacacgtgga

SEQ ID NO: 40830 - DNA, 424 bp, Homo sapiens
tgatcctacagtagccggttatctagaccagtaagtggagttttggacatgctgctgctgtcaactcactggctgaaggagcacttcaaggaatgggaggcctttcactgggtccagctctgattcgggtcaccagtgaaaagttgtgcagagcccaacatgagcttcatttccaagctgccacctatctctgcctcctgcgtagcatccggaaacatgtggccctacatcaggaatttcatggcaagggtgagcgctcggtggaggagtctgctggcttggtgggtctcaagttgccccatcagcctggagggaagggctgggagccatgaacatggagaatatccttggatgctgcattcataggagaattgaataatttctatcaatatgtatttatcattaaattttttttaagtttaaa

SEQ ID NO: 40831 - DNA, 475 bp, Homo sapiens
cctcagaccattaccgctctttccacacagataaactgggggaatataaacagcctctacccccattgcaccctgcagtctcagatcctcgctcacccccttctcagaaatctcctcacgattccaagtcacccctggatcataggtctcctttggagagatcactagaacagaaaaacaacccagattataactggaatgttcggaaaacataaaggacagctcgtaaaggagagagtaagagtcaccaaacacgtggatatttttggtctgatcctacagtagccggttatctagaccagtaagtggagttttggacatgctgctgctgtcaactcactggctgaaggagcacttcaaggaatgggaggcctttcactgggtccagctctgattcgggtcaccactcctgcactttggcaccccatcccattccagcctagttctggcctcccactttgacgggcacttggag

SEQ ID NO: 40832 - DNA, 361 bp, Homo sapiens
gctcgactctatgtgttttgggagatgaggggtggcgagtgagagaaagatacttagatactatatgagataagaccaaggtgggttgggctgggggatccaggagaaagcagctccccagctgccccctatccacctactggggcacagccctgcagaataaacctggcagcctgaagttgagctttcttgagtcattctgtaccatctttcaagaggttttgccaagaaaaatttggaacttggaaaaattttggtacaaccaacgtgtgccacccatcagctgacagaggtaagttggtcccagccccaggagtagggcaatgcctatttattctactgaatggtttgtttgagtgaa

SEQ ID NO: 40833 - DNA, 687 bp, Homo sapiens
ttaaagttgtatttcttgttgtggaaccaaaagtatcttctggaggagacaggagattattaaagggtgtacttaggtgacctgagggcaaacctggtcagtcattttatcgagaaataggtgggatgcttgaacagcctcaagtaaagctgagtcttactccctattcttctgacactggccttcttatagagttgttaatattgtcctccacccctggggatgggactgcctgcccactttgtagaccagcagatcctaacttttccaatgagaacttaggaaacaaataaaattgtacgcccctgcatcagaatttttctgttttattctctgattaagaaagtacacatgataaaaagctacctgaattcatccaatagcagctttaagtgactatctaaaacttgatattcagggctgagcatggtggctcacacctgtaatcccagcactttggcaggctgaggcggtcggatcacaaggtcaggagtttgagaccggtctagccaatatggtgaaaccccagctctactaaaaatacaaaaattagctgggcatggcggcgcacacctgtagtcccagctgctccagaggctgaggcaggagaatcgcttgaacccacgagggggaggttgcagtgagctgagatcatgccactgcactccaacctgggtgacagatctc

SEQ ID NO: 40834 - DNA, 342 bp, Homo sapiens
gctcaataaactaatgatcattgctgtttctgctgtggagccagtgctcaaggacaaagctaactcctggccaccacaccgagctgtgccccacactccatgccccactgccacaccaggagccacctggagcctccaagggaaggttcttgaaatggcgggcagagggacccccactcctgccccggcaatgaaccctactctcagagacatgagtggctatgttcagctgcctctggggggacctaagctgttctcatccaggttctctcttttctagaaacctcctgggtgcctgtgaggtcccctcagaccagggagtggagcatgtaccatttctgc

SEQ ID NO: 40835 - DNA, 322 bp, Homo sapiens
aaaaaaatccaaccaaaaatttcatacctttccaatctaaacttcatgagtgaaggagaaataaaatattttccagacaagcaatcactaaaggaattcattaccagtagactaggcttacaagagatcctcaagagagcaataaatatggaaacaaaacaacaatcccttaccccaaaccacatttaaatatatagtccgcagaccctatcaagtaactacgtaatagaaactacaaagcaaccagctaacaacttcacgatagtatcaaaacttcacctatcaatataaaccttaagtgttaatcgtctaaacgcaccac

SEQ ID NO: 40836 - DNA, 360 bp, Homo sapiens
tttgaacgcacacacacacacacacaaatacacatgcacacacacgtgcgcatacacacaccaagatggctatacccctcactgccagtttctttcacagagctgtggtgaaaagctcggacagagatggaggcaaacagctctcagccatgcggggcttggggttggtgcttttctctccatccctgggaaaacagcacaggatcttccctgcaggaggccgggggtctcctgcaaccgacaggcaaccgatcagcacatcaaagtaaaagctgccctgggctctactccaggaagctcagaaactcaagcgccctcagaattaagtgatgaagaggagcgacccaagctgcctgggtc

SEQ ID NO: 40837 - DNA, 1140 bp, Homo sapiens
gattgaggaaaagcacaatgaggatttattctcactaaaccagattgaaaaaatgaaacccaaggaagaaaccattatttgtacttatgcccctggttccaggtttacatccatgagtatttagcaccaatctttccatctttaaactgtagttggctgggattcctgatacttcagtcagaagaagcagaattagtatgactatttacctagaaaaagcatcgagtgggtctcaaactttaaatacgtcaaaataaacctggtttgcaggcctcaactcattaccctgggcacttttaccacagtggagcatctggctctcaactttacaggtacagaaaccaagctttgtgaacacttagaaaacaggatcactccagattgaaattcatactactctagctcatgaagctgatgaaagaaatatactttatttatttatttatttttaaattattactattttttgagatggagtcttgctggagtgtagtggtgcgatctcagctcactgcaatgtccacctcccgggttcaagcaattcccctgcctcagcctcttgagtagctgggattacaggcatgtgctaccatgcctggctaattttttgtattttagtagagacggggtttcaccatgttggccaggatggtcttgatctcctgacctcgtgattcacccacctcagcctcccaaagtgctgggattacaggcgtgagccactgcacccggcctatacttgatttataagtacatcacaagtaatgcaacaacctacacacttgcaactacaaactttcagattatttccgtggctgactaacctccacattatcagagccacattcttttatggaaatatttaggtttgtgcaaaagtaattgcggtctttgccattaaagtaaaggcaaaaaccacaattacttttgcaccaatctttatatttatataattcactagcttgcagtaaaatcccacaagctgattaccaattttctctctttcaggagtcctctctaacctctaccctgatctttgtttgtggatgttgctcttgagctcctgagtacactcttacttcccccatttctaggatcttgggcaatggggaagaccttgattgtaactaacatatatga

SEQ ID NO: 40838 - DNA, 752 bp, Homo sapiens
aaggaagctcttctgttgtctcgttgagagtaagaggctgggtggactcgggcaagactctgaacacatctttgtcaattttaatatggagagtatgatagtgagtgacctccaagggtgagtatgaacattcaatgtgttaatacacacaaaacccttgaaagaatgccagacacataataagtgttgtaaggtgttgactactatgattaccagagatgtctgtggatttgagaaaaggaagggaagtaggaataggagaggcaacaaaattgaggactgaagagaagggtcagattctgagagggcctttaagccaacatggagccagaagcttgtttggggaaagtaggcagaaattaaggaacatactccaccccaccccggggcacccaaacctggtgcagccctgatgtttagtttccatgtatccctggcctcctgtgctcccctgctggttggagacttaatagctgctcagacattttttgctgttcactccttggtgattggaggtgaaaagaatgcaaaagggtgtaaatcaaacaggaagcccctttttagtctcctgctggatcccagtcaaatgaggagggcatcatcaatggtagactgaataaagaaaatgcagtccatatacatcatggaatattatgcagccataaaaaagagtgtgaccatgtcctttgcaggaacatggatggagctgaaagccattatccttagcgaactaacacagaaacagaaaccca

SEQ ID NO: 40839 - DNA, 940 bp, Homo sapiens
agcgttcagaggtcaccgttatgtcggaccaccgcaagagatcctgttgtgagagagaagaaaaaacatctaaaaactttgaagaattggtcagtgactctgagctgcatcaagatcagcctgatattcttggaaggagtccagctagtgaggcagcatgttcaaaagtacccgatacgaatgtctccttagaagatgtgagtgaagttgctcctgaaaagcctattactactgagaaccccaaacttccttcaacagtgtctccaaatgtttttaatgagacagaattctcattaaatgtgacaacatctgcctatttggagtcattacatgggaaaaatgttaaacatatagatgattcctccccagaggacctgatagcagcctttacagaaaccagagataaaggaatagtagatagtgaaagaaatgcttttaaagcaatatcagagaagatgacagactttaaaacaactcctcctgtagaagtcttacatgaaaatgagtccggtggttctgaaattaaagacattggaagcaaatacagtgaacaaagcaaagaaacaaatggaagtgagcctctaggtgttttccctacccaaggtactccagtagcatctcttgacttagaacaagaacagctcacaattaaggctcttaaagaattaggtgaaagacaggttgagaagtcaacttctgcacagcgtgacgcagaattgccttctgaagaagtactgaagcaaactttcacatttgctccagaatcttgggccacagagatcatatgacatcctaggaacgtaatgttcaaggaatggatctgatcttggggatttcccaggaagcccatcactattcagagaaactactagggtagatgctgtttccagccttagcaagactgaattggtaaaaaagcatgtcctagcaagacttctga

SEQ ID NO: 40840 - DNA, 742 bp, Homo sapiens
aaagatctcaaaacactgaagcagaccgtaccaaattgactttattgttttaaaaccagccccttctgtctgccaccacccgccaccccttcccgaaggaaggaaaaaaatcataatagatgtctctccagcgtgcacctctgttctcctctctctaatggcagcttgggaccctgaggcagtgacgcttagtaatgtatcctaatagtcagtgtttgtctgacaaataccctagtgaccacaagcctaatcagggccgccatgaattaatggtcagtgtagtgatgggtgctgaatgatcataaaaatagcttgggaccctgaggcagtgacgcttagtaatgtatcctaatagtcagtgtttgtctgacaaatacctagtgaccacaagcctaatcagggccgccatgaattaatggtcagtgtagtgatgggtgctgaatgatcataaaaatagctaatactgggccgggcttggtggctgatacctgtaactttgggaaacggaggcaggaggactccttgagactagaagttcgagaccagcctgagcaacatggcaaaaccccgtctctgaaaaaaaaaaagaaaaagggggccatgtgtggtggcgtgcacctgtggtcttagctacttgggaggctgaggtgggagaatcacttgagcctgggcagtcgaggctgcagtgagctgtgattgtgccactgcactccagcctgggtgacagagtaagaccctattt

SEQ ID NO: 40841 - DNA, 595 bp, Homo sapiens
aaagatctcaaaacactgaagcagaccgtaccaaattgactttattgttttaaaaccagccccttctgtctgccaccacccgccaccccttcccgaaggaaggaaaaaaatcataatagatgtctctccagcgtgcacctctgttctcctctctctaatggcagcttgggaccctgaggcagtgacgcttagtaatgtatcctaatagtcagtgtttgtctgacaaatacctagtgaccacaagcctaatcagggccgccatgaattaatggtcagtgtagtgatgggtgctgaatgatcataaaaatagctaatactgggccgggcttggtggctgatacctgtaactttgggaaacggaggcaggaggactccttgagactagaagttcgagaccagcctgagcaacatggcaaaaccccgtctctgaaaaaaaaaaagaaaaagggggccatgtgtggtggcgtgcacctgtggtcttagctacttgggaggctgaggtgggagaatcacttgagcctgggcagtcgaggctgcagtgagctgtgattgtgccactgcactccagcctgggtgacagagtaagaccctattt

SEQ ID NO: 40842 - DNA, 420 bp, Homo sapiens
aaatgtgtgatgtcacttccaggagatgattcccatggtaaccatctcagtggaattggggggtggccaggaaatgggggctgagggcggatacagaagggacaaatgtgaagagcggaaggaaagggggagggggagaaatgcaggaaaaaaccaggaagaggaaggggaccttcccagagcagttgaaaataatatacagaatctcagaaatggaaaggtccccagagaccactaaatgcaacaacctcatttttacagaggctgctgagaggccaggacttgctcaaggtcacaccgccagttgacaggttagagccaagcccaaggctgcatgactgtcaggtttgggtggggtaataaaggattcctttcagccatttctctttgttttgttttgtttttttccccgagacagag

SEQ ID NO: 40843 - DNA, 581 bp, Homo sapiens
gcctctactaaaaatacaaaaaattagccaggcatggaggcacatgcctataatcccagctactcgggaggctgaggtaggagaatcgcttgaacccgggagctggaggttgcagtgagccaagatcgcaccattgcactccagcctgggcaacaagagcgaaactccatctcaaaaaaaaaaaaaagagattataaaagggatgatgaacatggagctgcatctttttaaacgttgttttttgatgcttcagactcttaatgcttttatataaagctatcaactgtatgttgatcacggtttataagaaagaacaaataaaccaagattggcaatccttgccgatcttttagaaataccttttctggagaaaaaaaaatccacatgaagtgcaataagcttataaagctaagtagttattaatatttctattaacatgatacaaaggatgatgattgtaagtgtttactgactggcagcttttatttcagtattagcacagcgtcttgccagtgttggaggccatgtattatttcagttcaactggatgaaatgttaaataaactcagaatgaaaataaa

SEQ ID NO: 40844 - DNA, 334 bp, Homo sapiens
tctgcccttgtttctctgtatacatgaggttgggtgactgtcctagatatttacatgcctatttcaggcagctcttaactagcatccctgaagttcaatcccaaactctcaagagaggaagaagctgatcggctcatgtgctcagctttgagcacatgtccctccttggtccagtcagcactggccaggggcaagatcccagcacaaatatgggtgccatggatagcgttgtggataggggtctgataatacttgtcaaggaagaaaattgtgggctggagttctctaaaattgaccactacctaaaattgaccactaccctatgatatcttag

SEQ ID NO: 40845 - DNA, 1178 bp, Homo sapiens
tcacaaatctctgggatcataaggaacctaatggaaccttcctcaacagctgagcctcagtttccctttctggaaaacctccccctatacttccatacctcatcgttccagagatgatttacaataatggcaagtaagagaaactctgtagagttaaaggactgcagaaatacatgggcatttatgagatgacatgcactcgtttgttgcagaccacctacgatgcttgctggtcacctacaagagtaatcccagctagcgctgaccccatgtgagaatcttcagataacttacttagtcctcaccacaaccctgtcacataactgggatcatccccattttacacatcagagaaattaggggaaagcctggaggactcactaatacattgcagcttcggggcggagctgtgagtcccttgccgcatgtattggactccaagggggccactcagagcctgttgctgagacacttctgttctcgcgggtgtacagcaagtactcagtgactgtgtggtggggggagctggggcccgggcattaatagatgatccacagagctgtcattctaagtctcagtgcagagccataggggttcccagcagagaatggtcactgaggtcagggtgcctccaccacaggaggggccttgacagatgtagaccacttctgactgggacccactaacttctcactgggagcagagttaatcaagtcacagagatgggtaagaaggcaaggggccacttctcatgtggtgagcggtacaggtgagcagagcacagggctccagcagccggatagggaagggggccccagcccaccctacagctctactccctccatcctgctgcagaccccccattcacacagtgagtcagtaacaggaaggagcccttggactgcggcaatgccattagcgaccccatgggggaaaggggaagtggggagggaaaggaagaggcgaggcatcctagctccctcaggccggaaggctgcaacagctgcagccagcctcccactctgccctcaccccgtcccggccccaccactccactcactcagaggtcggtggccaggagcctggccaatcagaagcaccaagggcatcttgagacctctccccagatctactgaataagaatgtctaagatttctagccattacaactacaaaaaa

SEQ ID NO: 40846 - DNA, 447 bp, Homo sapiens
attcggcacagcaagatagtaagtcaaggagcatctgtactccatttattgacaccccatttaaaaaaattgttaaaaactatcaaactatgaacatgaagtgaaggatgcatgtttcgatgtagtctgaaattagctttcaacatgaatgaagtgttaggttttagcttcgtgggcaactttgtctgattttcttccattgacataaaaatagtctcaggcttgtgtgggaaaattaagtatatagatactattgcatttatcaagggagatataacttgtggattcattctataatgttttacaggagaattttttttatctcagaaataaggaattttacatctctacaagtaaatcagaaatataattagatacataaattcataaacatacaaaataggtaaaatgattatatggatttctaaaagtacctttaaattggct

SEQ ID NO: 40847 - DNA, 637 bp, Homo sapiens
gcaatggcgcaatcttggctcactgcaacctccgcctcttaggttcaagcaattctcctgcctcagcctcccaagtagctggaattacaggcatgcactaccatgcctagctaatttttatatttttagtagagacagggtttcaccatgttggccaggctggtctggaacccccgacctcaggtgatccacctgcctcggcttcccaaagtgctgggattacaggcatgagccaccatgcccaactggattctggtatatatttcaaaggcagagctgacagggatttctgtcagactaacgtgaagcatgaaggaaagggagtagtttagatctttggtctgaagagcctgaaaaattttccatttactgacataggaaatctgagggaagaaaatgtttggagaggtgagggaatcagtttagtttggggaaggttaaatttaagaagacttttagttatccagttagatagttgaataggcagctagtacatgaacctggcattaggggtttggggctggcatacttaaacatgtggctagatgtgatcaccttcagagtaaatgtaaatagtatcatccctccttatctgtatctgcagatttgatcgactgtggatcaaaaatatttggga

SEQ ID NO: 40848 - DNA, 441 bp, Homo sapiens
gcaggggaaggtagtatactgccttgctactgccagatgggggcagtagtccagattccccactcagacccatcattcctgctgggcaggggtgggtgtcccagctctccactagtcctcaactgatacgtgcctggtggggattggtgagtgcctgttactgttctgttgatgccatgggagatggaggggtcctctgacaccattccagcaggggatgggggaatgtctcattaccactaggttggggtggacgtcatggttccccatgtggtatctccacaaacagcacaggaggtggtgggggacacttgttaccacccatgggaatgaaagtctcggcttggtattcgaccttctctgacgccaccctggcaagggggtggggcacctcatgacagcttggagagggtggagtctagactctctatttggcctttg

SEQ ID NO: 40849 - DNA, 759 bp, Homo sapiens
caatgaatatcccacaaatgaaattaagaaaaaaactcccatttataatgtcatcaaattaatgaaatacttaggaatatatttaacaaaagaagtgcaagacttgtacactgagaactatgaaacattgctgaaagaaattaaagaagatttaaagaaagacatccccctgttcatagatcagaagatttaatattgttaggtagcagtactctccaaattgatctacatattcagcagattcactaccaaaatgccaactgccttttttgcagaaattgacatcctaatcctaaaattaggtaaaaggcacctaatagccaaaacaatcttgaaaaagaacaaggttgggagacccatactcccaatttcaaggcctactacaaatctacaaatcttcggtaatcaagacaatgtagtactggcataaggatacacatatagatcaatggaatagaatcaatagtgcaaaaacaaatgtttacttttatggtcagttgattgtcaacaagggtagcaagatcattcaatggggaaagagtagtcttttcaaacaaactgtgcttggacaactggacatccacacataaaagaatgcaactggacccctacctcacaccatacacaaaaattaactcaaaatggatcatcctcaatgtaagaactaaggtataatattcaaaggcaaaaaacaggagtaagtcttcatcatcttgagttagacaatggtgtttcggatacatgccaagagcacaagtg

SEQ ID NO: 40850 - DNA, 367 bp, Homo sapiens
cagctgtactgatgccacagggcattggcatggatggccctgggtttctagagtccatggcttgttttgatccaagggcatataccacctcacctctgctaagaaccctaaagactcctttcccatgtctctggccaagaatgagggaggtagggactgcccccctcaccaaggaggtatctgaaccttggtgaggtagcttggacacttggaggtagctcagagtgtcctctagaaagccaggaggaggccaggcatggtgtctcatgcctgtaatcccagtactttgggaggctgaggcgggcggatcacctgaggttgggagtttgaggccagcctgaccaacatggagaaacccagtctctac

SEQ ID NO: 40851 - DNA, 249 bp, Homo sapiens
tcacagacctactccttggccatatgactaataaaagtctgaaagaaagactttattagaaccttcgaaggccatttgttttcacagcagaaaaacatggtgtttgaatttactctcctaccagtactgtccccagtggcacagggtgaattttctaaaatgaaatctagttgctgtcagaaagggaaaagtaaaaaaacaaaaaactaaaagcacacatatgcacaatcttgtgttagaactggacac

SEQ ID NO: 40852 - DNA, 2347 bp, Homo sapiens
tgtatcggttcattaaacataaatattgagtgtccactctatgctaacaactttgatgggtaccagaactattaaaatgagattacaggtatgagccaccacgcccggcctgtgctttggttctttacatgaaactccctttctaccttgtgttgcctggcaaaatcttacttacccagaactctgctccggcatcctccgcaggaagaacactttcattgaaccctagcattgtccctaatacccttaatatgtattgtcatagcaccctatgaatttttctatatcactttccatcttatatttaaataatctttttacttgcccatctctcccactgataatctaagctggcagaggctggatcagatcataattatctttctattcttagcgctaggatcaatgcctggcatagcatatttacattttttatttaaataaactgacctgactttcttctggttggatatgttctgagtccctattactaaccttggtcttttatctcagaagttgaaggctcccctggagccagctgcaaagttcccaaagccctaacaaccccacagccaatcagctacagagtaggctgccctgagtcggactccccaacacaaagtccagggttggagcaggagcacggagagggacaatggaagctgccccgtccaggttcatgttcctcttatttctcctcacgtgtgagctggctgcagaagttgctgcagaagttgagaaatcctcagatggtcctggtgctgcccaggaacccacgtggctcacagatgtcccagctgccatggaattcattgctgccactgaggtggctgtcataggcttcttccaggatttagaaataccagcagtgcccatactccatagcatggtgcaaaaattcccaggcgtgtcatttgggatcagcactgattctgaggttctgacacactacaacatcactgggaacaccatctgcctctttcgcctggtagacaatgaacaactgaatttagaggacgaagacattgaaagcattgatgccaccaaattgagccgtttcattgagatcaacagcctccacatggtgacagagtacaaccctgtgactgtgattgggttattcaacagcgtaattcagattcatctcctcctgataatgaacaaggcctccccagagtatgaagagaacatgcacagataccagaaggcagccaagctcttccaggggaagctgcaataatttattttaactcaagatttcaatttcatggtgcagaccataaattcaatcagtgtgagctgcaacaattacaaggtatctctttatccctggacgtcacctcagatagaactttttctttcaaacttccccaactgcagattctctttattctggtggacagtggtatgaaagaaaatgggaaggtgatatcatttttcaaactaaaggagtctcaactgccagctttggcaatttaccagactctagatgacgagtgggatacactgcccacagcagaagtttccgtagagcatgtgcaaaacttttgtgatggattcctaagtggaaaattgttgaaagaaaatcgtgaatcagaaggaaagactccaaaggtggaactctgacttctccttggaactacatatggccaagtatctactttatgcaaagtaaaaaggcacaactcaaatctcagagacactaaacaacaggatcactaggcctgccaaccacacacacacgcacgtgcacacacgcacgcacgcgtgcacacacacacgcgcacacacacacacacacacacagagcttcatttcctgtcttaaaatctcgttttctcttcttccttcttttaaatttcatatcctcactccctatccaatttccttcttatcgtgcattcatactctgtaagcccatctgtaacacacctagatcaaggctttaagagactcactgtgatgcctctatgaaagagaggcattcctagagaaagattgttccaatttgtcatttaatatcaagtttgtatactgcacatgacttacacacaacatagttcctgctcttttaaggttacctaagggttgaaactctaccttctttcataagcacatgtccgtctctgactcaggatcaaaaaccaaaggatggttttaaacacctttgtgaaattgtctttttgccagaagttaaaggctgtctccaagtccctgaactcagcagaaatagaccatgtgaaaactccatgcttggttagcatctccaactccctatgtaaatcaacaacctgcataataaataaaaggcaatcatgttataggagaaggctggcatctctttgca

SEQ ID NO: 40853 - DNA, 1760 bp, Homo sapiens
tgtatcggttcattaaacataaatattgagtgtccactctatgctaacaactttgatgggtaccagaactattaaaatgagattacaggtatgagccaccacgcccggcctgtgctttggttctttacatgaaactccctttctaccttgtgttgcctggcaaaatcttacttacccagaactctgctccggcatcctccgcaggaagaacactttcattgaaccctagcattgtccctaatacccttaatatgtattgtcatagcaccctatgaatttttctatatcactttccatcttatatttaaataatctttttacttgcccatctctcccactgataatctaagctggcagaggctggatcagatcataattatctttctattcttagcgctaggatcaatgcctggcatagcatatttacattttttatttaaataaactgacctgactttcttctggttggatatgttctgagtccctattactaaccttggtcttttatctcagaagttgaaggctcccctggagccagctgcaaagttcccaaagccctaacaaccccacagccaatcagctacagagtaggctgccctgagtcggactccccaacacaaagtccagggttggagcaggagcacggagagggacaatggaagctgccccgtccaggttcatgttcctcttatttctcctcacgtgtgagctggctgcagaagttgctgcagaagttgagaaatcctcagatggtcctggtgctgcccaggaacccacgtggctcacagatgtcccagctgccatggaattcattgctgccactgaggtggctgtcataggcttcttccaggatttagaaataccagcagtgcccatactccatagcatggtgcaaaaattcccaggcgtgtcatttgggatcagcactgattctgaggttctgacacactacaacatcactgggaacaccatctgcctctttcgcctggtagacaatgaacaactgaatttagaggacgaagacattgaaagcattgatgccaccaaattgagccgtttcattgagatcaacagcctccacatggtgacagagtacaaccctgtgactgtgattgggttattcaacagcgtaattcagattcatctcctcctgataatgaacaaggcctccccagagtatgaagagaacatgcacagataccagaaggcagccaagctcttccaggggaagattctctttattctggtggacagtggtatgaaagaaaatgggaaggtgatatcatttttcaaactaaaggagtctcaactgccagctttggcaatttaccagactctagatgacgagtgggatacactgcccacagcagaagtttccgtagagcatgtgcaaaacttttgtgatggattcctaagtggaaaattgttgtaatatcaagtttgtatactgcacatgacttacacacaacatagttcctgctcttttaaggttacctaagggttgaaactctaccttctttcataagcacatgtccgtctctgactcaggatcaaaaaccaaaggatggttttaaacacctttgtgaaattgtctttttgccagaagttaaaggctgtctccaagtccctgaactcagcagaaatagaccatgtgaaaactccatgcttggttagcatctccaactccctatgtaaatcaacaacctgcataataaataaaaggcaatcatgttataggagaaggctggcatctctttgca

SEQ ID NO: 40854 - DNA, 279 bp, Homo sapiens
gtcttttaagacttcaccttggaagtcacactccatcatttctgcaacattgtcttggttactcagttctgccccattcagggtgggaaggaaggatctacacagttgcatgaaaacgagatggtaagacttaactgagagccatcttggaagctagttccatttgtgttaccagtggccagctctcatttaagtttcaatctacctattcactccttcccaggtactaatgcattctttctcgctttcactctactgtaacacatttcgacttgccag

SEQ ID NO: 40855 - DNA, 2198 bp, Homo sapiens
tgtatcggttcattaaacataaatattgagtgtccactctatgctaacaactttgatgggtaccagaactattaaaatgagattacaggtatgagccaccacgcccggcctgtgctttggttctttacatgaaactccctttctaccttgtgttgcctggcaaaatcttacttacccagaactctgctccggcatcctccgcaggaagaacactttcattgaaccctagcattgtccctaatacccttaatatgtattgtcatagcaccctatgaatttttctatatcactttccatcttatatttaaataatctttttacttgcccatctctcccactgataatctaagctggcagaggctggatcagatcataattatctttctattcttagcgctaggatcaatgcctggcatagcatatttacattttttatttaaataaactgacctgactttcttctggttggatatgttctgagtccctattactaaccttggtcttttatctcagaagttgaaggctcccctggagccagctgcaaagttcccaaagccctaacaaccccacagccaatcagctacagagtaggctgccctgagtcggactccccaacacaaagtccagggttggagcaggagcacggagagggacaatggaagctgccccgtccaggttcatgttcctcttatttctcctcacgtgtgagctggctgcagaagttgctgcagaagttgagaaatcctcagatggtcctggtgctgcccaggaacccacgtggctcacagatgtcccagctgccatggaattcattgctgccactgaggtggctgtcataggcttcttccaggatttagaaataccagcagtgcccatactccatagcatggtgcaaaaattcccaggcgtgtcatttgggatcagcactgattctgaggttctgacacactacaacatcactgggaacaccatctgcctctttcgcctggtagacaatgaacaactgaatttagaggacgaagacattgaaagcattgatgccaccaaattgagccgtttcattgagatcaacagcctccacatggtgacagagtacaaccctgtgactgtgattgggttattcaacagcgtaattcagattcatctcctcctgataatgaacaaggcctccccagagtatgaagagaacatgcacagataccagaaggcagccaagctcttccaggggaagattctctttattctggtggacagtggtatgaaagaaaatgggaaggtgatatcatttttcaaactaaaggagtctcaactgccagctttggcaatttaccagactctagatgacgagtgggatacactgcccacagcagaagtttccgtagagcatgtgcaaaacttttgtgatggattcctaagtggaaaattgttgaaagaaaatcgtgaatcagaaggaaagactccaaaggtggaactctgacttctccttggaactacatatggccaagtatctactttatgcaaagtaaaaaggcacaactcaaatctcagagacactaaacaacaggatcactaggcctgccaaccacacacacacgcacgtgcacacacgcacgcacgcgtgcacacacacacgcgcacacacacacacacacacacagagcttcatttcctgtcttaaaatctcgttttctcttcttccttcttttaaatttcatatcctcactccctatccaatttccttcttatcgtgcattcatactctgtaagcccatctgtaacacacctagatcaaggctttaagagactcactgtgatgcctctatgaaagagaggcattcctagagaaagattgttccaatttgtcatttaatatcaagtttgtatactgcacatgacttacacacaacatagttcctgctcttttaaggttacctaagggttgaaactctaccttctttcataagcacatgtccgtctctgactcaggatcaaaaaccaaaggatggttttaaacacctttgtgaaattgtctttttgccagaagttaaaggctgtctccaagtccctgaactcagcagaaatagaccatgtgaaaactccatgcttggttagcatctccaactccctatgtaaatcaacaacctgcataataaataaaaggcaatcatgttataggagaaggctggcatctctttgca

SEQ ID NO: 40856 - DNA, 1363 bp, Homo sapiens
accagacctaggaattcctagaaaaatagtcaggaagcatttagacacatcaaatgttaaacgagtcctgattatgatgataatgatgatgattttggtggttgcaatagcaaagccttaagtatgaaggagacttgccagctggaaatacaggtagacaatgaacaactgaatttagaggacgaagacattgaaagcattgatgccaccaaattgagccgtttcattgagatcaacagcctccacatggtgacagagtacaaccctgtgactgtgattgggttattcaacagcgtaattcagattcatctcctcctgataatgaacaaggcctccccagagtatgaagagaacatgcacagataccagaaggcagccaagctcttccaggggaagattctctttattctggtggacagtggtatgaaagaaaatgggaaggtgatatcatttttcaaactaaaggagtctcaactgccagctttggcaatttaccagactctagatgacgagtgggatacactgcccacagcagaagtttccgtagagcatgtgcaaaacttttgtgatggattcctaagtggaaaattgttgaaagaaaatcgtgaatcagaaggaaagactccaaaggtggaactctgacttctccttggaactacatatggccaagtatctactttatgcaaagtaaaaaggcacaactcaaatctcagagacactaaacaacaggatcactaggcctgccaaccacacacacacgcacgtgcacacacgcacgcacgcgtgcacacacacacgcgcacacacacacacacacacacagagcttcatttcctgtcttaaaatctcgttttctcttcttccttcttttaaatttcatatcctcactccctatccaatttccttcttatcgtgcattcatactctgtaagcccatctgtaacacacctagatcaaggctttaagagactcactgtgatgcctctatgaaagagaggcattcctagagaaagattgttccaatttgtcatttaatatcaagtttgtatactgcacatgacttacacacaacatagttcctgctcttttaaggttacctaagggttgaaactctaccttctttcataagcacatgtccgtctctgactcaggatcaaaaaccaaaggatggttttaaacacctttgtgaaattgtctttttgccagaagttaaaggctgtctccaagtccctgaactcagcagaaatagaccatgtgaaaactccatgcttggttagcatctccaactccctatgtaaatcaacaacctgcataataaataaaaggcaatcatgttataggagaaggctggcatctctttgca

SEQ ID NO: 40857 - DNA, 1455 bp, Homo sapiens
tgtatcggttcattaaacataaatattgagtgtccactctatgctaacaactttgatgggtaccagaactattaaaatgagattacaggtatgagccaccacgcccggcctgtgctttggttctttacatgaaactccctttctaccttgtgttgcctggcaaaatcttacttacccagaactctgctccggcatcctccgcaggaagaacactttcattgaaccctagcattgtccctaatacccttaatatgtattgtcatagcaccctatgaatttttctatatcactttccatcttatatttaaataatctttttacttgcccatctctcccactgataatctaagctggcagaggctggatcagatcataattatctttctattcttagcgctaggatcaatgcctggcatagcatatttacattttttatttaaataaactgacctgactttcttctggttggatatgttctgagtccctattactaaccttggtcttttatctcagaagttgaaggctcccctggagccagctgcaaagttcccaaagccctaacaaccccacagccaatcagctacagagtaggctgccctgagtcggactccccaacacaaagtccagggttggagcaggagcacggagagggacaatggaagctgccccgtccaggttcatgttcctcttatttctcctcacgtgtgagctggctgcagaagttgctgcagaagttgagaaatcctcagatggtcctggtgctgcccaggaacccacgtggctcacagatgtcccagctgccatggaattcattgctgccactgaggtggctgtcataggcttcttccaggatttagaaataccagcagtgcccatactccatagcatggtgcaaaaattcccaggcgtgtcatttgggatcagcactgattctgaggttctgacacactacaacatcactgggaacaccatctgcctctttcgcctggtaagttgggtgggtagcttgagctttctcccagattttcactgggttgtggactcataaacttgtgagactggaaaggactctatgtcttttacactaatgatggtaccaaattcagggacattgttgacaaggatgatgactcaattcaagcttcccaaacaggtactgtaatgaaatggaaagaggacaggactgaaagccagggaatggaatttgtggtactgctttgtcgctcaacagccacatgactttgggcagtcacttaacattttttatctccaattctttcctttataaaataaaagagttagactgtattatctctaaggtcactttgagctccaaaatttttatattaaatattttgaggagttcatttatgttcttcaaacatttattaaatacttcctgtatgccctatgcaagataccgataataaaaacatattaaatatattctccagt

SEQ ID NO: 40858 - DNA, 488 bp, Homo sapiens
acaggcccatggtcaaccagctaagaagtgaaggggcaggacttgaattcaggcctcctggccccagagtttgcagcacctggcatgtggcagtagttgagaagttacactgagtctgagtagacctgtagttagtgaccccctccacagcacagggctgatggacagtgggctggcttgggccaagagcagctggcactgcagatctgttggaatagctctgcccaggctgcccagggcaagttgcagactgggaggcatatgtatcctaaaatagaacttttgagaaataatgtgcatccaaaggaatgagtctcagacgaggatgttcaagaatcagtagcagatgctgtgcgggccacagaatgtttctaggtaaaatgccctcctccccaccccccatgtcccccacaaccaacaaacaagctaagaaaaaagaaacaaaataaaataaattgaaacaaattaataaacatgcaaaaaccaca

SEQ ID NO: 40859 - DNA, 555 bp, Homo sapiens
gaaacttatcaaattaaactttttggtggacttgacatcctaatttttcttataacccctcccccagtttactcattattaatattttatttacaaggtacataactttgtaagcagatttgttgaatatttgtttatctttatggatactgtgttacttttaatgaggtagaattaatagttgtactctcatttgtcctgtatacagtatggtacattgggtccttacatatcaatatgggtggtacttttatgcccattttattgtcatcttaaagagctacattgtaatgttatgcaatgcctcctggattttacttctgtctcaatctcttttctcctactaaactatacttctctcctgttttctgttatatcctctcttcaaatactcttatgttatcttccagttgttcagagcttcctgttactgcttcagtgagcctcttgcagtccctcatagattcctgcagtcttcctgtgttctagctggtatgtctttgtctttggaaattctctaaaatacaaatctcatttctctttaaatttcttaga

SEQ ID NO: 40860 - DNA, 529 bp, Homo sapiens
ttaatttggcaacaaatttttaatttgtatcaatctaatgtctgtctttcacatacttccaaacattacataaattattttacctagtgcatacaactttcaaaaactgtatttggcaattaacagacccctgacaattattaacaggggttttacatcccggagtttgagtgtctgcgggagaaccgtccctgcaggaggcactccccctccacctgcgacccgggctgggagaacgcgcggagggctcccttgagcggtctccgccagcgaggctttcctcccggtcggtgttgacagtgtggcatttctgttatctaatttctggttttgactgaaagcgaagtgagttttctcatcagtggagttgtaatatttctgcaaaaaaaaaaagatcacagccctccgatgagccgggcactatgcgaagtctccggctgcctgcgggccgctgtggacgccccggcgggggtcaggaccgacccccatctgcgcggcgaacgagcccggacgccctggccgcggccgc

SEQ ID NO: 40861 - DNA, 453 bp, Homo sapiens
gctcgactgctgatcaaaattgtgagaagttgtctggaagtaagcaactaaagctaagatgaactctgctgagacctacttgctacaaaacatttgcccttataaaaatcgagggctgcacaaaagaagagccttttttgtgtgtcactgcttctgcctttctgttttagaggctcttgttttaggatgccagcactggtagtctttgcaatcaaaggacgcacaaagaaggcttcttagtgtctagaccttgttgacaactgaagtcagctctacaggcttcctcgatttatttttacacatcacaagtaaatgcctttgctgtgcaagctgtcagtgtgcataagtgttcatttctgtgtgtgtttgtgtgtgtgtgagagggagagagacagagagagagtgagtttctagcttgcatcctaataaactatctgatgtagatgaggttgt

SEQ ID NO: 40862 - DNA, 532 bp, Homo sapiens
taatcttagcactttgggaggccgaggtgggaggatcatttgagtccaggagttcgagatcagcctgggcaaaaaaatgagaccctgtctctactaaaaatcaagttagccagatgtggtggtgtgcgcctgtggtcccagcaatacaggaggctgaggcaggaggactgcttgagcccaggaggtcaagactgcagtaagctgtgttcgtgccactgtactccaacctaggtgacagagcgagatcctgtctcaacgaatggggttaatcctgaaaagaaatacaatatataacttgatctctacacatatgtagaaccatacacttaaattagagaacatgcatcctttttaaactaatatgcaacatttacgtaattttcctagattcatttaggcacaaaggaagtttcgacaaatatgaaagatatataagatatcttatctgaccgtagtataataaaattagaaattaatagtgaaaatataaccaattccccctccaatccatgtttggaaattgaaaaaaaaa

SEQ ID NO: 40863 - DNA, 950 bp, Homo sapiens
tcccaggtcacgaagactggaagtgtgatgaagtagatccacacatataaaagattatttcctgcaatattctattcctgatcagttttctgcttttcatttcatacaatgtgcaaaaggatgagagaggattctgaggttccatagcagctgggagccctgacctcatggaaatggccatccacatccttacttaatactttcaaaggacccagaaccaacaaatacacatctggcactctcctcccagggcaaatgaaggaggtgggaaggcttgagcacatttcagttcaacaagaatttcctgggctcctcctctcccagctgatgtactgctctagagaaacaaagatgtcattctgccaggtgggaggaaaaggtgaggtgggagggttaggtcaagtcccaaggtttggagaagaaagaggaggagggtaaggaggaagctggaggcaaaaactaccaatggtaaaggagatctggagaacagggtctgaaacagtctgacacgctctgtctttctcaaagagttgctcccccatggacccacttgccattgatctccgtttgggtcacttgcattatcctgtgtattacaccagtgttggcctgcacctttcgtgtcacgtgagtacctctgggagagatgtatgaagcccagtctggagtctaagcattagctgaataaagtgacaaagtctttctacaggtctccagagacctatgtcatcaaaccagctttgagataatgatgattaccaacccaccccagctaaaggggaccaggcagacaccatggtgggcttcagcaaggagatgaaacacagagaaaatgagttctacctaagcaaaaatactgtggacttaattttttttttttttttttttttgagatagggtctcattgtgtcacccaggctggagtgcagtaatgtgatcttggctcagtg

SEQ ID NO: 40864 - DNA, 465 bp, Homo sapiens
aaaaaaaattttttttggaataacttaaattctaaaactttgctgggattacaggcatgggtcaccgcaccaagcccgcatttatattttgagttaccaaaatgatcatcatctgtgaagcatcatggtagcttccaagcatttgcggcccactggccagtgcatccaaaacacattcaggaaacccgagagttgtaagttgcacatgtgtggcctacagtgacttccatgtagtaacagggctgagcaaggcaggctctccaccagacttaaagcattcaaccactctgcccccaggccgacactgacatgtgttcactgtcgctgccacagctggccacctgtgttcagtctccatgaaggattcaccttctgctctcactgacatctccttggctacacaaatgtgcaggtgtctcttgtcaaagctaatttttcttttctaaataaacatcctttaataca

SEQ ID NO: 40865 - DNA, 1204 bp, Homo sapiens
cccaaactcagcctcccaggtagctgtgattgtgcctctgttacccaggctggaatacagtggcacaatcacagctcactgtaggctctatctcctgggctcaggtgatcctcccaaactcagcctcccaggtagctgtggctccaggcgaactactgtatatagagacagggtttccctatgttgcccaggctggtctggtcttatagtcctgggctcaagcctcccagagtgctgggattacaggcatgggtcaccgcaccaagcccgcatttatattttgagttaccaaaatgatcatcatctgtgaagcatcatggtagcttccaagcatttgcggcccactggccagtgcatccaaaacacattcaggaaacccgagagttgtaagttgcacatgtgtggcctacagtgacttccatgtagtaacagggctgagcaaggcaggctctccaccagacttaaagcattcaaccactctgcccccaggccgacactgacatgtgttcactgtcgctgccacagctggccacctgtgttcagtctccatgaaggattcaccttctgctctcactgacatctccttggctacacaaatgtgcaggtgtctcttgtcaaagctaatttttcttttctaaataaacatcctttaatacaaaaaaaaaaaaaaaaaaaaaaaaaaaaaaaaaaaaaaaaaaaaaaaaaaaaaaaaaaaacacaaaaaacaaaaaaaacaaaaaaagaaaacaaaaacaaaaaagaaagaaaacaaaaaaaagcacaaggggggcaggccgctcgaacacactcacgccgtgagcgggcaacgaccagccacacccagcacaccacatactagaaaagcgcggcgcacagagaagaatgacgaaaataaggaaccacaggcgacgagccggagcctagaaaacagcaaccacgcagcgaagaccaccacaaaacccgaacgcgagggcggacataacaaagaaacacacaacaccaacagggcggaggaggcagcaaaccaggccaaacacaccacaccccaacacaacagcaacgcccagcacgaggcaaaaactcacaacaacaacgcagcgaaggaaggacgagcaaccacccacaacacacgcacggcgcgaggagaaaagtgaaaccacggccaggaataacagcagaagacataataccgccggggaggaaa

SEQ ID NO: 40866 - DNA, 2241 bp, Homo sapiens
tgcggcgctgccatggagacacggcccagcggccgccggccccgccctgggagccccgcagtgcgtcgcgccgctgcccgcatctccgaggcccgcgacgagcggggcctcacgggagctggatgctcggagcagcaaggcggccctgggggccccttccggtcccggggctgacgcctggcggcgtctccgggaacccgcgccctttcaagcgccgctggctcctgtttcacagatggagaccctgaagccccaacaagcagcctccccagcacctcccagtgactgaaaaagctggcactgggcgcccgtctcactctccacccagctcccaggctgccccacgggaccagcacctttggggagagacgagacctgaacaaacgctggggctggatccccagggtgggtcagaacagccgttgccctgaaagctggcccggacagatgcgtgcggggcgtgccaccggagctccttccagcttgcgtctggggccaccatgtcccttcctcagggcactggatccatctcttcaagctcagtggtccaggccatggtggcagaatcaccccccagggtgtgacgcctcgtccctgtcaattccacacagctgcacccggaagagctgtggccgggcgccgctctgacctgtgtgcggtcccctgaatgggtctcaggtgtcttcagaatggtgaggccgcctcatttcctcaccacacaaccctcctgaggacgttgcctgcaaatgggcggaattcctaatttctaccattcagttaaacgagggatccttaagccccaaagctgggaaagctgtccgttaatttagtgcgcgtgggccgtctcagaacagcagggttcccaggagtccagcgggacgggggaggggatgagtggccgtgtccccctggcagagaaggccttgtctgaaggctacgcccgcctccggtacagggacacctccttgctcatctggcagcagcaacagcagaagttggagtcggtgccacctgggacgtacctgagcaggagccgaagcatgtggtactcacagtatggaaatgaggccatcttggtccgagacaaaaacaagctcgaggtctctagggacacagggcagtccaagttttgcacaattatgtaattccgatgtgagcacctgaacccaggaccacactttgaggaaaacagacctgagtttcattcagttgtcttgttgatttccaatccttgctggaagattttgaataatgaacgtgaagatcaaactgtggtgtaagaacccaagaagcgcagaattggcccccgaacccctcagcacagccgcggtgtgactggtgcacaggacacttcccctctagagtcccctccgtggtcagctgttgtgacatttgaattctccaggtgctgctagggacagcataggcccgggcactgctagatgcttggtttaaaccaggccaagagtaaccctcccatccccattacaaaccaccttttcaagttttttaggttttagttttttgtttttagcataaatggcggagtagcagcagcatctcaccaggagctttgtcgcattacattttgtattttgcttttttgagacggggtctcactctgttacccaggctggaatacagtggcacaatcacagctcactgtaggctctatctcctgggctcaggtgatcctcccaaactcagcctcccaggtagctgtggctccaggcgaactactgtatatagagacagggtttccctatgttgcccaggctggtctggtcttatagtcctgggctcaagcctcccagagtgctgggattacaggcatgggtcaccgcaccaagcccgcatttatattttgagttaccaaaatgatcatcatctgtgaagcatcatggtagcttccaagcatttgcggcccactggccagtgcatccaaaacacattcaggaaacccgagagttgtaagttgcacatgtgtggcctacagtgacttccatgtagtaacagggctgagcaaggcaggctctccaccagacttaaagcattcaaccactctgcccccaggccgacactgacatgtgttcactgtcgctgccacagctggccacctgtgttcagtctccatgaaggattcaccttctgctctcactgacatctccttggctacacaaatgtgcaggtgtctcttgtcaaagctaatttttcttttctaaataaacatcctttaataca

SEQ ID NO: 40867 - DNA, 3438 bp, Homo sapiens
tgcggcgctgccatggagacacggcccagcggccgccggccccgccctgggagccccgcagtgcgtcgcgccgctgcccgcatctccgaggcccgcgacgagcggggcctcacgggagctggatgctcggagcagcaaggcggccctgggggccccttccggtcccggggctgacgcctggcggcgtctccgggaacccgcgccctttcaagcgccgctggctcctgtttcacagatggagaccctgaagccccaacaagcagcctccccagcacctcccagtgactgaaaaagctggcactgggcgcccgtctcactctccacccagctcccaggctgccccacgggaccagcacctttggggagagacgagacctgaacaaacgctggggctggatccccagggtgggtcagaacagccgttgccctgaaagctggcccggacagatgcgtgcggggcgtgccaccggagctccttccagcttgcgtctggggccaccatgtcccttcctcagggcactggatccatctcttcaagctcagtggtccaggccatggtggcagaatcaccccccagggtgtgacgcctcgtccctgtcaattccacacagctgcacccggaagagctgtggccgggcgccgctctgacctgtgtgcggtcccctgaatgggtctcaggtgtcttcagaatggtgaggccgcctcatttcctcaccacacaaccctcctgaggacgttgcctgcaaatgggcggaattcctaatttctaccattcagttaaacgagggatccttaagccccaaagctgggaaagctgtccgttaatttagtgcgcgtgggccgtctcagaacagcagggttcccaggagtccagcgggacgggggaggggatgagtggccgtgtccccctggcagagaaggccttgtctgaaggctacgcccgcctccggtacagggacacctccttgctcatctggcagcagcaacagcagaagttggagtcggtgccacctgggacgtacctgagcaggagccgaagcatgtggtactcacagtatggaaatgaggccatcttggtccgagacaaaaacaagctcgaggtctctagggacacagggcagtccaagttttgcacaattatgtaattccgatgtgagcacctgaacccaggaccacactttgaggaaaacagacctgagtttcattcagttgtcttgttgatttccaatccttgctggaagattttgaataatgaacgtgaagatcaaactgtggtgtaagaacccaagaagcgcagaattggcccccgaacccctcagcacagccgcggtgtgactggtgcacaggacacttcccctctagagtcccctccgtggtcagctgttgtgacatttgaattctccaggtgctgctagggacagcataggcccgggcactgctagatgcttggtttaaaccaggccaagagtaaccctcccatccccattacaaaccaccttttcaagttttttaggttttagttttttgtttttagcataaatggcggagtagcagcagcatctcaccaggagctttgtcgcattacattttgtattttgcttttttgagacggggtctcactctgttacccaggctggaatacagtggcacaatcacagctcactgtaggctctatctcctgggctcaggtgatcctcccaaactcagcctcccaggtagctgtggctccaggcgaactactgtatatagagacagggtttccctatgttgcccaggctggtctggtcttatagtcctgggctcaagcctcccagagtgctgggattacaggcatgggtcaccgcaccaagcccgcatttatattttgagttaccaaaatgatcatcatctgtgaagcatcatggtagcttccaagcatttgcggcccactggccagtgcatccaaaacacattcaggaaacccgagagttgtaagttgcacatgtgtggcctacagtgacttccatgtagtaacagggctgagcaaggcaggctctccaccagacttaaagcattcaaccactctgcccccaggccgacactgacatgtgttcactgtcgctgccacagctggccacctgtgttcagtctccatgaaggattcaccttctgctctcactgacatctccttggctacacaaatgtgcaggtgtctcttgtcaaagctaatttttcttttctaaataaacatcctttaatacactcctccccttcctcacacttatttttatccttgttcgtaatatcctacttggcttcccattttttatagcagtaatatctaattgattgctaaagactgcaatacacaaaggcataaagcaaagcacaagtgctctccgtggggagaacccggccggcagctggggatgcgtcccacagctcctcagcatgcacacacggtcacgtgatttctgacggcctcatcctgcaccatgcctcttgtatccgccattttctttcttgctcaactgtacagactgggcattcacttaatgcttttctttttttttaagagagtctcactctgttgcccaggctggagtgcaatggcacaatctcagctcactgcaacctctgcctcctgggttcaggcgattctcctgcctcagcctcctgagtagctggaattacaggtgcctgccaccaagcctggctaatttttctatttttaatagagacaaggtttcaccatgttggccaggctggtctcgaactgccaatctcaggtgatctgcccacctcggcctcccaaagtactgggattacaggcgtgagccaccgcacccggcccacttcatgcttttaacctctgactcgcagctctcccgtgagcccacagacgggcacagtgacagcatccaggttgtcatctgtgcaaacagcatgttctgaatgtgcctgtactctgttcgtgcttctctttgcagctgtgcaagttcattcgcaaacgtcctagaagtggaactgctgggtcaaagtgcattccccaaatgtcctgccagaggcctggtcggcagcagcctcctgcacagcccgagtcccttctgcgagagtcctggcttgtttgcagcctgcagctgggagatttgaagtcagacttccaggattgccgcatggagctgcagagggagtgagcatggggctggaggacctgccccgccggctgacactcccacagcaaggcgggcccgccaaggaagcactccacatccgctagggttggggtatgacccccagtgacagaccaggaaatggaggtttcaggagctcaagagctcgtctaagaacatggagctcatcaggaggtaagccacactcagacgtgggcctgctcgatgctcaaacccctactgctgacaccccccacccccctaaagaggggtggcacagcggccg

SEQ ID NO: 40868 - DNA, 1890 bp, Homo sapiens
tgcggcgctgccatggagacacggcccagcggccgccggccccgccctgggagccccgcagtgcgtcgcgccgctgcccgcatctccgaggcccgcgacgagcggggcctcacgggagctggatgctcggagcagcaaggcggccctgggggccccttccggtcccggggctgacgcctggcggcgtctccgggaacccgcgccctttcaagcgccgctggctcctgtttcacagatggagaccctgaagccccaacaagcagcctccccagcacctcccagtgactgaaaaagctggcactgggcgcccgtctcactctccacccagctcccaggctgccccacgggaccagcacctttggggagagacgagacctgaacaaacgctggggctggatccccagggtgggtcagaacagccgttgccctgaaagctggcccggacagatgcgtgcggggcgtgccaccggagctccttccagcttgcgtctggggccaccatgtcccttcctcagggcactggatccatctcttcaagctcagtggtccaggccatggtggcagaatcaccccccagggtgtgacgcctcgtccctgtcaattccacacagctgcacccggaagagctgtggccgggcgccgctctgacctgtgtgcggtcccctgaatgggtctcaggtgtcttcagaatggtgaggccgcctcatttcctcaccacacaaccctcctgaggacgttgcctgcaaatgggcggaattcctaatttctaccattcagttaaacgagggatccttaagccccaaagctgggaaagctgtccgttaatttagtgcgcgtgggccgtctcagaacagcagggttcccaggagtccagcgggacgggggaggggatgagtggccgtgtccccctggcagagaaggccttgtctgaaggctacgcccgcctccggtacagggacacctccttgctcatctggcagcagcaacagcagaagttggagtcggtgccacctgggacgtacctgagcaggagccgaagcatgtggtactcacagtatggaaatgaggccatcttggtccgagacaaaaacaagctcgaggtctctagggacacagggcagtccaagttttgcacaattatgtaattccgatgtgagcacctgaacccaggaccacactttgaggaaaacagacctgagtttcattcagttgtcttgttgatttccaatccttgctggaagattttgaataatgaacgtgaagatcaaactgtggtgtaagaacccaagaagcgcagaattggcccccgaacccctcagcacagccgcggtgtgactggtgcacaggacacttcccctctagagtcccctccgtggtcagctgttgtgacatttgaattctccaggtgctgctagggacagcataggcccgggcactgctagatgcttggtttaaaccaggccaagagtaaccctcccatccccattacaaaccaccttttcaagttttttaggttttagttttttgtttttagcataaatggcggagtagcagcagcatctcaccaggagctttgtcgcattacattttgtattttgcttttttgagacggggtctcactctgttacccaggctggaatacaagtgacttccatgtagtaacagggctgagcaaggcaggctctccaccagacttaaagcattcaaccactctgcccccaggccgacactgacatgtgttcactgtcgctgccacagctggccacctgtgttcagtctccatgaaggattcaccttctgctctcactgacatctccttggctacacaaatgtgcaggtgtctcttgtcaaagctaatttttcttttctaaataaacatcctttaataca

SEQ ID NO: 40869 - DNA, 2095 bp, Homo sapiens
tgcggcgctgccatggagacacggcccagcggccgccggccccgccctgggagccccgcagtgcgtcgcgccgctgcccgcatctccgaggcccgcgacgagcggggcctcacgggagctggatgctcggagcagcaaggcggccctgggggccccttccggtcccggggctgacgcctggcggcgtctccgggaacccgcgccctttcaagcgccgctggctcctgtttcacagatggagaccctgaagccccaacaagcagcctccccagcacctcccagtgactgaaaaagctggcactgggcgcccgtctcactctccacccagctcccaggctgccccacgggaccagcacctttggggagagacgagacctgaacaaacgctggggctggatccccagggtgggtcagaacagccgttgccctgaaagctggcccggacagatgcgtgcggggcgtgccaccggagctccttccagcttgcgtctggggccaccatgtcccttcctcagggcactggatccatctcttcaagctcagtggtccaggccatggtggcagaatcaccccccagggtgtgacgcctcgtccctgtcaattccacacagctgcacccggaagagctgtggccgggcgccgctctgacctgtgtgcggtcccctgaatgggtctcaggtgtcttcagaatggtgaggccgcctcatttcctcaccacacaaccctcctgaggacgttgcctgcaaatgggcggaattcctaatttctaccattcagttaaacgagggatccttaagccccaaagctgggaaagctgtccgttaatttagtgcgcgtgggccgtctcagaacagcagggttcccaggagtccagcgggacgggggaggggatgagtggccgtgtccccctggcagagaaggccttgtctgaaggctacgcccgcctccggtacagggacacctccttgctcatctggcagcagcaacagcagaagttggagtcggtgccacctgggacgtacctgagcaggagccgaagcatgtggtactcacagtatggaaatgaggccatcttggtccgagacaaaaacaagctcgaggtctctagggacacagggcagtccaagttttgcacaattatgtaattccgatgtgagcacctgaacccaggaccacactttgaggaaaacagacctgagtttcattcagttgtcttgttgatttccaatccttgctggaagattttgaataatgaacgtgaagatcaaactgtggtgtaagaacccaagaagcgcagaattggcccccgaacccctcagcacagccgcggtgtgactggtgcacaggacacttcccctctagagtcccctccgtggtcagctgttgtgacatttgaattctccagctgtgcaagttcattcgcaaacgtcctagaagtggaactgctgggtcaaagtgcattccccaaatgtcctgccagaggcctggtcggcagcagcctcctgcacagcccgagtcccttctgcgagagtcctggcttgtttgcagcctgcagctgggagatttgaagtcagacttccaggattgccgcatggagctgcagagggagtgagcatggggctggaggacctgccccgccggctgacactcccacagcaaggcgggcccgccaaggaagcactccacatccgctaggtagggtttgtctgcatcttttcagttcttcagtttaagtcctgcctgggaagaaagcaaactccagaggcaaatctggaatgcctgtgtgccaccttctcaccgcaccacagactcccctgaggacgggttgtggcggggttggccccaagcatgggaggcagcgcagacatgcagaatggggtctgaggtcacgttgcaacgctggcaggatgtgtgctcaagggccagtctctgcaggggtcagggcgtgtgggccacgcacaaggagctggcactaagccgcttaggctgcaggaagacaccatctgcctggggcggacaaggccccatgtccgtcctcaaggaggctggtctggatgagaagggtcacagtctggccaggagtgtcaccgtgccc

SEQ ID NO: 40870 - DNA, 641 bp, Homo sapiens
gctgcgcagctgggaaggcgttcgggagtgggttgcgatgcttccctgtttgttttctcctgacatcgtttttgtttgggtccaggggcctcacgggagctggatgctcggagcagcaaggcggccctgggggccccttccggtcccggggctgacgcctggcggcgtctccgggaacccgcgccctttcaagcgccgctggctcctgtttcacagatggagaccctgaagccccaacaagcagcctccccagcacctcccagtgactgaaaaagctggcactgggcgcccgtctcactctccacccagctcccaggctgccccacgggacgtaagtagctcgatctaggccgctgacccccagagacttgatgctgcgctgcagactgccgccgctgccggggcgcttgacttcccctctcctgacagcacgttcgttcctttgcagcagcacctttggggagagacgagacctgaacaaacgctggggctggatccccagggtgggtcagaacagccgttgccctgaaagctggcccggacagatgcgtgcggggcgtgccaccggagctccttccagcttgcgtctggggccaccatgtcccttcctcagggcactggatccatctcttcaagctcag

SEQ ID NO: 40871 - DNA, 510 bp, Homo sapiens
ccatatgtgtgtcctggaagccaggaaaagagatgtgtgctctaacagggtccagaaaaaggaggcaagggctcaaatgctggctcccctgagcaaaggacctggcaaagcgcagggcatggggctgggcctcccgcctctgctacctcggcctgccatggaactgatgccactgccagggaacagtcagaaagctcacggtgagcccagctcactggctgggctgcccagtccagccccacaagagccctctcctggggggtcctctgtctgtggtgccctggaatgggctgtgttcacacacacttgacatgtgcacacctccctgcagggttggggtatgacccccagtgacagaccaggaaatggaggtttcaggagctcaagagctcgtctaagaacatggagctcatcaggaggtaagccacactcagacgtgggcctgctcgatgctcaaacccctactgctgacaccccccacccccctaaagaggggtggcacagcggccg

SEQ ID NO: 40872 - DNA, 2243 bp, Homo sapiens
  misc_feature (1508)..(1508): n is a, c, g, or t
tgcggcgctgccatggagacacggcccagcggccgccggccccgccctgggagccccgcagtgcgtcgcgccgctgcccgcatctccgaggcccgcgacgagcggggcctcacgggagctggatgctcggagcagcaaggcggccctgggggccccttccggtcccggggctgacgcctggcggcgtctccgggaacccgcgccctttcaagcgccgctggctcctgtttcacagatggagaccctgaagccccaacaagcagcctccccagcacctcccagtgactgaaaaagctggcactgggcgcccgtctcactctccacccagctcccaggctgccccacgggaccagcacctttggggagagacgagacctgaacaaacgctggggctggatccccagggtgggtcagaacagccgttgccctgaaagctggcccggacagatgcgtgcggggcgtgccaccggagctccttccagcttgcgtctggggccaccatgtcccttcctcagggcactggatccatctcttcaagctcagtggtccaggccatggtggcagaatcaccccccagggtgtgacgcctcgtccctgtcaattccacacagctgcacccggaagagctgtggccgggcgccgctctgacctgtgtgcggtcccctgaatgggtctcaggtgtcttcagaatggtgaggccgcctcatttcctcaccacacaaccctcctgaggacgttgcctgcaaatgggcggaattcctaatttctaccattcagttaaacgagggatccttaagccccaaagctgggaaagctgtccgttaatttagtgcgcgtgggccgtctcagaacagcagggttcccaggagtccagcgggacgggggaggggatgagtggccgtgtccccctggcagagaaggccttgtctgaaggctacgcccgcctccggtacagggacacctccttgctcatctggcagcagcaacagcagaagttggagtcggtgccacctgggacgtacctgagcaggagccgaagcatgtggtactcacagtatggaaatgaggccatcttggtccgagacaaaaacaagctcgaggtctctagggacacagggcagtccaagttttgcacaattatgtaattccgatgtgagcacctgaacccaggaccacactttgaggaaaacagacctgagtttcattcagttgtcttgttgatttccaatccttgctggaagattttgaataatgaacgtgaagatcaaactgtggtgtaagaacccaagaagcgcagaattggcccccgaacccctcagcacagccgcggtgtgactggtgcacaggacacttcccctctagagtcccctccgtggtcagctgttgtgacatttgaattctccaggtgctgctagggacagcataggcccgggcactgctagatgcttggtttaaaccaggccaagagtaaccctcccatccccattacaaaccacaatttctagaanattttaaatattattttatttatatttattatttttttttttttgaggatcgtaaccaggtagtgttgttgtgagtttaattttgtattttgcttttttgagacggggtctcactctgttacccaggctggaatacagtggcacaatcacagctcactgtaggctctatctcctgggctcaggtgatcctcccaaactcagcctcccaggtagctgtggctccaggcgaactactgtatatagagacagggtttccctatgttgcccaggctggtctggtcttatagtcctgggctcaagcctcccagagtgctgggattacaggcatgggtcaccgcaccaagcccgcatttatattttgagttaccaaaatgatcatcatctgtgaagcatcatggtagcttccaagcatttgcggcccactggccagtgcatccaaaacacattcaggaaacccgagagttgtaagttgcacatgtgtggcctacagtgacttccatgtagtaacagggctgagcaaggcaggctctccaccagacttaaagcattcaaccactctgcccccaggccgacactgacatgtgttcactgtcgctgccacagctggccacctgtgttcagtctccatgaaggattcaccttctgctctcactgacatctccttggctacacaaatgtgcaggtgtctcttgtcaaagctaatttttcttttctaaataaacatcctttaataca

SEQ ID NO: 40873 - DNA, 2788 bp, Homo sapiens
tgcggcgctgccatggagacacggcccagcggccgccggccccgccctgggagccccgcagtgcgtcgcgccgctgcccgcatctccgaggcccgcgacgagcggggcctcacgggagctggatgctcggagcagcaaggcggccctgggggccccttccggtcccggggctgacgcctggcggcgtctccgggaacccgcgccctttcaagcgccgctggctcctgtttcacagatggagaccctgaagccccaacaagcagcctccccagcacctcccagtgactgaaaaagctggcactgggcgcccgtctcactctccacccagctcccaggctgccccacgggaccagcacctttggggagagacgagacctgaacaaacgctggggctggatccccagggtgggtcagaacagccgttgccctgaaagctggcccggacagatgcgtgcggggcgtgccaccggagctccttccagcttgcgtctggggccaccatgtcccttcctcagggcactggatccatctcttcaagctcagtggtccaggccatggtggcagaatcaccccccagggtgtgacgcctcgtccctgtcaattccacacagctgcacccggaagagctgtggccgggcgccgctctgacctgtgtgcggtcccctgaatgggtctcaggtgtcttcagaatggtgaggccgcctcatttcctcaccacacaaccctcctgaggacgttgcctgcaaatgggcggaattcctaatttctaccattcagttaaacgagggatccttaagccccaaagctgggaaagctgtccgttaatttagtgcgcgtgggccgtctcagaacagcagggttcccaggagtccagcgggacgggggaggggatgagtggccgtgtccccctggcagagaaggccttgtctgaaggctacgcccgcctccggtacagggacacctccttgctcatctggcagcagcaacagcagaagttggagtcggtgccacctgggacgtacctgagcaggagccgaagcatgtggtactcacagtatggaaatgaggccatcttggtccgagacaaaaacaagctcgaggtctctagggacacagggcagtccaagttttgcacaattatgtaattccgatgtgagcacctgaacccaggaccacactttgaggaaaacagacctgagtttcattcagttgtcttgttgatttccaatccttgctggaagattttgaataatgaacgtgaagatcaaactgtggtgtaagaacccaagaagcgcagaattggcccccgaacccctcagcacagccgcggtgtgactggtgcacaggacacttcccctctagagtcccctccgtggtcagctgttgtgacatttgaattctccaggtgctgctagggacagcataggcccgggcactgctagatgcttggtttaaaccaggccaagagtaaccctcccatccccattacaaaccaccttttcaagttttttaggttttagttttttgtttttagcataaatggcggagtagcagcagcatctcaccaggagctttgtcgcattacattttgtattttgcttttttgagacggggtctcactctgttacccaggctggaatacagtggcacaatcacagctcactgtaggctctatctcctgggctcaggtgatcctcccaaactcagcctcccaggtagctgtggctccaggcgaactactgtatatagagacagggtttccctatgttgcccaggctggtctggtcttatagtcctgggctcaagcctcccagagtgctgggattacaggcatgggtcaccgcaccaagcccgcatttatattttgagttaccaaaatgatcatcatctgtgaagcatcatggtagcttccaagcatttgcggcccactggccagtgcatccaaaacacattcaggaaacccgagagttgtaagttgcacatgtgtggcctacagtgacttccatgtagtaacagggctgagcaaggcaggctctccaccagacttaaagcattcaaccactctgcccccaggccgacactgacatgtgttcactgtcgctgccacagctggccacctgtgttcagtctccatgaaggattcaccttctgctctcactgacatctccttggctacacaaatgtgcaggtgtctcttgtcaaagctaatttttcttttctaaataaacatcctttaatacaaaaaaaaaaaaaaaaaaaaaaaaaaaaaaaaaaaaaaaaaaaaaaaaaaaaaaaaaaaacacaaaaaacaaaaaaaacaaaaaaagaaaacaaaaacaaaaaagaaagaaaacaaaaaaaagcacaaggggggcaggccgctcgaacacactcacgccgtgagcgggcaacgaccagccacacccagcacaccacatactagaaaagcgcggcgcacagagaagaatgacgaaaataaggaaccacaggcgacgagccggagcctagaaaacagcaaccacgcagcgaagaccaccacaaaacccgaacgcgagggcggacataacaaagaaacacacaacaccaacagggcggaggaggcagcaaaccaggccaaacacaccacaccccaacacaacagcaacgcccagcacgaggcaaaaactcacaacaacaacgcagcgaaggaaggacgagcaaccacccacaacacacgcacggcgcgaggagaaaagtgaaaccacggccaggaataacagcagaagacataataccgccggggaggaaa

SEQ ID NO: 40874 - DNA, 2358 bp, Homo sapiens
tgcggcgctgccatggagacacggcccagcggccgccggccccgccctgggagccccgcagtgcgtcgcgccgctgcccgcatctccgaggcccgcgacgagcggggcctcacgggagctggatgctcggagcagcaaggcggccctgggggccccttccggtcccggggctgacgcctggcggcgtctccgggaacccgcgccctttcaagcgccgctggctcctgtttcacagatggagaccctgaagccccaacaagcagcctccccagcacctcccagtgactgaaaaagctggcactgggcgcccgtctcactctccacccagctcccaggctgccccacgggacgtaagtagctcgatctaggccgctgacccccagagacttgatgctgcgctgcagactgccgccgctgccggggcgcttgacttcccctctcctgacagcacgttcgttcctttgcagcagcacctttggggagagacgagacctgaacaaacgctggggctggatccccagggtgggtcagaacagccgttgccctgaaagctggcccggacagatgcgtgcggggcgtgccaccggagctccttccagcttgcgtctggggccaccatgtcccttcctcagggcactggatccatctcttcaagctcagtggtccaggccatggtggcagaatcaccccccagggtgtgacgcctcgtccctgtcaattccacacagctgcacccggaagagctgtggccgggcgccgctctgacctgtgtgcggtcccctgaatgggtctcaggtgtcttcagaatggtgaggccgcctcatttcctcaccacacaaccctcctgaggacgttgcctgcaaatgggcggaattcctaatttctaccattcagttaaacgagggatccttaagccccaaagctgggaaagctgtccgttaatttagtgcgcgtgggccgtctcagaacagcagggttcccaggagtccagcgggacgggggaggggatgagtggccgtgtccccctggcagagaaggccttgtctgaaggctacgcccgcctccggtacagggacacctccttgctcatctggcagcagcaacagcagaagttggagtcggtgccacctgggacgtacctgagcaggagccgaagcatgtggtactcacagtatggaaatgaggccatcttggtccgagacaaaaacaagctcgaggtctctagggacacagggcagtccaagttttgcacaattatgtaattccgatgtgagcacctgaacccaggaccacactttgaggaaaacagacctgagtttcattcagttgtcttgttgatttccaatccttgctggaagattttgaataatgaacgtgaagatcaaactgtggtgtaagaacccaagaagcgcagaattggcccccgaacccctcagcacagccgcggtgtgactggtgcacaggacacttcccctctagagtcccctccgtggtcagctgttgtgacatttgaattctccaggtgctgctagggacagcataggcccgggcactgctagatgcttggtttaaaccaggccaagagtaaccctcccatccccattacaaaccaccttttcaagttttttaggttttagttttttgtttttagcataaatggcggagtagcagcagcatctcaccaggagctttgtcgcattacattttgtattttgcttttttgagacggggtctcactctgttacccaggctggaatacagtggcacaatcacagctcactgtaggctctatctcctgggctcaggtgatcctcccaaactcagcctcccaggtagctgtggctccaggcgaactactgtatatagagacagggtttccctatgttgcccaggctggtctggtcttatagtcctgggctcaagcctcccagagtgctgggattacaggcatgggtcaccgcaccaagcccgcatttatattttgagttaccaaaatgatcatcatctgtgaagcatcatggtagcttccaagcatttgcggcccactggccagtgcatccaaaacacattcaggaaacccgagagttgtaagttgcacatgtgtggcctacagtgacttccatgtagtaacagggctgagcaaggcaggctctccaccagacttaaagcattcaaccactctgcccccaggccgacactgacatgtgttcactgtcgctgccacagctggccacctgtgttcagtctccatgaaggattcaccttctgctctcactgacatctccttggctacacaaatgtgcaggtgtctcttgtcaaagctaatttttcttttctaaataaacatcctttaataca

SEQ ID NO: 40875 - DNA, 484 bp, Homo sapiens
ttgcgggaaacactgcttccacgccgagagaactcgcttctcctaaagatatttttgggaagggaggagttgcagagagggacgggaggggagagttggggagacctcaattaatgctttaaagatctcttagaaattaacaaactggggagtcttggaatctgctgtcagaagcgtgttttcccctctctcctctaacaagcactgacagtctaattactgtagctacaagcagctgtcgaggcagcagcccgggagaggaggcgccacaggctgggcgcgcccggccggcccctgcgcccagccgaaccgccgaagcacggcccgactcggggaaggactcagggaggatggagaggggcaaggccccgcgcccgagaaccccggcgggcctgcgagccagcggacacgcttattgtttccttaagtctttaccttgaaggttaaaagatgtgacgaaaggaggggacgtggggggagtggg

SEQ ID NO: 40876 - DNA, 401 bp, Homo sapiens
gggtccctggggtaggagttgcctttgcagactacagagtgcacagggccagcaccctgccatggaggaggaggtgtcctgtcatccgccaggtcagggcacaggttggctcggccaggaacccatgttctgacagccctggagtaaggctttgggcatgggctcagtctcagggccacacgggtccccaagctcagccacagggtgcctacatccagcataggtcgatgctggtctccccacccttccccacagctgggagcagtgtgtgaagaagggctgtcagcttgttctgagcacaaaccgtgtcctcactgatggtccgtgctaatgtgaatttgcaaggttcttgcccttcccaaggtgcagagcaggaggtggggccaggaactgtgccctgc

SEQ ID NO: 40877 - DNA, 350 bp, Homo sapiens
tgggaggcaccatagtcttcttttacaaacgcctccatctccactccacccctgccagtttgacccacttccagtatttggcctttgctcaattctttgctcttctctttcttctgcctggaacatcctcatactgtctcctggcccatctctccttgtggagaaaaccacagactttaaagccagctggccctcctctgtagagcgctgcctccctgtctgtgttgggatggggtgggcccccagggatggaagcacccctgatgagacacactcaccccctctgggctgggcactgctgccctccaccccccaggaccacacctgggatcccaccctctctgccaggg

SEQ ID NO: 40878 - DNA, 354 bp, Homo sapiens
aaaatgatgccttttcaaagacatgcttgtaagtttgactcagagcttagaaaacttagcaaaggagtattttctttttccttaggggataagaagattgatctgaggtcagaaaaaattgagtttgagtctcattatgctactttcttttttgagacggagtctcacgcagttgcccaggcttgagtgcagtggcaccatctcagttcactgcaacctctgtctcccaggttcaagcagttctcgtgccttaacctcccaagtagctgggattacaggaacctgccatcagacgcagctaattttttttttttttttttttgtggagatggggtttcaccttgttggccaggc

SEQ ID NO: 40879 - DNA, 916 bp, Homo sapiens
ttttttctccagctaacatacttaaaatgcttccctgcccccccccaaaagacagctctagtatattatttctcttttcttttcattcacaatacaattgagataaaattagcttttttgcgtctttcccattactggtttacattcaatgttgtgtctttgaaacagttttaagcaatctccttcggggactttcccattgcttaccctggttagtctgtaacaaggatgggctatcccagtacagtaaagaatgctggctttagagaatggtcttaggtcaagaattattattgctcaaggccttcgagatctagttatgggtttctgcaaaccctgtgggctcttatgataatgcttttctccactattattgttataaggcattaaatcagtcagattcatgagcaacaagaggtcaacgtctgattgaaattcataaggtcaaaaaggaaactaaaaattaatttataagatatgaagatttaggttcaaactatatccatgagcaataaaatttcacatccataaatgtaagaaaatcagttattaaacttgaggggggaaagaagacttattaagttttacacacacataaggcagctaacacataattttatcagacattactgaaatcctgtgtgtaatataagggatgatgggataaaatgctaaatggtttagcactaaattattaagtgatgtatccctaaggtattaaacagatagaaaatgcagagcaggtgtctctcctagcaagacttgatcaccagtttaagtgcatattgataacaaatgcacttcagagagaaaatagtattagtaatatttttgctgcgtgaaagcctggtgtcaggatgactaaaagcttctccctgacaaagaaatgttcatttcttcttcttcttctttaaaa

SEQ ID NO: 40880 - DNA, 316 bp, Homo sapiens
ctgatttgggctgtgacaggaggtgtgaaacccagggtccagttctaccaccttcatttgcagatgcaaaagttgaggctcagagagggcaaggggctcccccagattaaacataaagtagatgcacagtgagaagtggaagccaggtctcagtctccccatcagtgtgtctgcccccatggcctgtgctccctcgccatgttaacgctaccatgtggcagctgcatcccatccaaggagggtgcaaccctgcatggggccatgtggtaaagcagcacttactgagtggggtcacagatggggccacatgctggaa

SEQ ID NO: 40881 - DNA, 357 bp, Homo sapiens
atacataccaatgggatgggaagcatttatcacctagctgggttcttacttgagctctgaaaaaaatgatttggccacacaacctttctcaaggctctgatttaatggacttctctgctgcaaagccactgaaattctttgccttttaatatttgacatctcttcctctttattaccatctcacacagcccttataggccagccagaacgagcccattagtctctgacaaataacttgtgtcgtttggtgaaaaatatgcagaagtttggctgcaacttcatctccagccttggttctgtttgtggctttcactctcctctaggcaaagcatccagccccaggcagagcctctttcc

SEQ ID NO: 40882 - DNA, 650 bp, Homo sapiens
cgagcggccgcccgggcaggtaccaacaagacactcaaagcaaatgctcactggagcatttttagattttgggtttttgaattcgggatgctcaaccaatgcaaatattctaaaatctgaaaaaatctgaaatccgaaacatttttggacccaagcatctcagatgaaggatactcaacctgtatctcttattttactcctgatgatttgtgtcttcttttttttgtgtcagttttgctacagttttacccattaagattttattttggttactgtatttttccagttataaagtttcccaattggtttttctttaccctatttatttgctatgctgaaaacttcctttttttttaatttatttcaagcatgttcataactgcttgttgaagcactgtcttgatgactcctttaaaatttgtgtcagggcaaggtgccatgactcatgggtacaatcccaacactttgggaggctaaggcaggaggatcgcttagcccagcagtttgagaccagcctgggcaccatagcgagacctcaggaggctgaggcgggacaatcattcaagcccaggagtttgagactgctgtgagctatgatcacatgccactgcactccagcctgggtgacagagtgagactctgtctcaaaa

SEQ ID NO: 40883 - DNA, 867 bp, Homo sapiens
gtgggcacctgtaatcccagctactcgggaggctgaggcaggagaattgcacgaacccaggagaaggaagttgcagtgagccgagatcacaccactgcactccagcctgggcaacaagagcaaaacttcatcccaaaaaaactaaataaataaagatttttaaaaagctatgtatttctagcaactgaggtctattctgcaactgagaggacactttaaccattttatttacatttcatctttatatgactgaataacattacatcaatcagaagtctttattggccaggagcagtggctcatgcctgtaatcccaacattttgggatgccaaggcaggaggattgcttgagtttaggagttcaagaccagcctgggcaacacagcaagacctcatctctactaaaacccaaaaaaattagccaggtgtggcgctgtgtgcctgtaatctcagctactggagaggctgagtcaggaggatcacttgagcctgggatatggaggctgcagtgagctatgatcacattactgcactccagcctgggcaacagagcgagaccctgtctgaaaaaaggaaaaaagaaaaagtctacaccttttgttattcctagctgagtaagtagtaccacagctgtgtcatgaagaattggcaagtcaagtcccagatcctaatgttgaaataaatgctggtaagataagctaggctgaaacgcagttagagccatgaaattcctgagaggaccatgttctgtcccaacatatgggagcccccatgtatttcacactctcctgtcttctccccactcctcagtcctcttctaagtcctcttagattaaatataatggagaattttttaagatgatgcaa

SEQ ID NO: 40884 - DNA, 487 bp, Homo sapiens
gtgaaaccccgtctcaaacataaataaataagaaaaaaaaaaaaaaaagaaaaataatgggtgggtgcggtggctcatgtctgtaatcctagcactttgggaggccaagacaggtggatcgcttgaggtcaggaatttgagacgagcctgggcaacatggtgatccgcccgtcttggcctaccgaagtgctgggatcacaggcatgagccaccgcgtccggccgatggcttcttttcttaaaagaacctctgctagcttccaaattttcttctgcaacttcctcacctctcttaggcttcaaagatttgaagacttagggccttgctctggataaggttttggcttaagggaatgttatggctggtttgatctatccagaccactaaaacattctccatatcatcaaggttgtttcactttcttatcacttgtgtattcactggagtagcacttttagtttccttcaagaacttttcctctgcactc

SEQ ID NO: 40885 - DNA, 422 bp, Homo sapiens
gtgagataggaagtatggtgggtgaggcacagcaggaaagggtgccagttcttcatcttccataaggggaagccaatggatagtgcccaaaactaaaaactaaaagaagagttacataaatatatgatttagagatacggaagtaaattccaaaggaatctgctcaaacaaaattgaaagcaattgcctcatgggtgtggaaaatgccaggataaatgactgcaatgtttcatcataagctttttggaactaaattagctctctaaattatgtgcttggagcacactgataaaagtaaaaacaaaattaaaacaaacaatagccctctggaggccttgacaccaaagagaaaagtcttggtagctgaaggactttaaatatgttttacatagaaaattgtaagtggtgcaattatacttcag

SEQ ID NO: 40886 - DNA, 2221 bp, Homo sapiens
  misc_feature (1)..(3): n is a, c, g, or t
  misc_feature (11)..(11): n is a, c, g, or t
  misc_feature (452)..(453): n is a, c, g, or t
nnngggtcacnttccctgccgccggaaccgctctgtgcgcgctgcccaacgaaggaaggggctgccccacgcagacccggcttctgggggtccctggaaacccaggcggccacggtgtggcgggggagacatggtcacttttcctgcagggtgcgcctgagcagaggggcagcccgttacagtaggcgaggccagggcaaacccggggtcactatcagcgctgcgagactggtattcaaggtcctctcagccgggcctctcacccaccccgctggccgcagccggaggctgccacgcggacaccgtctcaagcctctgagcattgctctgagcctctgcctgcaatgtccttcctctgtcatctctaggcctcggctcagccctggacctagcctttctgccccgccctaccccaagctggcgccaccgcccgtggctgaactccgacctcnnagccgcaggcgccgcggtaccctggctgtggccctcggcgctttcttcctagggtcacaggacccatacgagtgggagctccctgggagcagaactgcgtcttgtatcacctggcgcggtgaacgtgggggttgaaacgctccacgcggaaggtagagggcaggggccaagggggcgatcctggtggctgcgctttttgctatttgctgccgacggcatgcagacgagatgcaaataagcttatgaaactgtccgtcctaccccatcgctccctcctcgccccctacaccgtgttgtgctgcccaccagactcggagaagccgcggctgtccccggaaccctccgagcggcgccctcaggcccccgccaaaaagctccgcaagccgaggaccatctactccagcctgcagctgcagcacctaaaccagcgtttccagcacacgcagtacctggcgctgcccgagagggcccagctggcagcgcagctcggcctcacccagacccaggtaaagatctggtttcagaacaaacgctccaagtataagaagctcctgaagcagaattctggggggcaggaaggggacttccctgggaggaccttctctgtgtctccctgctccccacccctcccctccctctgggatctacccaaggcagggaccctgcccaccagtggctatggcaacagctttggagcctggtatcagcatcactcctcagatgtcctggcttcgcctcagatgatgtgaatctggggaagggcgggtcaggcccacagccttcctgcaaagcccaggacccaggcagtccacctgcaccccttctgggctgggaggaaaccagctccagatgggttttctctggaggacaagcagttagaggagaaaaaggaatggagcagagcctgtacccctaaccctaacagctaaatcaaggacctcagccttatataatcattgtccccaccactaccatggactggacaccttcactccagctggacaaagactctggagagagagccattggctggagttgagactgtccccagaacccttggtcttgccactcccccactccttcttccctctctccctttctcctctccctgctttcttgaaaaggactgaatcgccactacagcctgggtgcaaaatcagcaagaaacattgagtatttttttttctttgtatgcctttggccttgcacaacccatttgtgagcaaaagcagaagtggaccaccatcagctcccacccacccagcgatttttccttggaggtcagcccgttacccccataactgatttacctacttaccatactgggaggtagaagagatgcagagaaatgtggaatttgtggacctatgggtaatttatgctttcctcctaaaaaaaaaaaaaaagccctctttccccaccccctcccccatctcccctttttgaatagataatggatccaattatccatataattcaataggtatttattgagaggctcccttctattccccatccctaatccctaacgaacccacgggcacacacttttggaaaccctggtaaagtaacacttagggggaaatggggacaaactggctctctggattagtgcgggtatagacacccccaaataggtgggtaggcccattgattcagctccttgcagctgtctctgttcaaaggaactgtgcagatttagaacgaattggagcttgagcttcacaccaccagcttccagagattaaagtttgtacaaaacattgca

SEQ ID NO: 40887 - DNA, 2039 bp, Homo sapiens
aagagggcggggcccccgtcgggtcccgggaaccgaacccgatggagaggagggggcccccatggatttagggggggaggggaaagtcatgggggggcacccccccggaacccctttcccaggcgcgcgttctccgctgaaagaggctcagagagacactttctccgggatcttaagtgtgggggctgctggctggggggcccgtccggcccaacgccggaggcttggaaaagagagttagcagcgggagcggactacgtgccgggccatggcccttctgcccgggccctggccacaatgacctctttgccctgccccctccccggccgggacgcctccaaagctgtcttcccagacctcgcccctgtcccgtcggtagcggctgcctacccgcttggcttgtcccctacaaccgcagcctcccccaatttgtcctactccaggccgtatggccacctcctgtcttacccctacaccgagccagcgaaccccggagactcctacctgtcctgccagcaacccgcggcgctctctcagcccctctgcggacctgcagagcaccctcaggaactcgaggcagactcggagaagccgcggctgtccccggaaccctccgagcggcgccctcaggcccccgccaaaaagctccgcaagccgaggaccatctactccagcctgcagctgcagcacctaaaccagcgtttccagcacacgcagtacctggcgctgcccgagagggcccagctggcagcgcagctcggcctcacccagacccaggtaaagatctggtttcagaacaaacgctccaagtataagaagctcctgaagcagaattctggggggcaggaaggggacttccctgggaggaccttctctgtgtctccctgctccccacccctcccctccctctgggatctacccaaggcagggaccctgcccaccagtggctatggcaacagctttggagcctggtatcagcatcactcctcagatgtcctggcttcgcctcagatgatgtgaatctggggaagggcgggtcaggcccacagccttcctgcaaagcccaggacccaggcagtccacctgcaccccttctgggctgggaggaaaccagctccagatgggttttctctggaggacaagcagttagaggagaaaaaggaatggagcagagcctgtacccctaaccctaacagctaaatcaaggacctcagccttatataatcattgtccccaccactaccatggactggacaccttcactccagctggacaaagactctggagagagagccattggctggagttgagactgtccccagaacccttggtcttgccactcccccactccttcttccctctctccctttctcctctccctgctttcttgaaaaggactgaatcgccactacagcctgggtgcaaaatcagcaagaaacattgagtatttttttttctttgtatgcctttggccttgcacaacccatttgtgagcaaaagcagaagtggaccaccatcagctcccacccacccagcgatttttccttggaggtcagcccgttacccccataactgatttacctacttaccatactgggaggtagaagagatgcagagaaatgtggaatttgtggacctatgggtaatttatgctttcctcctaaaaaaaaaaaaaaagccctctttccccaccccctcccccatctcccctttttgaatagataatggatccaattatccatataattcaataggtatttattgagaggctcccttctattccccatccctaatccctaacgaacccacgggcacacacttttggaaaccctggtaaagtaacacttagggggaaatggggacaaactggctctctggattagtgcgggtatagacacccccaaataggtgggtaggcccattgattcagctccttgcagctgtctctgttcaaaggaactgtgcagatttagaacgaattggagcttgagcttcacaccaccagcttccagagattaaagtttgtacaaaacattgca

SEQ ID NO: 40888 - DNA, 2652 bp, Homo sapiens
  misc_feature (1)..(3): n is a, c, g, or t
  misc_feature (11)..(11): n is a, c, g, or t
  misc_feature (452)..(453): n is a, c, g, or t
nnngggtcacnttccctgccgccggaaccgctctgtgcgcgctgcccaacgaaggaaggggctgccccacgcagacccggcttctgggggtccctggaaacccaggcggccacggtgtggcgggggagacatggtcacttttcctgcagggtgcgcctgagcagaggggcagcccgttacagtaggcgaggccagggcaaacccggggtcactatcagcgctgcgagactggtattcaaggtcctctcagccgggcctctcacccaccccgctggccgcagccggaggctgccacgcggacaccgtctcaagcctctgagcattgctctgagcctctgcctgcaatgtccttcctctgtcatctctaggcctcggctcagccctggacctagcctttctgccccgccctaccccaagctggcgccaccgcccgtggctgaactccgacctcnnagccgcaggcgccgcggtaccctggctgtggccctcggcgctttcttcctagggtcacaggacccatacgagtgggagctccctgggagcagaactgcgtcttgtatcacctggcgcggtgaacgtgggggttgaaacgctccacgcggaaggtagagggcaggggccaagggggcgatcctggtggctgcgctttttgctatttgctgccgacggcatgcagacgagatgcaaataagcttatgaaactgtccgtcctaccccatcgctccctcctcgccccctacaccgtgttgtgctgcccaccagactcggagaagccgcggctgtccccggaaccctccgagcggcgccctcaggcccccgccaaaaagctccgcaagccgaggaccatctactccagcctgcagctgcagcacctaaaccagcgtttccagcacacgcagtacctggcgctgcccgagagggcccagctggcagcgcagctcggcctcacccagacccaggtggggccagtgtcgtccttccccatctctcaccttccctggttctctgggaactcatcccccagccccagctgtgaatgactgatggattggtgctgtggccctgttgtcacagttctccagggaatgttcatagctggctcttagtaagccttggggggaatgtgttgaaaggtgtgcatgtatgtgcgggtggggtggagtgggtcaggaagaggagggtaggtcagacagggagacatggatactagctcagaggcaggaactcagaaggctcctggggctgtgggggactgaagcaaatgttcccagcctagggaactgctggtctcccaggactgtgcctgcacctggatccctttcccttcctcgaaacttttcacacatatcttcctcctgatctttcattctttccccttttcttcccgaaggtaaagatctggtttcagaacaaacgctccaagtataagaagctcctgaagcagaattctggggggcaggaaggggacttccctgggaggaccttctctgtgtctccctgctccccacccctcccctccctctgggatctacccaaggcagggaccctgcccaccagtggctatggcaacagctttggagcctggtatcagcatcactcctcagatgtcctggcttcgcctcagatgatgtgaatctggggaagggcgggtcaggcccacagccttcctgcaaagcccaggacccaggcagtccacctgcaccccttctgggctgggaggaaaccagctccagatgggttttctctggaggacaagcagttagaggagaaaaaggaatggagcagagcctgtacccctaaccctaacagctaaatcaaggacctcagccttatataatcattgtccccaccactaccatggactggacaccttcactccagctggacaaagactctggagagagagccattggctggagttgagactgtccccagaacccttggtcttgccactcccccactccttcttccctctctccctttctcctctccctgctttcttgaaaaggactgaatcgccactacagcctgggtgcaaaatcagcaagaaacattgagtatttttttttctttgtatgcctttggccttgcacaacccatttgtgagcaaaagcagaagtggaccaccatcagctcccacccacccagcgatttttccttggaggtcagcccgttacccccataactgatttacctacttaccatactgggaggtagaagagatgcagagaaatgtggaatttgtggacctatgggtaatttatgctttcctcctaaaaaaaaaaaaaaagccctctttccccaccccctcccccatctcccctttttgaatagataatggatccaattatccatataattcaataggtatttattgagaggctcccttctattccccatccctaatccctaacgaacccacgggcacacacttttggaaaccctggtaaagtaacacttagggggaaatggggacaaactggctctctggattagtgcgggtatagacacccccaaataggtgggtaggcccattgattcagctccttgcagctgtctctgttcaaaggaactgtgcagatttagaacgaattggagcttgagcttcacaccaccagcttccagagattaaagtttgtacaaaacattgca

SEQ ID NO: 40889 - DNA, 2064 bp, Homo sapiens
  misc_feature (1)..(3): n is a, c, g, or t
  misc_feature (11)..(11): n is a, c, g, or t
  misc_feature (452)..(453): n is a, c, g, or t
nnngggtcacnttccctgccgccggaaccgctctgtgcgcgctgcccaacgaaggaaggggctgccccacgcagacccggcttctgggggtccctggaaacccaggcggccacggtgtggcgggggagacatggtcacttttcctgcagggtgcgcctgagcagaggggcagcccgttacagtaggcgaggccagggcaaacccggggtcactatcagcgctgcgagactggtattcaaggtcctctcagccgggcctctcacccaccccgctggccgcagccggaggctgccacgcggacaccgtctcaagcctctgagcattgctctgagcctctgcctgcaatgtccttcctctgtcatctctaggcctcggctcagccctggacctagcctttctgccccgccctaccccaagctggcgccaccgcccgtggctgaactccgacctcnnagccgcaggcgccgcggtaccctggctgtggccctcggcgctttcttcctagggtcacaggacccatacgagtgggagctccctgggagcagaactgcgtcttgtatcacctggcgcggtgaacgtgggggttgaaacgctccacgcggaagactcggagaagccgcggctgtccccggaaccctccgagcggcgccctcaggcccccgccaaaaagctccgcaagccgaggaccatctactccagcctgcagctgcagcacctaaaccagcgtttccagcacacgcagtacctggcgctgcccgagagggcccagctggcagcgcagctcggcctcacccagacccaggtaaagatctggtttcagaacaaacgctccaagtataagaagctcctgaagcagaattctggggggcaggaaggggacttccctgggaggaccttctctgtgtctccctgctccccacccctcccctccctctgggatctacccaaggcagggaccctgcccaccagtggctatggcaacagctttggagcctggtatcagcatcactcctcagatgtcctggcttcgcctcagatgatgtgaatctggggaagggcgggtcaggcccacagccttcctgcaaagcccaggacccaggcagtccacctgcaccccttctgggctgggaggaaaccagctccagatgggttttctctggaggacaagcagttagaggagaaaaaggaatggagcagagcctgtacccctaaccctaacagctaaatcaaggacctcagccttatataatcattgtccccaccactaccatggactggacaccttcactccagctggacaaagactctggagagagagccattggctggagttgagactgtccccagaacccttggtcttgccactcccccactccttcttccctctctccctttctcctctccctgctttcttgaaaaggactgaatcgccactacagcctgggtgcaaaatcagcaagaaacattgagtatttttttttctttgtatgcctttggccttgcacaacccatttgtgagcaaaagcagaagtggaccaccatcagctcccacccacccagcgatttttccttggaggtcagcccgttacccccataactgatttacctacttaccatactgggaggtagaagagatgcagagaaatgtggaatttgtggacctatgggtaatttatgctttcctcctaaaaaaaaaaaaaaagccctctttccccaccccctcccccatctcccctttttgaatagataatggatccaattatccatataattcaataggtatttattgagaggctcccttctattccccatccctaatccctaacgaacccacgggcacacacttttggaaaccctggtaaagtaacacttagggggaaatggggacaaactggctctctggattagtgcgggtatagacacccccaaataggtgggtaggcccattgattcagctccttgcagctgtctctgttcaaaggaactgtgcagatttagaacgaattggagcttgagcttcacaccaccagcttccagagattaaagtttgtacaaaacattgca

SEQ ID NO: 40890 - DNA, 858 bp, Homo sapiens
tgtgcataatgtacagattaggaaaatgatcttctaattgagaagtatacttcaaagtttggaaataaaatcataaaaatgttttcctaaacatagcctttttcaggagtttttgtggatatggtcaaaggcaatagctctaattatctggggtcctcaggacaggaaatgagctcacactcatgctctcaaactgtgtcacagcatttttggaaatattttcatttctattcaagaggaggaacaaggccccaagtgttcaccctaattgtagaaaataaacataaacatgaaattcacaaaagaacaactataaatggctgcaaatatgtgaaactatgtttaacttcccagggagtcaaaaaatactaattaatacaagaatcatctttggcccaccacattatgattttgtctgaataagcctcttcaatgctggcaaatatgaggtaaaatggctgctccggctgctctttttggctggtcttaaggggcgcaaatagctccaccccatttggaaagcacttggcaatggctgctaagactttagtgtttttcatagcttctaacctgctaagaagtagatacttgttcccattttgctgctgtgcaaacagacttgtagaggtcaagtatctcgtacaaggttacattgatggtgattgatggcgccaagatttgaacttggttgtgagtccaaagtctaggtctcccattctacccatgtgattttacacacatgcctgatataattagctcctcctcctctccagagaagggcagctgacctttgtttccccagttcagaaatcctggtgtgagttatcagctggggttgagggtggatagatttgttcc

SEQ ID NO: 40891 - DNA, 560 bp, Homo sapiens
tgtggttattgttcaatgacatgttgttgttcgaagagtccctaattggtggcagttgaatatattgttgattattagcaatgactaattctgtccaagttttaatattcaagctaaaagtgtcagaagaacatatttaattttcactttgaaaaagaacagggtccccagttttcctaatgactggaagagaaggaagtctccttaaaattttagcatgcaatttctaggcataagattttatatggtacttatagaaatagtttattcctgctgattttagggataattattttctttgcttaagctaaattgttctaggataaaatgaaaatgctggaattttccaaatgttaaagttccatttggaaacgtgtaaatcccaacagtatatataacctaattgtgatagacatgtaagttttatttgttttttaatatctggcccccatcagatgtctgtatgttaaaccccccttctcagttggtggtgaatgatatctggattagattatataatgttatctatttttaaaaattaaagccttatttcagtccta

SEQ ID NO: 40892 - DNA, 404 bp, Homo sapiens
gaacattttgaggaggtgttgggactctaggtggttatgttgatttgtgcctgtgagttctacaggtacagaagaatgttttaggagaaggggataattgggagatggggtaaaaattgggatgtataggctgggcacagtggctcacatctgtaatcccagcactttgggaggccaaggtgggcggatcaccaggtcttgagatcgagaccatcctggctaacactgtgaaaccccgtctctatacaaaaagttagctgggcgtggtggtgggtgcctgtaggaggctcctactcaggagtctgaggcaggagaatggcgtgaacctgggaggtggagcttgcagtgagctgagatcgcgccactgcactgcagcctgtatgacagagcgagactctgtctca

SEQ ID NO: 40893 - DNA, 185 bp, Homo sapiens
ctgtattctctagaagttacatctggaccgtatgtctgctagacggccaaatggccacagtgaatctccttgctttccttcttgcttctgctaattgaacattctctcctgctttctcttttttacctgtgctgcagcctgagactcctcacttctgtcctcagctcttgcttctcatcttatcc

SEQ ID NO: 40894 - DNA, 371 bp, Homo sapiens
tgaaaaaagcaaagcagaaatggaagaataagagaaccagagtataatcaaattgctttaaccacaactgaatttcactcagatcctgtgcacaaacatctgcttacttcatggccaccaaggacatacagaaaatgtaacacagcctttactaaaggccaccattaaaataaaaataatcctgcttaaagccaggagttcaataccagcctgggcataaagcaagaccccgcctctacaaaaaaaaaaaaaaattaattggacatgctggcactcacctgtaatcccccctagaaaggaggctgaggagagaggatcacttaagcctaggagttggaggctgcagtgagctatgatcacaccactgcact

SEQ ID NO: 40895 - DNA, 307 bp, Homo sapiens
acaaaacaaaaatcattcgttggaggattacataacaggatccagagtgtataaaacacaacatccacaatgtccagaacacaattcaaaattacttgacataccccaaaccaaaagccaaacgggaaaatgtgaccctttcttaagggaaaagacaattaacagatgtcaaccctaagataagctagtttgggaaccctcaacgactttaaagaacttgttgtagctatattccacgaggtaaaggtaaaatgcatgggaatactgacagtgacaacctcagcagagacacagaaactatatataa

SEQ ID NO: 40896 - DNA, 347 bp, Homo sapiens
tgcaagaaaaaatcttgcaaaagtgttggagcagtggtgggacagtgatgtggtttgaatctatccctgctcaaacctcatgttcagttgcgatccccaatgctggaggcctgttaggagataaatggatcatgggagcagtttctcatggtttaacaccatcccccttggtacttctgtcatggtagtgagttctcgtgagatctagttgtctaaaagtgtgtagcacctccctgctctcttttcctcctgcttcggccatgtaagatgtcatatttcccctttaccttccgccatgattgtaagtttcctgaggtgtctcgagaagccaagcagatgccaccatc

SEQ ID NO: 40897 - DNA, 196 bp, Homo sapiens
gaaaattatggcttaaggctcagaagttctcagtcaggatatccagcttcctaccacaagcaacacatagaggcatttagaaaatgggcggagtgttttgttttttaaataacttgggctgggaggctggtgctgatgactattagtagcactcccaatcaaggaagaattttttagccccaaatgccagtagtat

SEQ ID NO: 40898 - DNA, 642 bp, Homo sapiens
atgctggccaggctggtctccaactcctgaccttgtgatccgcccacctcagcctcccacagtgttgggattacaggcgtgagcccccgcgcccagccaggactttgtatttttacggtttcctttattgaagggaagaagtgtttgtgaagttgaattattcgatatttagtttggcgttaacttagggtgtggaacaacaataccaaatataatgaattgtggtttttctaaccagtgaattcatagttagaattagatagtatttgaagggtttcagttgtatttttagatggcataaatggcttgattctttaggtatttaattgcatgggattttgaaataagatagtgtaatccagttaacggtttgctttatatcatattccactgtttttaggtttaagaattttgcttgaaatgtcaaacccttaggccttgacttggggtctgttacaaaaatattttgtgggggagaaatcatagcttttgtctttgaggttcatcagttatagttacccctgggggcctgggatgggaaggagacctattttcactgtgcaccctgttggactgttgaaattatttaaccaatatgtgtatatttccatatcaatattttaaaatttttcaaaaaaaaaa

SEQ ID NO: 40899 - DNA, 275 bp, Homo sapiens
tcatgggggctttggttgtccctctcctcttttggctgctgtgttaataacacgctccaagaggacagggtggaagcaggaagaacagctagaagaccactggtgaggtgactgtggcttggagcagggatgtttcagagcaggtgttaagacgcactgggggctggccacagtggctcatgcctgtaatcctagcaccttgggatgtcaaggtgagtgggtcactttgagctcaggagttggagacctaagcaacatggtgaaaccctgtctct

SEQ ID NO: 40900 - DNA, 399 bp, Homo sapiens
aggatgatgctgtagccagaatctaggccattacctctactgaaaattaatccagtcttgtgtagagacagggtctcactgtgtcacccacactggagtgcagtagcatgatcctggttcactgcagccttgaattcctgggctcaagccatcctcctgcctcagcttcccattgggaccacaggtgcatacaactgatccatctacatttctttcccccatagtgtcagggtcttggtatgttgtccaggctggtctcaaactcctggcttcaagcgatcctccttggcctcccgaagtgttgtgattataggtgtaagccaccacacccagtcttaacttaaatctccacttttcagtaacatgaaaatttaaaaatctcaagtagaactggtataa

SEQ ID NO: 40901 - DNA, 978 bp, Homo sapiens
tatatttaatttctcagtaattactggcccaaagtaaaagaaaacaataacccatgttacatgggttactgttattgttttaggcctgatctgtttagaaaggaaagagaaatgaaggaaatagatagagaaggacagcaaacaaacatattatgtgggttactgttattgttttctttttcttttggccagtaattactgtggcaaaaacaagatgtggcaaaaaacacaatcctggcacagaagtttgtttggtgatggccatcaggttatttacttcaaatggttcgggtgaaaagaaagttttgtgtatagaaagagaaaaagcaaacaggtaaaatgttaactcttggcaaatcactgtgctattgttgcaacttttttgaaggcttgaaaattgtcaaagtaagttcttatcttaaaaataaaattttaagatctttcaatttttaaaaaagaagatagattttacttgccaacagagacatctagttctctaggactaactgccaatgatccgtgggctcagggcaggtgctggcctggaaaggcactgcttgtgctgtccctacctaaccatggcatttatgcccaacgaaaacccagctctttccaggaaaagcaggtagaacccatattcaacgctgccagaccttgctgtaaattctggtcagctgggaggaaatgtcctaactcatgtacatttgtcataaaaccaagaagtataatctggtacaaccttccagaacacagattgggagatgaatgcagcgggtgcttggtccccactctgcggctctggggagagttctcccaggacatacccttcccctgacctgggactgagcagctacatttgacacaccttgagaaagtcacctgggcctaaggcttagtaccagcgactcagccttgtggctccaggtgatttagcgtcattcactgcataaaatgatgcattaagaatgacttcaatat

SEQ ID NO: 40902 - DNA, 421 bp, Homo sapiens
gacataaaagcaaaggtccggggcctcattcccagaggccagggtcatttgggcagcaaataacaaatgccaggaatccacacatcaactcgcctgggctggggatgggggtgggggtgggtaggactctgagcacgtttttttaactcaccagaaaactttctagaaaaaaaaaaaaaaagcccaagggcgccacatggctagcctttgcttccaggccaagggtaaaagtctttgctgtacctccaagaggccagcttggacctcacaggataatgaatttgccctttctggcaggaacaggaactcagaaaagaaattggccagaggcctggtggttaggagattgtttctgaaaaaatgcaatcatctaatagagaatctgttgagcttagggtttcttgtgtgggactcagttact

SEQ ID NO: 40903 - DNA, 292 bp, Homo sapiens
aggtattaattttagattttatttaatttagaaaacattttatagttaaaataagggctgccaatttaacacactaatgtcagggtctaagtggtaaaacttgaacctaaaataagaatttttatactacctatgataaatatataatataagaagataacttatataaacaaaagttcaaaggggatccacaagttattagtaatggttatgtctagagagtggaattatggacatttattttcttttttccttattttctataattttttacattatgtattacatactt

SEQ ID NO: 40904 - DNA, 1964 bp, Homo sapiens
tcgaacgtggattactaaagctctattaagagtgtggagatccctccaagtttcccaaatgagaactcacaggaaaacaggactgaactttgagaatgttgtttatcgcagctttgcacataaacctgagtgtctcccagcctgcctcggttctcaccagcctgccagccttttcaccagcctctctccttagccttatggcctttcacggctcttctccctgccccagctctgctgcccgcccttcctcacgtcccctgtgagctgcctgagccattggttggatttcgatgtggctcattgcagcatgtggggcagcgcctcccatggcctcgccttggtgccggtgaaccccttttggttgcacacatgctccccacacacacatagacatcagccttcctgtaactgactggggacccagagtggaaacaccaggatggatcagcttgtctgcagaattgcccatcaggaagaccaaaagccagtagctttgctgatctgcccccaggactctggaggcgcccctgcactcccacctcccacctgccagttcccagacccacccattcgggatcacctggaccagttaccccaagtcctgcatctcccttccctgcaggctgaacaccagggtcatgccagtcccgccagccgcctcctccatgccccagtgactggtgtgggcagagcaggcagccagtggagctgtgggccagttccgctcttggatgctgctgctctcacccatgaggtcaggggggccctccaaggttatctccaggtgaggggattcacatcaggccacaagccaccagaggccttctgccacctcccagagcgacagccagggaggctgcgtactcagcctcggggagaaatccccgtgggacctgagccccaagacctacggaccactcagccttaccatcgtaccgtccaggattgtccttgccatctttgttgtctcagccagaccttggttttcagtaaagccccagtttctacttcctgcatgccactgtgcaaggccactcatcactgttcctgcagaagcctctggacgtggggctggatggggttgaaaatgttacatgtaaatattggtttggttcggtttttagcattttacttggtaactggttgttttcttttttggggtggggggattggtttgtaaaaattctctactcttttggaatgtgatttctaagtttgttggtttcttcaaatgccttttaagtcttggtaacattcccaaagcagaaaactgcctgacccacagtggggattccctggagaattggggtcccaagaaggaatgctgcccttctcgaacccgttctcccccttcctcctgcctctctgccttttactgctattcccttcttctcctcctttatccttctttctgttttccccatctccactctctcttcaaccaaagtcccaaggaaccctcggggctcaatcccccatagaccacttggcttgggtccatggggttggcatcagttggttggcggaaatgggggaccagttggcatgatggccctaaactgggaaacctcatgtttcttatgtctcacctctttccagagccaaatcagccccttttggaatgatgacttcattggaatgcaaatcaagtcattttggtgcatcagtggctcttaggcctgcacacacgagacatcagaatccaatcctctgaccctgtgccagccctttcccccagtttatttcccaccaaaggctgacctctaagaggtcttgctttctatgaactcaagatgggtcccacctctaggtgtccccaggtgcactcttctaccggttggcttccgatgtgacaaggccaagggcccaaagacttgaccctcttacacccttgctgacatggttccatcatgtccacccgcatgcacttttatggtttcatcacccagcctcttctcctctgg

SEQ ID NO: 40905 - DNA, 574 bp, Homo sapiens
  misc_feature (569)..(573): n is a, c, g, or t
aagagccacgctgtcttgcctgaaaatgataatgtgtgtccatttggtgtgttgatttgtatagaatcatttttcaaatggctacctttgtcaatcatcagatatttatagcctacctcctatttgcggtataccatacaagattaataatagacttgaggatgaatgaggtacatgccaccattgactcctggcttctgcgtcctgcttaacattaggatagcacaggagtttaaataaacagccacccctctgtcgcatacgccctggctcacactcttctcctgccatgctttctcacaggctgtgttgtgacagggcatccaccactctacctttaatctgacctaatgttgcttatcttccaagattttgctgtattgtctgtttttccaggaatactctgcaacatacttccatcacctagttttatgatgatctattttctatgttcccctgctccctaaaacttcagtctccttgagagtggaaactaagtcttattttcattacatctctagttcttaacagtttttcaaaagatgattaaacagtgactgtagtaaaannnnna

SEQ ID NO: 40906 - DNA, 600 bp, Homo sapiens
  misc_feature (2)..(2): n is a, c, g, or t
  misc_feature (7)..(7): n is a, c, g, or t
  misc_feature (24)..(24): n is a, c, g, or t
anctttnccctgtggttgtaaatnggctcttttcttctactgtattttctaattgttcgttcatatatgggacagggttttaaaattttagtctatagcaggtcctcgaaagacgtttcattcaactttgttttgttataatgttgatgagaagaaaaaacaaaaagtctcagctgaggtcactgtctgtgtgaagctggctcattctcccatctttatgggtcttctccaagtactccagtttcctcccatatcccaaagatgcacatgaatggatgtgtctacgcggcccagtctgtgagcgtgggtgtaggtgagagcaccctgtgctgggatggcgtccagttcagggctggttcccaacttggactctgaattgccaagaaaggctccagccattgagaccctgaactggaagagggaggcaaataattatctttttattaatctttcttaaatgtatacacagctcacattcattcaatttttttttgagacagggtcttgctctgtcaccgaggctggagtgcagtggtgtgatcacagctcactgcaacctccacctcggtgacagagcaagaccctgtctcaaaaaaaaaa

SEQ ID NO: 40907 - DNA, 396 bp, Homo sapiens
tgtctcataaactaaggagagatagctatgggaacatagtcatgaagataattatcgatttcagtgtctttaccctggcctcctaaaatcacttgttccaagctctggtttttttgttttgttttttgtttttgtaagagccctcaggttagtgattctctctgtccctcctctgagttgaatagcattatctcagcacttctgggagagttgttaaggagacttccccctccttctgggtgcccctagggaaatctgattaaaagatttttgtttatctagaaaagtgggtgatattttaaagctttgccttgtctgtttatgatcacaagctaatacttctgaggatgataagggggacaaacaagatgaagaataaaggaaaggaaacacttt

SEQ ID NO: 40908 - DNA, 1736 bp, Homo sapiens
tcttaattttacaagcgaggaaatgagagtgtttcttgtaggggtgtagtgagaatttaataaaacagtttaaggaaagaaaacaaaaggtagtattgctgcactttctagatggtaaaaagcaaaccaccatgtctgtttaatatatatcacctgctggtccctcggtctagcaggctgaactgtgtgcctgggaattttcttctcgctgtgtgcacccctttacgtcacagggtggactctcttcagagtcctagtggagcagctggccaggctgacatgatctgacaacattgtaggttaccactaccatctctcaccgtctcactttcttcgggtctcctgctgccagctaagtgtgggagaacttgtgcacgtatctcccctccgaatcccaacgatgggtaacgccagctttggctccaaggaacagaagctgctgaagcggttgcggcttctgcccgccctgcttatcctccgcgccttcaagccccacaggaagatcagagattaccgcgtcgtggtagtcggcaccgctggtgtggggaaaagtacgctgctgcacaagtgggcgagcggcaacttccgtcatgagtacctgccgaccattgaaaatacctactgccagttgctgggctgcagccacggtgtgctttccctgcacatcaccgacagcaagagtggcgacggcaaccgcgctctgcagcgccacgttatagcccggggccacgccttcgtcctggtctactcagtcaccaagaaggaaaccctggaagagctgaaggccttctatgagctgatctgcaagatcaaaggtaacaacctgcataagttccccatcgtgctggtgggcaataaaagtgatgacacccaccgggaggtggccctgaatgatggtgccacctgtgcgatggagtggaattgcgccttcatggagatttcagccaagaccgatgtgaatgtgcaggagctgttccacatgctgctgaattacaagaaaaagcccaccaccggcctccaggagcccgagaagaaatcccagatgcccaacaccactgagaagctgcttgacaagtgcataatcatgtgagccctgggccttaagagccagctcttcctatcctgtagcgtgtagaaaacgtggactcatttcactatgttacatgtacatggttgattttgtgctgttgtttggactgtaacatccatgttgtcaatacgtataccttgtaagtggataacttttctttttcccaggccagagaattcaaattgttaaaacattggcatttgaagaggagaacaaaatgtagcatgatgtatttaaagtaaggcctttagtaatgaatgtaatgagagaaaatgttttgaaaagaacaaaacatcaaaatgaatagaaagaaaaattggaaggcgtccttttggtaacccgattattgtgtattacctttaaatatttcacatcctgtaagtgcttaatcatatcttttaattgtgtatttaagaaaagtgttttcacaacaaaagcttttgataaattgctgcgtgacatatactaaataaaaaaatgaatatgttgatcattaggggtgtgggagcagagaaaattgtgaaagtgactctcactaaagatgttagtagtttctcatgtcatttaaaaatgtttgagtattctgcatagcagtttgtaaaagtgtaacagcttattgacttaataaagcttttcctgcatgcaa

SEQ ID NO: 40909 - DNA, 1804 bp, Homo sapiens
tcttaattttacaagcgaggaaatgagagtgtttcttgtaggggtgtagtgagaatttaataaaacagtttaaggaaagaaaacaaaaggtagtattgctgcactttctagatggtaaaaagcaaaccaccatgtctgtttaatatatatcacctgctggtccctcggtctagcaggctgaactgtgtgcctgggaattttcttctcgctgtgtgcacccctttacgtcacagggtggactctcttcagagtcctagtggagcagctggccaggctgacatgatctgacaacattgtaggttaccactaccatctctcaccgtctcactttcttcgggtctcctgctgccagctaagtgtgggagaacttgtgcacgtatctcccctccgaatcccaacgatgggtaacgccagctttggctccaaggaacagaagctgctgaagcggttgcggcttctgcccgccctgcttatcctccgcgccttcaagccccacaggaagatcagagattaccgcgtcgtggtagtcggcaccgctggtgtggggaaaagtacgctgctgcacaagtgggcgagcggcaacttccgtcatgagtacctgccgaccattgaaaatacctactgccagttgctgggctgcagccacggtgtgctttccctgcacatcaccgacagcaagagtggcgacggcaaccgcgctctgcagcgccacgttatagcccggggccacgccttcgtcctggtctactcagtcaccaagaaggaaaccctggaagagctgaaggccttctatgagctgatctgcaagatcaaaggtaacaacctgcataagttccccatcgtgctggtgggcaataaaagtgatgacacccaccgggaggtggccctgaatgatggtgccacctgtgcgatggagtggaattgcgccttcatggagatttcagccaagaccgatgtgaatgtgcaggagctgttccacatgctgctgaattacaagaaaaagcccaccaccggcctccaggagcccgagaagaaatcccagatgcccaacaccactgagaagctgcttgacaagtgcataatcatgtgagccctgggccttaagagccagctcttcctatcctgtagcgtgtagaaaacgtggactcatttcactatgttacatgtacatggttgattttgtgctgttgtttggactgtaacatccatgttgtcaatacgtataccttgtaagtggataacttttctttttcccaggccagagaattcaaattgttaaaacattggcatttgaagaggagaacaaaatgtagcatgatgtatttaaagtaaggcctttagtaatgaatgtaatgagagaaaatgttttgaaaagaacaaaacatcaaaatgaatagaaagaaaaattggaaggcgtccttttggtaacccgattattgtgtattacctttaaatatttcacatcctgtaagtgcttaatcatatcttttaattgtgtatttaagaaaagtgttttcacaacaaaagcttttgataaattgctgcgtgacatatactaaataaaaaaatgaatatgttgatcattaggggtgtgggagcagagaaaattgtgaaagtgactctcactaaagatgttagtagtttctcatgtcatttaaaaatgtttgagtattctgcatagcagtttgtaaaagtgtaacagcttattgacttaataaagcttttcctgcatgcaatcagctgtaagaatttgtctcaccagaaaacaaaacattgcccattgtattaaaatttaaaccatatc

SEQ ID NO: 40910 - DNA, 958 bp, Homo sapiens
tcttaattttacaagcgaggaaatgagagtgtttcttgtaggggtgtagtgagaatttaataaaacagtttaaggaaagaaaacaaaaggtagtattgctgcactttctagatggtaaaaagcaaaccaccatgtctgtttaatatatatcacctgctggtccctcggtctagcaggctgaactgtgtgcctgggaattttcttctcgctgtgtgcacccctttacgtcacagggtggactctcttcagagtcctagtggagcagctggccaggctgacatgatctgacaacattgtaggttaccactaccatctctcaccgtctcactttcttccttcctatcctgtagcgtgtagaaaacgtggactcatttcactatgttacatgtacatggttgattttgtgctgttgtttggactgtaacatccatgttgtcaatacgtataccttgtaagtggataacttttctttttcccaggccagagaattcaaattgttaaaacattggcatttgaagaggagaacaaaatgtagcatgatgtatttaaagtaaggcctttagtaatgaatgtaatgagagaaaatgttttgaaaagaacaaaacatcaaaatgaatagaaagaaaaattggaaggcgtccttttggtaacccgattattgtgtattacctttaaatatttcacatcctgtaagtgcttaatcatatcttttaattgtgtatttaagaaaagtgttttcacaacaaaagcttttgataaattgctgcgtgacatatactaaataaaaaaatgaatatgttgatcattaggggtgtgggagcagagaaaattgtgaaagtgactctcactaaagatgttagtagtttctcatgtcatttaaaaatgtttgagtattctgcatagcagtttgtaaaagtgtaacagcttattgacttaataaagcttttcctgcatgcaa

SEQ ID NO: 40911 - DNA, 1634 bp, Homo sapiens
ggggctctgcgttgggccagcccctcacagctggtttcttaccacgtattgcgcaagcggaatctatgcctgttacccacactccctgcgcccccgcaccccgctcctgtgcgcaagtcggaatataaaaccgcggaggagtgagctcttggggtgtccagttggttgccgcggcagtctctccgagcagcgcatttgtcttctaggctgcttggttcgtgcctccgagaaaggggtctcctgctgccagctaagtgtgggagaacttgtgcacgtatctcccctccgaatcccaacgatgggtaacgccagctttggctccaaggaacagaagctgctgaagcggttgcggcttctgcccgccctgcttatcctccgcgccttcaagccccacaggaagatcagagattaccgcgtcgtggtagtcggcaccgctggtgtggggaaaagtacgctgctgcacaagtgggcgagcggcaacttccgtcatgagtacctgccgaccattgaaaatacctactgccagttgctgggctgcagccacggtgtgctttccctgcacatcaccgacagcaagagtggcgacggcaaccgcgctctgcagcgccacgttatagcccggggccacgccttcgtcctggtctactcagtcaccaagaaggaaaccctggaagagctgaaggccttctatgagctgatctgcaagatcaaaggtaacaacctgcataagttccccatcgtgctggtgggcaataaaagtgatgacacccaccgggaggtggccctgaatgatggtgccacctgtgcgatggagtggaattgcgccttcatggagatttcagccaagaccgatgtgaatgtgcaggagctgttccacatgctgctgaattacaagaaaaagcccaccaccggcctccaggagcccgagaagaaatcccagatgcccaacaccactgagaagctgcttgacaagtgcataatcatgtgagccctgggccttaagagccagctcttcctatcctgtagcgtgtagaaaacgtggactcatttcactatgttacatgtacatggttgattttgtgctgttgtttggactgtaacatccatgttgtcaatacgtataccttgtaagtggataacttttctttttcccaggccagagaattcaaattgttaaaacattggcatttgaagaggagaacaaaatgtagcatgatgtatttaaagtaaggcctttagtaatgaatgtaatgagagaaaatgttttgaaaagaacaaaacatcaaaatgaatagaaagaaaaattggaaggcgtccttttggtaacccgattattgtgtattacctttaaatatttcacatcctgtaagtgcttaatcatatcttttaattgtgtatttaagaaaagtgttttcacaacaaaagcttttgataaattgctgcgtgacatatactaaataaaaaaatgaatatgttgatcattaggggtgtgggagcagagaaaattgtgaaagtgactctcactaaagatgttagtagtttctcatgtcatttaaaaatgtttgagtattctgcatagcagtttgtaaaagtgtaacagcttattgacttaataaagcttttcctgcatgcaa

SEQ ID NO: 40912 - DNA, 282 bp, Homo sapiens
cacaaataagtagcatgaaaagtggagagggggatataaattaaaagagatttaagaaatacatcagccaagctcagtggctcgtgcctgtaatctcagcactttggggggccaaggcaggtggatggcttgaattcagaagttcaagatcagcctgggcaacacaggcaaaccctgtctctataaaaaaatatgaaaattagctgggcatgatggcatgtgcctgtagtcccagctactcaggaagctgaggtgggagaatcgcttgagcccaggaggtaa

SEQ ID NO: 40913 - DNA, 501 bp, Homo sapiens
attgaaatagcaatttgtttaccaaaaagtgtgatatacaatcagcaggaatcatagcactgatactcacattttacatcataaatgttttaaaaatgacattctcaaatatttttattgttgaaaatcagacatggcaagaatcttaattatggctaatctggacaagacatttaaatgatcatgaattatgatggggcaaacgcttctaattcatgctagcgatgtcagtattcctcagtctcttaaaataagttatttcatgtgattaatagatgagaaaagaatattacattttctttttatgcattaagagtttggggcaaagccaggcacggtgacccatacctataatcccagcactttgggaggtcaaggcaggaggatcatttaaggctaggagtttgaaaccagcctaggcaatatgacaaaaccttgtctctgcaaaaatacaaaaagtagccaggcgtagtgtgcctgtggtcccagctattcgggggt

SEQ ID NO: 40914 - DNA, 1750 bp, Homo sapiens
gcattttatcctttaaccacaaaatgtgtttaaaagctatgcaagaattagcaaaagtaaactacagcaatattaaaatgacttatttggtatcacctttacagacccagctcacttaggcaatggtattctagtaaattacaatattttttaaagcatagttttttttgttacctcttgaaatagtgattttaaagccaaaagggtcaagagtatgccaaatttaagatgattatttggaaaagagagatatcagcaacttaagtatgctgtatttaaggtgattgtaaaagagtttttttatatacaggacagcattaaaacagaattacaaagtctattaaccataatgatggagttcaagatgcagataaaattaaatgattgtctttaagctttcaataaatttgttagccaatttaagaataattgcagcttatgaaagcttgtttatatttatctaatttcaaaaattaagaaagaattaaaggatatttgaagttcttattatgtagtttctaacattgtgagagaatggtcaaaagactgctatgtcttatttagtgtaaatgtgtacatactttacagttaaaggaattactgctttgctaccatcaaggtcttaaaaccctgtatcaaaacaacctagagatttgcttcattaactcctgttcatttcgcagggcaagaaataagatcctctttggcaatcacgtgttacctgaattatatttaatctctttattaccttggaaatataccaagacactcacatattcacatacacacagcacacacacatacaaccctgatgcaaatatggacaaaatgaacaccctcacttatacatcagtccatttcttcctctcataaattgaatgtgaatagctctgatggcatttctctctgactgaaaaataaggtgccatgcttactccatgcaaagcccctgttttacagttttatgcccctcactaaaaatagataaatctgcatttgtatgtgtcctctactcagcctccctcatgccgcctgacttcttgcagaaggtgtatatgcttttcattctgaccaataagaggcaacttggtgagttatagagattgactgggtgcttgacatgtggtgctgctccattaaaacagtgggcagttggtactggggaggtttaggagaatttaagttgtctttattgttattagatgtgctcttagatgtggtaatattctaatattctattaaaaaatataaaaatgcaacttcagttcacattataataggttttctcatattgcttttgtggtccagatgtgaaacataacaataataatatgtaattctataatcatcttctaatgttaccaggtaatttttgtagacagagccagataaccctattgctcattatttaagtgcaaagtacattttttcaatcattattgcctaagaaatttttaggagatgatggttgaatggtccttctcctcacctcaccacaccaagataggttggtatgtgtgtttgtgtttccttgctttcactttttaaaggatcctatagaaaataacagtattgtttccatttaaaaaaaaaacttgataatttatattccattttatttctgaaaaatagccacatttttacataccccaaataaatcgccatgtgtaactatgtgcaaaaaataattgaatgtggctgaaaacgatctcacttgttgtactataatgtatgaataataataaatgta

SEQ ID NO: 40915 - DNA, 858 bp, Homo sapiens
  misc_feature (847)..(847): n is a, c, g, or t
  misc_feature (854)..(854): n is a, c, g, or t
cactgaaatagcaagaataaagttcttttctggccaggcatggtggcttaggcctataatcccaacactttcggaggctgaggcaggagaatcgcttgagcccaggagttcaagccagcctggacaacatagtgagaccctgtctcaacaaaaaataaaatattggctgagcagagtagcgtgcacctatagtcccagctactttggaggctgaggtgggaggattgcttgagcccgggaggtggagactgcagtgagccgtgatcacgccactgtactccagccttggtgacagagtgagaccctgaaaataaagggtttttttcttcaaacattttgatctgagccaaagcaaagagtacattagaacagaccagaaagacgtgtacaagtagacctgtttccttctcaaacatttaacaatttacttattaaacattaagctgagtcagtttaaatcaaatgatataactgattattactccaaacaggaatctgttgtttcttagtgtctgtaggtagaagtttcacagatgcaaggacattatttacctgaaggatcattcctgttacaattagagggcattcatacaaacattgtttcctgttttatttgccttttaaaatcgtgaaacatgacatgaagacatttccttatgtaattacaaaacgattagtacacctaacacaattcacaatcattccttactgtcatcatagtcaaatgaatgtcattatattcagatgttcccaatttaactaaaaacatatttgaaaaattatttacaaataaaaaacatttttttaaaatgcagggtcttgttccagcctgggagacagaagcganctcctantcaa

SEQ ID NO: 40916 - DNA, 838 bp, Homo sapiens
  misc_feature (837)..(838): n is a, c, g, or t
ggaaaggaaactatgctgtatgccaagcccccacccacaattaatggtataaaaggactgcagaggaaggagagactcaaacctgcccacatccacctccagcagcttacctgcttttccattacctgttccagcaccatgtcttacagttgttgcctgcccagcctgggctgccgcaccagctgctcctcccggccctgcgtgccccccagctgccacggctacaccctgcctggggcctgcaacatccccgccaatgtgagcaactgcaactggttctgtgagggctccttcaatggcagcgagaaggagactatgcagttcctgaacgaccgcctggccagctacctggagaaggtgcgtcagctggagcgggacaacgcggagctggagaaactcatccaggagcggtcccagcagcaggagcccttgctgtgccccagctaccagtcctacttcaagaccattgaggagctccagcagaagattctgtgtgccaaggctgagaatgccaggctggtggtgaacattgacaatgccaagctggcctctgacgacttcagaagcaagtaccagacggagcagtccctgaggctgttggtggagtcggacatcaacagcatacgcaggatcctggatgagctgaccctctgcaagtctgacctggagtcccaggtggactccctgtaatctgagctccagttactacttaaggtgtttcctgaacgtactactgcatttcctgttttccttttttctttggcattctctggaatgcaaggaggagacttcatttacttcccaataaacttcatttctctggcataaaaaaaaaann

SEQ ID NO: 40917 - DNA, 1723 bp, Homo sapiens
  misc_feature (1722)..(1723): n is a, c, g, or t
ggaaaggaaactatgctgtatgccaagcccccacccacaattaatggtataaaaggactgcagaggaaggagagactcaaacctgcccacatccacctccagcagcttacctgcttttccattacctgttccagcaccatgtcttacagttgttgcctgcccagcctgggctgccgcaccagctgctcctcccggccctgcgtgccccccagctgccacggctacaccctgcctggggcctgcaacatccccgccaatgtgagcaactgcaactggttctgtgagggctccttcaatggcagcgagaaggagactatgcagttcctgaacgaccgcctggccagctacctggagaaggtgcgtcagctggagcgggacaacgcggagctggagaaactcatccaggagcggtcccagcagcaggagcccttgctgtgccccagctaccagtcctacttcaagaccattgaggagctccagcagaagattctgtgtgccaaggctgagaatgccaggctggtggtgaacattgacaatgccaagctggcctctgacgacttcagaagcaagtaccagacggagcagtccctgaggctgttggtggagtcggacatcaacagcatacgcaggatcctggatgagctgaccctctgcaagtctgacctggagtcccaggtggagtccctgagggaggagctgatctgcttgaagaagaaccatgaggaggaggttaacaccctgcgctcccagcttggagaccgcctcaacgtggaggtggacactgcccccactgtggacctgaaccaggtcctgaacgagaccaggagtcagtatgaggctctggtggaaattaaccgcagggaagtggagcaatggttcgccacgcagaccgaggagctgaacaagcaggtggtatccagctcagagcagctgcagtcctgccaggcggagatcatcgagctgagacgcacagtcaacgccctggagatcgagctgcaggcccagcacaacctgcgagactctctggaaaacacgctgacggagagcgaggcccactacagctcccagctgtcccaggtgcagagcctgatcaccaacgtggagtctcagctggcagagatccgctgtgacctggagcggcagaaccaggagtaccaggtgctgctggacgtgcgtgcccggctggagtgtgagatcaacacgtaccggagcctcctggagagtgaggactgcaagctcccctgcaacccatgcgccaccaccaatgctagtggcaactcctgtggaccctgtggcacctctcaaaagggttgctgtaattgaaaagcttgtatcctctttgaagacatctacaaagccatttagatcaaccacaggaaggatcctcaagtcctgacttttctggagctcagctgacatcaagaaacctcatcttgcctctatgttatttctagaatgctgaaaagctttcctgacccaagcaaagacacacatcatcaacttccaatgtctggacaactccttcctgttgagggtcgagcctgtttgtttctaaagatgttcagctccctgtaatctgagctccagttactacttaaggtgtttcctgaacgtactactgcatttcctgttttccttttttctttggcattctctggaatgcaaggaggagacttcatttacttcccaataaacttcatttctctggcataaaaaaaaaann

SEQ ID NO: 40918 - DNA, 564 bp, Homo sapiens
tgctgggattacagacgtgagccaccgcacccagcctattttttttttaaggttaacttaaaaaactaatctccatgttctacctaggaaaaggttaaacaagaggcagaaataaagcagaaaaagatctaacattcgagtttaaaaaattctaatataaagcaaaataaaataagtcagatcacaaaaaaagatgtatacagaaacatgaactgtaagaaacttaatggcaattcggtgctggtttacaaatacagtaatgttagaattttaaaactaagttagatgacttcaattttaagctttttgatatggggatttgtgtactttggacttcaactatgaactaaagcaatttaaaaagaaaaacttaaagtaactttaaaggaaaaagtaatctctagcacttcaaatctgtgctattatctggactttgatttcctttaattcatatagactgttaaactaaatatgcaatacaattctgaaaaatgttcataataacagtatctaaaatccaagaacagttgaaagaatagttcaactgccccacaaccaagaagg

SEQ ID NO: 40919 - DNA, 278 bp, Homo sapiens
ctcagcctcccaagtagctgggattagaggtgcctaccaccatacccacttaattttttgtatttttagtagagactgggtttcaccatgttggtcccgaactcctgacctcaaagatttagctttgctagatgtcaccttttgtgagcattttaaatggtgtttctaatgcctggtgaacattgcataacagtcaagccagcagttaagtagcatctccatcttttaaaattaagattggattctggacctaagtatttcagtttcatcttctcaaa

SEQ ID NO: 40920 - DNA, 428 bp, Homo sapiens
ctcactaaaaataaaaaaaaattagccaggcgtggtggcacgtacctgtagtcccagctacttgggatgctgaggtgggaggattgcttgagcctgggagatcgaggctgcagtgagctatgatcacaccattggactccagcctggatgacagatggagaccctgtctcaaaaagaaaaagaagaaacgtggctttcagagtatgctttccacaagcccactaggggttgctctctgcccacacagagccaattctgagtggcgaggcctcccacctagaagtcttctttagcacaggttccacagctaaaataagtccagagcataatttaactctggtaggaaaccaccccagggtattcactgaccatcagccggttctttttccatctaggaataggcataaggatcaaacacacaaggtcga

SEQ ID NO: 40921 - DNA, 346 bp, Homo sapiens
gtgcctcagcctcccgagtagctgagattacaggcgcacgccactacacctggctaatttttgtatttttagtagagatggggttttgccatgttggccaggctggtctcaaactcctgacctcaggtgatccgcccgcctcagcctcccaaaatgctgggattacaggcgttagtgactgcacttggcacccaggaagatttaagcaaatcagtgttggtcttaaggaaagggaaagtttaacatagactggtgcaattcatcagtgtgaaagatgattccagctattcctcaaaaggaataaggaacagaaaagtgtgaggttggggatggagttctcatgcat

SEQ ID NO: 40922 - DNA, 393 bp, Homo sapiens
ggtggcccttaatcgccccgatgtacactgtcacccagtggttccagaggccaaacagtgggcgggggccacagcctcctcctcaactcagaggggagataggaacacatcatgccagctactccctgagcctgcagttggctcaaaacaacccactaaggcaagtgctggcatcccattttctgtaatgagccactgaggcgcagagaggccaagttcttggcccagagccacacagcaaggatacaagagccaagatctgaacctgaccctgtccatctgcccttctccagcgtccacccttcgcccctggaccctgaccctgaacctccaagcccacagccctgaccccacaatggtctcatctcaataccagcctcgaaaacaaaaaaa

SEQ ID NO: 40923 - DNA, 437 bp, Homo sapiens
cacttaatttttattttttttctgtatttcaatggatgcagttaaaaaaatgttttttttaaagagttatggtcttgttatgatgcccaagctggagtacagtggttatgcacaggtgcagtcccactactcatcaggacaggagttttgacttgctctgtttccaggctggtctggttcacctctccttaggcaaccttgtggtccctcacgtttatgccgaacttagtgcagatacccaattgacttagtgcactatagcccagcatttctggactcaggcgatccttctgcctcagcctcccaagtagttgggatcacgggcatgtgctctgcgcctggcaggagtttttaatatggtctttaagacactgaataatttggcttctcacattcatctagaaacaataacaataatagcaaccccccaaaaagga

SEQ ID NO: 40924 - DNA, 382 bp, Homo sapiens
cagcgccagagggatggggctgcactggagattcacaacaagggcaggaggcgagggggcccagttgcctcagaggcgcgcatccatggggtttaaagcagcgcactgaggattgagatttaatcttctatttgggaaaccaaatcccgtctttgtattctacaaacaagaaagcaggacgttccgtttttgtttgatagaaaggacggtgggtttaacagggccaagaatcacaaggctgcatgcttgcccttgaaggtccaataggacaggctagctggcttgtccccagcaggcagagggactccatggacgtttccagcctgaaggtggctcccagtcgtgtgcgatggggactttccatagttttgacacattccct

SEQ ID NO: 40925 - DNA, 393 bp, Homo sapiens
attagtgttacacagttattgtgattgtgtgctaaaaattataaacattcatctgcaaaacagaatgaaatgtccagtacagagcttggttcaaaatcaatgctcagtgaacatcatttcccctcctctcccacttatggctcaggctattactgtcattgtagactagcattaaaaacagtgctatattagtgctatatgaggaggtgcaaaagaaggatattggtctaaatttatactgagctaccttacacatcactgtcagattaatctgtgtaaaatatagctattttgtttctctacttacagctttcaaaggcttcctactatctgcaaaatagaacacaattccttggcctacttctccagtagtatcaaattacttttcccaaa

SEQ ID NO: 40926 - DNA, 171 bp, Homo sapiens
atgttaagagcacacaatggaaaaaggatcgtctcttcaataaatggtcttgagaaaactggatatcaatatgcagaagaatgaaattggacccctatgacatacgatatgcaaaaataactcagaatggataaggcttaaagataagacctgaattgtaaaattgctcga

SEQ ID NO: 40927 - DNA, 100 bp, Homo sapiens
cagtgtgagtctcgtggcccactcatcgggcgcagtgccctgggatgctccttgtcaccatgcacagtgggacatgtgagaaaccccaactctgcatcct

SEQ ID NO: 40928 - DNA, 2216 bp, Homo sapiens
  misc_feature (2050)..(2050): n is a, c, g, or t
gaatggggtaacctggctaaatgagaattaatgaacccacactcataagttttcattgacttagcaccaagtcgtccatcaaatatcatcagatctgagaatgctcttatggatatctgatttttagaggctggcattcatatttttaaaaactgccacctgtgaccacactgcaggccaaacagaatgtacctgctggtcagatgcagcccagaggtcactgaattgcaacctctggactctcggtcagaggcaagcagcccttattccagaactccacagtcccttcacacccttccccagacctacaccaagaccaactaagtggtcaaaaggtggacaaactgagagttgtatcaaggcccttagcctctcaatttgttatcaagtttccctttctgaatctatttaccctgaagtataaatacccaagatgagccttaagagtgcctggtagagcaaacaaagatgcatcttatagggagcaaagtctatgctaacgcagtgtttctcaatcctggctgcacctttgaaccacgggagctttaaaagtgaccactgcaagggccctacccactatggatcccaatttcattggttgggagaggggccaagtttgtttccaacttccccagatgactctaatggctgagagttgcaatcaacaggtaagtgaatatccaggctgtaagatgaagaaagagggggttgtgcccaagcccactgtgcctcataaagcagatgatctctgcagcgctgcgcttctcaaagagtggtcccaggactgcctcagtcagaccacagactcctaagttcctcctcagacttcatggatccaagctctgtgaggtaattctaagcacattaaacttgtagaacagccatctggatttaatattacataatagctataatattctgctattctctaatcttcaatgtcagtttcttaaactgtcaggcctgtctttagatgcccttcaactgtgctggggactatcttgatggcagccagcaaagaaaatcagcaaaaaccccagtggagtttctgggttttacttttgttaaggaaggtgatggtttcttgacatgacaggtatctaggtggaaagggcaaagtgctaatgcaaacacaatggagacactatggaatagctctgcctagggacatgtggaagagcttctaggagacagtgtggacctttccatccctagaggtcttcacaagataaattcctacctccgtcagtattcaaaaggttttagcatcaatactgtctgagaataagacattagacttgagtcagtcccctggcttcaatcccaggatgccaagcagcctctaatggagaccgctggcttaatcgtgctcctttcctggcataacaactcactgcacccatgcctcaccaccacgaagcagtctcctcaccacccaaatgtgccttgggtgacttaaatacagccattagtatgaatggtcccctgtttttattcaacaccacaccagtctttgcttttaccttcggctaatgtggttccagccttttatcctgcactccttcttataatttaaaaaaaaaaaaaactcccctactatctttatgttaatattaacatcaactaggttcttctcaaaggacagccaggcctaactggccacgttaaaatctgcacagtgcttttgtgtcactgtctattctattagtttcaacatcatgctaaaataggacagcatgttccaaaactgaaactgaaacaggaacggagccttgctgatttagcatgaggagggaattgtaagccttgcacctggacactaaaacttttcaataagatgtatgctaagccgtacctagcaaacttaccaggtccaaagtagagtacaagcagaaagttatttttaaaggatgggcactatccttgagggacttaccctttctaatcagctttgcatggtttgttttgagacagtgtctcactctgttgcccaggctagagtgcagcggcaccatcacagctcacggcagcctctgcctcccgggctcangcaatcccacctcagtttcccaagtagctgggactacaggcacacaccacactcagctaattttagtattttttgtagagacagggtctcgccatgttgcccaggctggtctcaaactcctggattatctccctggccctgcattaaaaaagatgtgcaacaactt

SEQ ID NO: 40929 - DNA, 2162 bp, Homo sapiens
  misc_feature (1996)..(1996): n is a, c, g, or t
gaatggggtaacctggctaaatgagaattaatgaacccacactcataagttttcattgacttagcaccaagtcgtccatcaaatatcatcagatctgagaatgctcttatggatatctgatttttagaggctggcattcatatttttaaaaactgccacctgtgaccacactgcaggccaaacagaatgtacctgctggtcagatgcagcccagaggtcactgaattgcaacctctggactctcggtcagaggcaagcagcccttattccagaactccacagtcccttcacacccttccccagacctacaccaagaccaactaagtggtcaaaaggtggacaaactgagagttgtatcaaggcccttagcctctcaatttgttatcaagtttccctttctgaatctatttaccctgaagtataaatacccaagatgagccttaagagtgcctggtagagcaaacaaagatgcatcttatagggagcaaagtctatgctaacgcagtgtttctcaatcctggctgcacctttgaaccacgggagctttaaaagtgaccactgcaagggccctacccactatggatcccaatttcattggttgggagaggggccaagtttgtttccaacttccccagatgactctaatggctgagagttgcaatcaacaggtaagtgaatatccaggctgtaagatgaagaaagagggggttgtgcccaagcccactgtgcctcataaagcagatgatctctgcagcgctgcgcttctcaaagagtggtcccaggactgcctcagtcagaccacagactcctaagttcctcctcagacttcatggatccaagctctgtgaggtaattctaagcacattaaacttgtagaacagccatctggatttaatattacataatagctataatattctgctattctctaatcttcaatgtcagtttcttaaactgtcaggcctgtctttagatgcccttcaactgtgctggggactatcttgatggcagccagcaaagaaaatcagcaaaaaccccagtggagtttctgggttttacttttgttaaggaaggtgatggtttcttgacatgacaggtatctaggtggaaagggcaaagtgctaatgcaaacacaatggagacactatggaatagctctgcctagggacatgtggaagagcttctaggagacagtgtggacctttccatccctagaggtcttcacaagataaattcctacctccgtcagtattcaaaaggttttagcatcaatactgtctgagaataagacattagacttgagtcagtcccctggcttcaatcccaggatgccaagcagcctctaatggagaccgctggcttaatcgtgctcctttcctggcataacaactcactgcacccatgcctcaccaccacgaagcagtctcctcaccacccaaatgtgccttgggtgacttaaatacagccattagtatgaatggtcccctgtttttattcaacaccacaccagtctttgcttttaccttcggctaatgtggttccagccttttatcctgcactccttcttataatttaaaaaaaaaaaaaactcccctactatctttatgttaatattaacatcaactaggttcttctcaaaggacagccaggcctaactggccacgttaaaatctgcacagtgcttttgtgtcactgtctattctattagtttcaacatcatgctaaaataggacagcatgttccaaaactgaaactgaaacaggaacggagccttgctgatttagcatgaggagggaattgtaagccttgcacctggacactaaaatagagtacaagcagaaagttatttttaaaggatgggcactatccttgagggacttaccctttctaatcagctttgcatggtttgttttgagacagtgtctcactctgttgcccaggctagagtgcagcggcaccatcacagctcacggcagcctctgcctcccgggctcangcaatcccacctcagtttcccaagtagctgggactacaggcacacaccacactcagctaattttagtattttttgtagagacagggtctcgccatgttgcccaggctggtctcaaactcctggattatctccctggccctgcattaaaaaagatgtgcaacaactt

SEQ ID NO: 40930 - DNA, 323 bp, Homo sapiens
acagtgggataattcttttctgtatatagttatatcaccagtgtggtatacagttagggtaacagtgggataattcttttctgtatgtagttatgtcaccaatgtgatatacagttaggttcattgtattccatttgtttcaacctttagggattccttttaaactttaaacactacttttgattgaacagtaactgcagcaaatagtgatttaacttactacagccagaaactgtgccaaatcttgaaaagttaaaaggtgtttagaacattgttcataccattaaatttaaatgggaagatgaaagatacagaatgcttta

SEQ ID NO: 40931 - DNA, 383 bp, Homo sapiens
attttgaaatgaagaaagccataagcaggtgccagatgagtttcctgggcactcagaaggaagagagcctgcagtaggctggaatggccaagtgggaaaatggacagaatttagacaaatgcagtagaggatgagggagagtgtatcatgtggcagagatgatggaagtacaagcattgtagtagttcttaatttgttgatcctaacacccctttgccctcatattttcttagaagacctgagggaacgtttcatgtgcgttatatctatatttatcatattataaatcaaaaatgagaaattaaaaaatatgttcaattgatttaaaataacaaagtgcccattacaagttaaaatacttatttttaggaaaaataactaca

SEQ ID NO: 40932 - DNA, 518 bp, Homo sapiens
gcctgacacctaaaacatgactaggacagaatgcgaggttgattttctggggacagtcgccacccccttccttgccctctctctcctttctgtctctccctggtttccccttctgcgtcttcccacctctcccgtttttgcgtcttcgtgtttctcacgccctgtgtcatggcctcctccgtcttctcccgctctgtcacagtcttccgccgggggctaggggtgcccggcccgcatccctgggcgaccctgagtccccgcaggccgcccgaggccggggtggttccgcatggggtctctgcccgaggcctttctctgccaaggagggagtgtggacgctcggggagcccagaagggcgctgcacccacggggaccggacgtggtgggcggacccctcctcctgcgtccccgacgggacactgcccggggcccacacggcctccgcgcccccggcgggacggacaccccgggccaccgcgcgccccccaccacctacccggcctcgctggattcccgg

SEQ ID NO: 40933 - DNA, 490 bp, Homo sapiens
  misc_feature (323)..(323): n is a, c, g, or t
caacaatgataataaatgattcctggtacaatcatgcatgttgttctcatgtttctctcagtatttgtgatccacaggtagagggtgaccaggtgagtacctggaccggctgtcccatgggtcagagtaaagatcccatttactcatggggttggcattaaatcacctttcactggccatcccccaaatatggttaccgctttaccctttgacttctctgtccctctgtcttcactcctcccatcttcctttcccttatgttcattggactgacacttcctgaggggttactatgtccaaggcaccctgctggggcagggggnagcacaggaataactcccagcccttgtctggcaagggcacttcagccctgtaggggaagcgcagtgcccaggaggagaggccaggaggaggcggaggccagacagggggagtgttcaccaagaagacatggcttcatgggcctggcttttaagaccagttgatgatt

SEQ ID NO: 40934 - DNA, 467 bp, Homo sapiens
ccaggaaaggaaaaggttaactgaggttgaaaaaaaaactttatgtggcacttttaaacaagcaggttggtttggcttgtgtgactatgatggtgcctgattttgagcagagcaatttgtgttgtgacattttaaaatccattctggcacttggtgatgaatgtgttggctggcagctaagaacttgctagaatgcaagtatgcaagtcttcaccatttataatcgacacttcctttccaggaaagagcctttctaatctttgaatcagtggatttatcaatttgcataaaatatgccatcctcaatgaacacatttatcatctaccacttaactttccttctgttaaaaaaaaaaaaaagcagaatcaccttcctgtgagtcagcagctttaaattcagctgtgctgggtgaagctgttaagggtaggaaggagccatcactagaagggggagaagcaggaataaa

SEQ ID NO: 40935 - DNA, 861 bp, Homo sapiens
  misc_feature (23)..(24): n is a, c, g, or t
ggaaaatataattatcagattannggtatcttcgctccatcaacaccaaaagaaatcagcaccaacttcaaacaactgcttactggacattgaagctttatggccagctgccaaaaaaataaatgcaccttaatttttaaattgaattataaagccaaaaatatcctattgctctattcctcttattttggtgtttacatgtgactttataatttccttcacttgaaagattttaactttaaaggaaactttactctgaacgtttaggacaattcatagataatcaaattgattatcatgttttcaatgttaaatattacttcatatgtctttttacaaccttcagaataagaaagccagctatgaaataccaagtcttgactagtagtgccacctagcatcacaaagaaaaagttgttcaactactttgcaaagcattggaaatttatcaaatcatctaatatactatctccttgatccttaatccagaggaaaataagcagacatgatcaattagaagaaatgtacacaaaacctatgtaattttagagatagtatactacatattatgaatgtttgtgttttagtaagatgtagttatgagatgtagcagtaagatataatttctggtttgctgactgatatgctaccggtttttcctacaatttaagaaaacatattgggattcaaatgaataaaaataatgtttgtgtactgaaatattggctatgacctaatttatagaataaaaagtaagtcattcacaaaaaacaaaacaaaaaatgggctcgtcggcctaaacggtggagctctgtagccgccccccttagagagggtcattaatgaccctccccactgctg

SEQ ID NO: 40936 - DNA, 717 bp, Homo sapiens
  misc_feature (23)..(24): n is a, c, g, or t
ggaaaatataattatcagattannggtatcttcgctccatcaacaccaaaagaaatcagcaccaacttcaaacaactgcttactggacattgaagctttatggccagctgccaaaaaaataaatgcaccttaatttttaaattgaattataaagccaaaaatatcctattgctctattcctcttattttggtgtttacatgtgactttataatttccttcacttgaaagattttaactttaaaggaaactttactctgaacgtttaggacaattcatagataatcaaattgattatcatgttttcaatgttaaatattacttcatatgtctttttacaaccttcagaataagaaagccagctatgaaataccaagtcttgactagtagtgccacctagcatcacaaagaaaaagttgttcaactactttgcaaagcattggaaatttatcaaatcatctaatatactatctccttgatccttaatccagaggaaaataagcagacatgatcaattagaagaaatgtacacaaaacctatgtaattttagagatagtatactacatattatgaatgtttgtgttttagtaagatgtagttatgagatgtagcagtaagatataatttctggtttgctgactgatatgctaccggtttttcctacaatttaagaaaacatattgggattcaaatgaataaaaataatgtttgtgtactg

SEQ ID NO: 40937 - DNA, 491 bp, Homo sapiens
ggtgtgagccaccgcggccggcctattgtcttatacacttaattcttttattcccaattcccagttttattctaattcttctccctctgcaggcaaccattctaaaatatttcaagtgtatcttctgttggatgtgttttagcagaatgtgatatctgtgggcctatattttaatatacttgatatattttatgcttttctcactaagcactaggtttttcagatctaatcatattgttaagggcatgtttgtagacaccatgttcacattttaactatgcattttcccagtgacggacaccagattgcccccaacttcccatcctcaggaataaaactgcaacgagcaccctgcgcagtgtgagacccaagtgacaggccacaggagggcactcgctggccatggggcatgcaacatacagctctgaatttgctgctttccagaatagccttagtagcttcacagtcttggtacttggaattctctcact

SEQ ID NO: 40938 - DNA, 404 bp, Homo sapiens
acccatagttctgggatcttctgacctgaaggattccactttcttaaaggtagcagagctaaccaaaccgtaggtatgctttcatgacaaatatgagatgcactggaaaagaacatacctggggccaggcgcagtggcaaagtgctgtaatcccagcactttgggagttcaaggcaggtggatcacaaggtcaggagatcgagaccatcctggctaacacgatgaaaccctgtctctactaaaaatacaaaaaattagctgggcgtggtggcagacacctgtagtcccagctactcgggaggctgaggcaggagaatggcatgaacccggtaggtggcacttgcagtgagccgagattgcaccactgcactccagactgggcaacagagggagactctgtctca

SEQ ID NO: 40939 - DNA, 369 bp, Homo sapiens
gtgctttcctatggcctgcttattcccaagcaatacctatttccaaagaaagttcattttattttagagtctttctgtatttgttatgcagtgtcacatagcggagccagaagtgggaccgaagtgaattcatcttggatgaatcagcgtgtcctggaatctaacgcagtgttgactgagccccccgcagactgcctttccaggagttgcttttctgttctggtgaatctcctcaaatacccagattccctccctttggtcagttcctttttactttatcctggatgtgatttgattataaggctcccttaaacaaaggaccttgcatccctcctgagggtataaaggttgggtttctttctttctttc

SEQ ID NO: 40940 - DNA, 175 bp, Homo sapiens
tgggggtagaaaatgatgttataattctgaaagcaaatctagcacatctaaggatttacctaaggaactaatagggaagatcctaaaatacagtggtataaggtggcaaaaatatattgagtacctgatctttgcacgagctttgttggtgaaaagcaagcttactttaaaaaag

SEQ ID NO: 40941 - DNA, 295 bp, Homo sapiens
cccctcgcgttgcccggatgtgggaggccgcgggcggtggcggcctcgcgcacaatgagcccaagccgagctagcaaagggggagattgcacaacacttagaagcgaagcagactgggggaggggaacgcctcaggccaccatgtgctcgctccctcgaccacccggcggcgtctcccacccctccatgaacaatccacatcccgcccgcccccgtcgcgaagtagcgtcgccctcccatacctcaggccgctcacccccgaaggaaggtggacctgcccatcccgcagtttgcc

SEQ ID NO: 40942 - DNA, 427 bp, Homo sapiens
aaaattaaaggggtttggtgaatccattgctcctgccatcacccagattaaagacctgccctctcatccgcagtcagggattgagtgggcaagcactgtgggctgcagacaccaagctccaccatgattccccctccactctcagaggctccatccagctggcaggctcacagcactgcagcccagcatctgaagtgctctggtttattgctcctgtggtttccatgaatgagcttctgtttcctgctcctctctctttccacccaccctcccagagtggtccatgtcccagtagcagctcattccactttgttagtatgagttgttgccttgaagggtggcttcagtgcatagagaagactatctgtggctccttgccttttaaattactaatcaaaatattcaagtaaataaaatgccaaactta

SEQ ID NO: 40943 - DNA, 638 bp, Homo sapiens
gggggcttggtgaaaatttgctctaggtcccagacttggcaaatgatacaagatttaactcacacagtccggcttccaagcccacactcttaaccactgtactctcagtcagggattgagtgggcaagcactgtgggctgcagacaccaagctccaccatgattccccctccactctcagaggctccatccagctggcaggctcacagcactgcagcccagcatctgaagtggtactgtccctaggctgatgactgtcacatttttagtggggccaaaactttcctccaagattcagatgtgtgtcaccaactagagagcaggcttggaatttaaaaataaagttttcatggaggggcttctatatgcccctttctgcttgctttgactttggccatgtggaagagagatgaggcagcacttccaggggatccttcaatcaacctatgattcttaatacttgaattaaaaggagaatggtcattaaacagaaactgctgctaaaagtgacaagcaacttagcaatacacattaggagcaaagattataatttatgcagcatattttcatatacaggcaaatctgagatagaaggaaaaacaaatggcttggaataaaacaaaatccttaaaatgtgta

SEQ ID NO: 40944 - DNA, 647 bp, Homo sapiens
gggggcttggtgaaaatttgctctaggtcccagacttggcaaatgatacaagatttaactcacacagtccggcttccaagcccacactcttaaccactgtactctaaaattggaattactatcctaggcaaactggaatttattcttcaaaattgttgaagttatctcctcagtgggattcaattagctaaagatgagagattttcagctgggagcagctctggagcagcagatacactgggtactgtccctaggctgatgactgtcacatttttagtggggccaaaactttcctccaagattcagatgtgtgtcaccaactagagagcaggcttggaatttaaaaataaagttttcatggaggggcttctatatgcccctttctgcttgctttgactttggccatgtggaagagagatgaggcagcacttccaggggatccttcaatcaacctatgattcttaatacttgaattaaaaggagaatggtcattaaacagaaactgctgctaaaagtgacaagcaacttagcaatacacattaggagcaaagattataatttatgcagcatattttcatatacaggcaaatctgagatagaaggaaaaacaaatggcttggaataaaacaaaatccttaaaatgtgta

SEQ ID NO: 40945 - DNA, 301 bp, Homo sapiens
catcagaaatcctggagcaagacagactggctgtggtctaccagcattgtagtaaaaacattggggaagttttataagacctaattattagaaaataccataaaatagtcattttcatagaaaaagctttcctttctttcctcacactaaatcacattactttgtgttcaaggtaaaatggagtttgaaatctggatgtaaataagaaaagatattattttattccaagtgaaacatgtattcacacttcacgtcttgaagcaccaggtggccatttgggctgagttttcaagaaaaaaaa

SEQ ID NO: 40946 - DNA, 362 bp, Homo sapiens
atatgggcctataaaaaaatttaaaaaataaaattccactattcctggcatattccaaaattttcctcttttgattagagtttttttggacaagtcccatgcggagtctgtcctgaagactctggctgagtgatggatgaaaggagtattctgacacaggtattttgcatgagaacggctgggggagtgccagctttagtgcagccgagaagagagtgcagtcctgataggctggaaccatttgtatttattcagtagagacagaataccaaaggcctgaagccaacacaatttgtgagtaatgaacattgtcgcccccctttgcagggagcagtcttgcatgatttccggagggcataagt

SEQ ID NO: 40947 - DNA, 344 bp, Homo sapiens
atgcctgggaagagaggcttgggctggtggtgggcccggctgcccctttgcctgctcctcagcctttacggcccctggatgccttcctccctgggaaagcccaaaggccaccctcacatgaattccatccgcatagatggggacatcacactgggaggcctgttcccggtgcatggccggggctcagagggcaagccctgtggagaacttaagaaggaaaagggcatccaccggctggaggccatgctgttcgccctggatcgcatcaacaacgacccggacctgctgcctaacatcacgctgggcgcccgcattctggacacctgctccagggacacccatgc

SEQ ID NO: 40948 - DNA, 393 bp, Homo sapiens
  misc_feature (389)..(389): n is a, c, g, or t
  misc_feature (392)..(392): n is a, c, g, or t
atgctgttttatataagagacaagcatctgtgggttttggtatttgaagggggtcatggaaccaattctccatagataccaagagacatgactatatttattataaagttagattactccaaaagggttgtttttaaatactgacccagagaaagctaattagactataactaagatctgtttgttcttttctctgtttttgtttttgttttttgttttttttagacggagttttgcttttgtcgcccaggctggagtgccatggcacgatctcggctcactgcaacctctgcctcccaggttcacctgagcctgaagaggtagaggctgtggtgagctgtgatcatgccactgcactctagtctgggcaacagagactctgtttcagnttna

SEQ ID NO: 40949 - DNA, 397 bp, Homo sapiens
gtctaatatgcccatgtcaagaaggcaatatcagaaagaaagaaggcgggctctgtggatttgggatccagcaatccaaaatcccactagaaggcaggatccagcaatttgtggatttccttctgggtggaaaggaaagaaaaccgaccttcactgaccatgcccatttcctttaatgtccccacaaccaattgggggcccagtttatagtgaggagatggaggctcatgaaattgcagttagtgatggggccaggacttgaatccaggttttctgattccagggcagaacctcttcatttggacagaggaagctcagagagggaaaaggactggcccaatgtcacaaagcagattagctacatggctaggattagaatccagttttttatttccaa

SEQ ID NO: 40950 - DNA, 606 bp, Homo sapiens
ccttgcaggcctctcttgacattggggttgggagggtgctggaggtggagggaggtgggaagctcaggcctgcactgttttcctctctgcccggccgatcctgacccctctctgttcctagcagctaccactgtctttgctgatgctgtggttacctttacagcagtggttctcaaagtgtggtctgagcgtcttttgcatcagaatcacctgagataattattaaaactgcaggctctgggccttactctagacctactcagaatcacttggactgggcccaggaatctacactttgtaatgacctccctaatttagtgagccttgtgtgctctaaattttgagaatctcttatttagaaaatttgattttccttttggagtaataataacaagtaatatttgttagaggttaattatgtgatgctactcagtgttttatatgcaataaccgaattattcctcaaaaataacagtgtgaaagagaaactaatattagccttgtttggccagtgggaaaattaaggcaaagagtatttgctctaatgttgattgaagagccaatatgtatgtatgtatttatttatttgtgacaggatctcactct

SEQ ID NO: 40951 - DNA, 395 bp, Homo sapiens
gctgcctacttcgtgaaacctttaatgttcaagtaaactctgttaaatgtattttgcctgtagtttttatttttaacaattcaaaacagaaacttggctcacagttctccttgcagtgcccttcctgagttcaccatccacatggaagaacatccactgtcattctgtgactgccctgtctctactagcctctcctcctacctccatccttttggtgtaaaaagaagtgtcccttcctatgtaaagttctagtggattccaaagtttagaaacctctgtccatcattttgcccacctcttccccctgtcttcagcctgttcatctctcccctccttaccatctattaataaacatgctcaactgtgacatcactcaaaaaacaaaaacaaaacct

SEQ ID NO: 40952 - DNA, 137 bp, Homo sapiens
tcagacctttgttatttgttaaagcactcagcaacccagaactaaacatgcacgccgatgttgatttgagaactaaaggatatctttcaagtccaataaatgtgataaaaataaacaacatcctttcataaatttca

SEQ ID NO: 40953 - DNA, 1948 bp, Homo sapiens
  misc_feature (935)..(935): n is a, c, g, or t
ctgttagtaaagtgcttagaacagtgctgaacttgtagtcaatcctgtgtaagtttttgttagataaaatagaaaactggctgggcacggtgactcatgcctgtaaacccagcactttgggaggccgaggcgggcagatcacgcggtcaggagttcaagaccggcctggccaacatactgaaaccccgtctctaccaaaaatacaaaaaaattagccgggtgtggtggcagatgcctataatcccagctacttgggaggctggggtaggagaattgctagaacccaggaggtggaggttgcagtgagccaagatcatgccattgcactccagcccaggcgacagtacgagactccgtctcaaaaaaaaaaaaaaaaaaaagaaaaccatacattccaaaaatagcgattgagcattagctctgtgctaggggctgggaacaccaaggagaagcacccacccctgtctagatggtgttgatgggatgccagggaagacttggcggagggggtgatgcccacacggtatcctgaaggaggaatgggcctgagccaggcaaagaggagcagggagggtgtggctagcacttcatgcacaggtctagcaagtgcaaaggcctgggggtcagagagagcaggatgcatttgaagagctgtctagcatggctggagcacagcacaggaagagttcatactccacctgtttgtctgtccatgtgtccatccttccatccggcacatgaatagttacatgagttgctgtcatggcccccactgccaggactcttctgtttagcccagaaggccctgtctatctctccagcctccctggctcttgccgctgacggtaccctccacctccagctctatccagttacatgcactcccttgaatacatcttgcttgctcctgcctctgtgcctttgcacctgctgtncactgtgcctggaataacctttcttttgttttgaaccccttttgaaaaataactctccacctgctctgattttgcaagaaatatgcctgccttcatcatcattaagactcaggaaggaagggtcattttgccttattatttccccctccaggaatcatccccctgacccacctgtctgggctgggtttattgctttctcctttgtgtctttgtcacagccctgactatactgtgccacctgtgtctggcctctctgccagactgagaatgcaatgaggacagggactgggtgtggttcattgtcactgctggccagagagacccaggaggtcaccagacctgggtcctgccctcaagaaccacgccctcgagggaaatgatgcacacaggaacagtaaccaggatactgggcagagtagactagtaggcgcctgggtcctctggtcatggccatggggggcccaacgtgaagttcccaaggagcagcagaggggtgttctctgcctgccagggcctgactccagctgtgcaaacagtttttgcaaaatgcatcttggcctccaccactccatttgtcctgcacagtttgctttggcttcaccccagtctcaggcccttcatcccttcccaccggtccccactccttccattggtttcccaggccttgcacctcagactactgggagcactgtctgagccaaaccctagggctcaatgaaaaccagacgtaaggctgggtgcattggctcacgcctgtaatcccagcactttgggaggctgaggcgggccaatcacctgaggtcgggagttcgagaccagcctgactaacatggagaaaccttctctccacgaaaaatacaaaattagccgggtgtggtggcacaagcctgtaatccccgctacttggcaggctgaggcaggagaatcacttgaacccgggaggtggaggttgcagtgagccgagatcgtgccattgcactccagcctaggcaacaagtgcgaaactccatctc

SEQ ID NO: 40954 - DNA, 258 bp, Homo sapiens
cacgtacacatgtattcttttcaaccaaatgtggattgaaaatacagtactctagatccctgaggaatcgccacacactctagatccctgaggaatcttcctcaatggcacatatgcaccatggaatactatgcagccataaaaaatgatgagttcatgtcctttgtagggacgtggatgaagctggaaaccatcattctcagcaaactgtcgcaaggacagaaaaccgaacaccgcatgttctcactcataggtggg

SEQ ID NO: 40955 - DNA, 362 bp, Homo sapiens
ggaggctaccaaatagtgtctctggtttgtaacatttattccagtttaaaaataatacatacaggccagttgctcaagcctgtgttcccagcaatttgggaggccagagtgggaggatcgcttgagctcaggagtttgagaccagcctgggcaacatagtgagaacccatctctaatatatatatatatatatgcatcaaataaaaaaaagagaaggcccaataccaaaatattaatgtagccatattgctatacagagaggttatgggtgatttgtattttctaattttatttctattgtattttccaactatttttcaatgggaaataagcatattcctttggtcttagaaacaagtcaa

SEQ ID NO: 40956 - DNA, 318 bp, Homo sapiens
tcagtataacctagcctacttcttttcagcagagatccatcagtaaagcttggtaggttttccatcacagctaactagtgcactttgttggctctgtagtctcactgaaatagaaccctatgtgggtgtggtcactggtagatggtaagcagggtgctcacacaggtgtttcaagaagggggttccaataggccaggtacggtggcttacacaagtaattccagcactttggaaggccaaggtgggtagatcacctgaggtcaggagtttgagaccagcatggccaacatggcgaaaccccatctctacttaaaatac

SEQ ID NO: 40957 - DNA, 358 bp, Homo sapiens
tccatgtgatcttcctcatggctagcccagggtggtccttgggtaattggacttcttacacggcagctgtcttccctcagagccagtgttttgagagactgaggtggaaatcgcaggccttcttaggccttaacttccgcggttgtgcagtgtcacttctgttgtgttcttttagttccatgaggctggcccaaattcactgtgggaggcgactgctcaaggcagcggtaccaggtcgggtttgtaggttactttgggaagttaactgctacatgcattcattgtaaagctttggggaattagaatctggtcagtcatactgtctttgcttcccctagccccgaacccgcaaaaatgc

SEQ ID NO: 40958 - DNA, 321 bp, Homo sapiens
  misc_feature (23)..(23): n is a, c, g, or t
  misc_feature (114)..(114): n is a, c, g, or t
ttatacaggaggaaactgaggtncccgtgtggttaggtaacttgcttgggtttcccatagaggcagaggtagaatttgaacccagtactgtttagctcatgccctttctggaanactctcttgcctctctatcttttctttttgctgcactccagcctgggcaacagagcaagactctgtctcaaaaaaaaaaaaaaaaaagaaatataatctgcccaacccaacagtcaaatgttagccaccaatgtccttgtgttaccctgctttctgagggccagaagagattttcaaagattatgagcactaaaataacagtaaaaa

SEQ ID NO: 40959 - DNA, 717 bp, Homo sapiens
agcgggggagtctggctggaggccaaacaacacaaaaccagcacacttaacaaaaatataaccaatgacccttgcagagtccacttaactcccctccaccagagcaggtgctggtatccacagctgagagacctgaagatggatcacatcacaggactccttgcagacattctccagtaccagcccagagcctggtaggtctgttgggtggctagaccagtattctaagtgaagtaactcggaaatggaaaaccaaacatcatctgttctcactcatcagtaggagctaagctatgagaacacaaagacctgtccacgctgagtttatagcaactgtcaattacggttcagattttcctaccccagcgtgactttccaaagaggcttctgctcatggatttctgctccaggaagatgcaacaggaaggtcctcacaagatggctgaacagatgcaggtgctgtgcctctggactgcctagcctccagaactgatacatatgcaggatgtgcagctttgttacacagtatgaagcatgtctttaggactttctgtgccatctggtatccatcaaggggagagtcccaaactgcactggaaggcatcttccagatggtggtgggcgctaaagatcagctgtgtgggtgtgagcttcccatgcctgtggagaagcagcaattgaattgctcatctggaatgaagtttcgtggattttttt

SEQ ID NO: 40960 - DNA, 818 bp, Homo sapiens
agcgggggagtctggctggaggccaaacaacacaaaaccagcacacttaacaaaaatataaccaatgacccttgcagagtccacttaactcccctccaccagagcaggtgctggtatccacagctgagagacctgaagatggatcacatcacaggactccttgcagacattctccagtaccagcccagagcctggtaggtctgttgggtggctagaccagtattctaagtgaagtaactcggaaatggaaaaccaaacatcatctgttctcactcatcagtaggagctaagctatgagaacacaaagacctgtccacgctgagtttatagcaactgtcaattacggttcagattttcctaccccagcgtgactttccaaagaggcttctgctcatggatttctgctccaggaagatgcaacaggaaggtcctcacaagatggctgaacagatgcaggtgctgtgcctctggactgcctagcctccagaactgatacatatgcaggatgtgcagctttgttacacagatacttttggctcggtgaatggtgcttatcagttaacagcagaaaccctcctgaaatggaaaatggttcattgtttccatcatgtactctatggaatacaaagctctgaaacctgttggctactggaagtgtacaagaaaaagactctcaagctagaggtggggtagagctggagccagccatgtcaagatctttcgaggacatgaacattttttatgcttattaaaagatgatgtggttttaaaataaatctaaggctgggcgcagtggctcatgcctggaatcccagcag

SEQ ID NO: 40961 - DNA, 844 bp, Homo sapiens
agcgggggagtctggctggaggccaaacaacacaaaaccagcacacttaacaaaaatataaccaatgacccttgcagagtccacttaactcccctccaccagagcaggtgctggtatccacagctgagagacctgaagatggatcacatcacaggactccttgcagacattctccagtaccagcccagagcctggtaggtctgttgggtggctagaccagtattctaagtgaagtaactcggaaatggaaaaccaaacatcatctgttctcactcatcagtaggagctaagctatgagaacacaaagacctgtccacgctgagtttatagcaactgtcaattacggttcagattttcctaccccagcgtgactttccaaagaggcttctgctcatggatttctgctccaggaagatgcaacaggaaggtcctcacaagatggctgaacagatgcaggtgctgtgcctctggactgcctagcctccagaactgaggtgttggaagctgtgaatgtggatgaaagtaccaatatagagagaacagagtgagaatagaagacagcccaagaatctaaagtcatgcacttgcaagggagtcagaggaagagagggaaaatggttcattgtttccatcatgtactctatggaatacaaagctctgaaacctgttggctactggaagtgtacaagaaaaagactctcaagctagaggtggggtagagctggagccagccatgtcaagatctttcgaggacatgaacattttttatgcttattaaaagatgatgtggttttaaaataaatctaaggctgggcgcagtggctcatgcctggaatcccagcag

SEQ ID NO: 40962 - DNA, 485 bp, Homo sapiens
tttttcccatataaacagccttaacttttaatattatatactctctaattttcttatacagttcaataaaaaaatatttaatacagatcttttaaatatttcactggcatttacattgtttcattaggtaacataccaatagtttttcactttctccttaaggatgaattcagtaaatattccaggaactcaataaatataggagtagacagttaagtttgactataatgcataaaatatcacagaacaaactagggaaataggataatagcagaaccattctttctcttaaaacagaataatattttaaataactatttttaaaagtaatttggtcttatttatcaattaccatggaaatgtaggcaatgcagggcacagtggctcatgcctgtaatcccagcaacataacacttgctatgttgaccaccttgggcaacatagcaagactctgtttctacaaaaaaaatttaaaaattacccag

SEQ ID NO: 40963 - DNA, 273 bp, Homo sapiens
  misc_feature (13)..(13): n is a, c, g, or t
ctcgaggcccaanaattcggcacgagtggtgacaagtatcacaaaaacactgctctgcattgggcagtgctagcagggaataccacagtcattagccttcttctggaagctggagctaatgttgatgcccagaatatcaaggcaatccttaggtgtcacatggccctctagtggaagggatgctcagctggaccgaggcaactgcaggatattcccggggagttgttacccaagggattgcttttattcagggcgaatcagcactttcttgga

SEQ ID NO: 40964 - DNA, 4743 bp, Homo sapiens
ggacagagggggcgtcacgggggcaggagaagaaggaggaggaggcccgcgtcgcctccggcggggctcgcgctcgccccgcgctcgccctccgcctcgcccgagccccgggagggtgaaacgctttctcccagcatgcagcgggaggagggatttaacaccaagatggcggacggcccggatgagtacgataccgaagcgggctgtgtgccccttctccacccagaggaaatcaaaccccaaagccattataaccatggatatggtgaacctcttggacggaaaactcatattgatgattacagcacatgggacatagtcaaggctacacaatatggaatatatgaacgctgtcgagaattggtggaagcaggttatgatgtacggcaaccggacaaagaaaatgttaccctcctccattgggctgccatcaataacagaatagatttagtcaaatactatatttcgaaaggtgctattgtggatcaacttggaggggacctgaattcaactccattgcactgggccacaagacaaggccatctatccatggttgtgcaactaatgaaatatggtgcagatccttcattaattgatggagaaggatgtagctgtattcatctggctgctcagttcggacatacctcaattgttgcttatctcatagcaaaaggacaggatgtagatatgatggatcagaatggaatgacgcctttaatgtgggcagcatatagaacacatagtgtggatccaactagattgcttttaacattcaatgtttcagttaaccttggtgacaagtatcacaaaaacactgctctgcattgggcagtgctagcagggaataccacagtcattagccttcttctggaagctggagctaatgttgatgcccagaatatcaagggcgaatcagcgcttgatttggcaaaacagagaaaaaatgtgtggatgatcaaccacttacaagaggcaaggcaagcaaaaggatatgacaatccgtccttccttagaaagctgaaagctgataaggaatttcggcagaaagtaatgttaggaactcctttcctagttatttggctggttgggtttatagcagacctaaatattgattcttggctcattaaagggctaatgtatggtggtgtttgggctacagtacagtttctttcaaaatcctttttcgatcattcaatgcatagtgcattgccccttgggatatatttggcaaccaaattctggatgtatgtgacgtggttcttctggttttggaatgatctcaactttttatttatccatcttccattccttgccaatagtgttgcacttttctacaattttggaaaatcttggaaatcagatccagggattattaaagcaacagaagagcaaaagaaaaagacaatagttgaacttgcagagacaggaagtctggacctcagtatattctgcagtacctgtttgatacgaaaaccggtgaggtccaaacattgtggtgtgtgcaaccgctgtatagcaaaatttgatcatcattgcccatgggtgggtaactgtgtaggtgcaggcaaccatagatattttatgggctacctattcttcttgctttttatgatctgctggatgatttatggttgtatatcttactggggactccactgtgagaccacttacaccaaggatggattttggacatacattactcagattgccacgtgttcaccttggatgttttggatgttcctgaacagtgttttccacttcatgtgggtggctgtattactcatgtgtcagatgtaccagatatcatgtttaggtattactacaaatgaaagaatgaatgccaggagatacaagcactttaaagtcacaacaacgtctattgaaagcccattcaaccatggatgtgtaagaaatattatagacttctttgaatttcgatgctgtggcctctttcgtcctgttatcgtggactggaccaggcagtatacaatagaatatgaccaaatatcaggatctgggtaccagctggtgtagcgacatcttatcctatgaagcatattgctgagtggtgcctgaaaattgtgtctgtccgtgtctttctcacactcgaatccacatcctttgaacaagagcatgctatgtgtagggctaatggtgaattttacagtctttttttcaacacttttattaacaaaagtaaacatggacagaacacactgccatttctgggaagagtaaagatgataaaaaataattttaatggttcttaatgtggaaattcacaacatactcaacttttgggttttgttctcacagtatttttcacaaaaaaagggtaaacttattctattgacagacatggtgtactgatcagaaatgttcagttttaactaaaactaaatttatgttatttggctaaatgttatgatgcagtctagtacgagtattgcatctaattccaggagcattgttttaagttgattgactagttattatgtacatttcagaatgtacacataaatactgtgatgaaaatcatgtgattgggatctactgtgatgttgtcttcaaaggcaggagaaaataatgttcacaataaaatgtgctaacaatgttttgtttctatcagctgttgcaatgctgatatatttctagttcagtgaaataatttgtagtaaccttactctgaggttttacggtctgataatgaagcacttgcatgagtatagtaagtcatgtttttttgttcaaatttaaaagccctgctaattgcatgacacaccacatagaatgtatactagcagatactatccagtgaagcataaattagaatttaatttgatgttcaaaaacagttccatttttaagggttaaggtggtattttcaagaaaaggcagaacaaataatgcaaaattctcagtaatagtgatacatggatatacttccttttaaattctcagctgcaaaataattgtagacaaaataatggcatttaactaaagatggagcatgatctaagtacatagcacatgtgaataaaagaaaagctgacagtatattctggtttcaataaaatgacctatcagaaagtagaatttcatccccaagagtatttcagtttatccaatattgagtaagttctgaaacagttttagaaaaaattttctttttgttaaatgtgatgcactgatcaatttttgtcacagcattttcataccttcatggtggactactagtcactgcttccataaatattgtttacagggtgagatttggtttattcatcttaagtgctgtagcaaactgtggttcgagcaacctgtgggaaatctgtgagagggaatggggtgggagatgtgggggaatggtggtcagactgatgacagatcctagaccaatgtaaagaatgtgtatctgtatataaataatttatcaaatagttttctctttgtgtctgtgttagtgtttttaaagctgctcatttcattttgtccaaccaaaaagaaaagggagataactaatgagcttctagtgatgttcaaaattgctgttaataggcattataccctgcaagttcactgcatgtctgatgcttggtaaaactagtcttccctgtaaaatgcagattacaggtattaaagcaatctagtggtatacccgccccttgccttagtaagaggagcagtgaaatgtatatagttgatgttcagtatttccaagtaccatttttatatagtagcttatttgaccataagtcacacatcaaaaaaagattacccttagtgtatgtgttttaatattagaaaattggcatatgtactttatttttgaaaagggaagagatgggtgtggggtggcaatagcattgtgccattttgtcatagaatgtaaaaattggttaactttacaaatgtcagctagttttgactactaattgggggaaattttagataatttttaaattcaaagttatttataaaatgctagaatttgttttaattttttgtattttgagccacttcacatgaagactcagttgcatttttatcgaatacatttttatcaacagttaaagactatggtggttttttcagagtttggctaagaatgttgttaccatcttctttgtttgtggtacaatattttcagtgcaaaagagatgtcattcagttaaaaagacaaacctctagatgtgtaattacatggaaaatactagcaatgtgaatgcttttgtagtaaccatcttgtagtacctgtgaaatctataactcagaaatggtcagatggtcaggagccagctatgcagcagtataccatctgtttaattattttgtaggtcctgtgtgtggaaccaactataaacccagttctaaagttgtgtatgatggtgaacctttgggaatagttcttatcaacttaattggatacttttagcaaataggaacttaattctcagcactgaacatgaattacttccttggagttttttttcattcatatttttgttgtttccaggaatttatttgatattaatgggcgtaaaacagcatcattgtacttaagctatggatgtttttattttatattttctttatttataactgtgccaagtattattttgctacttaccgtgttattctgtggaaagaaaaacctgtaaagtgtttaataaattagccctccttacataaattaaatgtcaaaattttgtaaaatattaatcagaataaatactgactctt

SEQ ID NO: 40965 - DNA, 4695 bp, Homo sapiens
ggacagagggggcgtcacgggggcaggagaagaaggaggaggaggcccgcgtcgcctccggcggggctcgcgctcgccccgcgctcgccctccgcctcgcccgagccccgggagggtgaaacgctttctcccagcatgcagcgggaggagggatttaacaccaagatggcggacggcccggatgagtacgataccgaagcgggctgtgtgccccttctccacccagaggaaatcaaaccccaaagccattataaccatggatatggtgaacctcttggacggaaaactcatattgatgattacagcacatgggacatagtcaaggctacacaatatggaatatatgaacgctgtcgagaattggtggaagcaggttatgatgtacggcaaccggacaaagaaaatgttaccctcctccattgggctgccatcaataacagaatagatttagtcaaatactatatttcgaaaggtgctattgtggatcaacttggaggggacctgaattcaactccattgcactgggccacaagacaaggccatctatccatggttgtgcaactaatgaaatatggtgcagatccttcattaattgatggagaaggatgtagctgtattcatctggctgctcagttcggacatacctcaattgttgcttatctcatagcaaaaggacaggatgtagatatgatggatcagaatggaatgacgcctttaatgtgggcagcatatagaacacatagtggtgacaagtatcacaaaaacactgctctgcattgggcagtgctagcagggaataccacagtcattagccttcttctggaagctggagctaatgttgatgcccagaatatcaagggcgaatcagcgcttgatttggcaaaacagagaaaaaatgtgtggatgatcaaccacttacaagaggcaaggcaagcaaaaggatatgacaatccgtccttccttagaaagctgaaagctgataaggaatttcggcagaaagtaatgttaggaactcctttcctagttatttggctggttgggtttatagcagacctaaatattgattcttggctcattaaagggctaatgtatggtggtgtttgggctacagtacagtttctttcaaaatcctttttcgatcattcaatgcatagtgcattgccccttgggatatatttggcaaccaaattctggatgtatgtgacgtggttcttctggttttggaatgatctcaactttttatttatccatcttccattccttgccaatagtgttgcacttttctacaattttggaaaatcttggaaatcagatccagggattattaaagcaacagaagagcaaaagaaaaagacaatagttgaacttgcagagacaggaagtctggacctcagtatattctgcagtacctgtttgatacgaaaaccggtgaggtccaaacattgtggtgtgtgcaaccgctgtatagcaaaatttgatcatcattgcccatgggtgggtaactgtgtaggtgcaggcaaccatagatattttatgggctacctattcttcttgctttttatgatctgctggatgatttatggttgtatatcttactggggactccactgtgagaccacttacaccaaggatggattttggacatacattactcagattgccacgtgttcaccttggatgttttggatgttcctgaacagtgttttccacttcatgtgggtggctgtattactcatgtgtcagatgtaccagatatcatgtttaggtattactacaaatgaaagaatgaatgccaggagatacaagcactttaaagtcacaacaacgtctattgaaagcccattcaaccatggatgtgtaagaaatattatagacttctttgaatttcgatgctgtggcctctttcgtcctgttatcgtggactggaccaggcagtatacaatagaatatgaccaaatatcaggatctgggtaccagctggtgtagcgacatcttatcctatgaagcatattgctgagtggtgcctgaaaattgtgtctgtccgtgtctttctcacactcgaatccacatcctttgaacaagagcatgctatgtgtagggctaatggtgaattttacagtctttttttcaacacttttattaacaaaagtaaacatggacagaacacactgccatttctgggaagagtaaagatgataaaaaataattttaatggttcttaatgtggaaattcacaacatactcaacttttgggttttgttctcacagtatttttcacaaaaaaagggtaaacttattctattgacagacatggtgtactgatcagaaatgttcagttttaactaaaactaaatttatgttatttggctaaatgttatgatgcagtctagtacgagtattgcatctaattccaggagcattgttttaagttgattgactagttattatgtacatttcagaatgtacacataaatactgtgatgaaaatcatgtgattgggatctactgtgatgttgtcttcaaaggcaggagaaaataatgttcacaataaaatgtgctaacaatgttttgtttctatcagctgttgcaatgctgatatatttctagttcagtgaaataatttgtagtaaccttactctgaggttttacggtctgataatgaagcacttgcatgagtatagtaagtcatgtttttttgttcaaatttaaaagccctgctaattgcatgacacaccacatagaatgtatactagcagatactatccagtgaagcataaattagaatttaatttgatgttcaaaaacagttccatttttaagggttaaggtggtattttcaagaaaaggcagaacaaataatgcaaaattctcagtaatagtgatacatggatatacttccttttaaattctcagctgcaaaataattgtagacaaaataatggcatttaactaaagatggagcatgatctaagtacatagcacatgtgaataaaagaaaagctgacagtatattctggtttcaataaaatgacctatcagaaagtagaatttcatccccaagagtatttcagtttatccaatattgagtaagttctgaaacagttttagaaaaaattttctttttgttaaatgtgatgcactgatcaatttttgtcacagcattttcataccttcatggtggactactagtcactgcttccataaatattgtttacagggtgagatttggtttattcatcttaagtgctgtagcaaactgtggttcgagcaacctgtgggaaatctgtgagagggaatggggtgggagatgtgggggaatggtggtcagactgatgacagatcctagaccaatgtaaagaatgtgtatctgtatataaataatttatcaaatagttttctctttgtgtctgtgttagtgtttttaaagctgctcatttcattttgtccaaccaaaaagaaaagggagataactaatgagcttctagtgatgttcaaaattgctgttaataggcattataccctgcaagttcactgcatgtctgatgcttggtaaaactagtcttccctgtaaaatgcagattacaggtattaaagcaatctagtggtatacccgccccttgccttagtaagaggagcagtgaaatgtatatagttgatgttcagtatttccaagtaccatttttatatagtagcttatttgaccataagtcacacatcaaaaaaagattacccttagtgtatgtgttttaatattagaaaattggcatatgtactttatttttgaaaagggaagagatgggtgtggggtggcaatagcattgtgccattttgtcatagaatgtaaaaattggttaactttacaaatgtcagctagttttgactactaattgggggaaattttagataatttttaaattcaaagttatttataaaatgctagaatttgttttaattttttgtattttgagccacttcacatgaagactcagttgcatttttatcgaatacatttttatcaacagttaaagactatggtggttttttcagagtttggctaagaatgttgttaccatcttctttgtttgtggtacaatattttcagtgcaaaagagatgtcattcagttaaaaagacaaacctctagatgtgtaattacatggaaaatactagcaatgtgaatgcttttgtagtaaccatcttgtagtacctgtgaaatctataactcagaaatggtcagatggtcaggagccagctatgcagcagtataccatctgtttaattattttgtaggtcctgtgtgtggaaccaactataaacccagttctaaagttgtgtatgatggtgaacctttgggaatagttcttatcaacttaattggatacttttagcaaataggaacttaattctcagcactgaacatgaattacttccttggagttttttttcattcatatttttgttgtttccaggaatttatttgatattaatgggcgtaaaacagcatcattgtacttaagctatggatgtttttattttatattttctttatttataactgtgccaagtattattttgctacttaccgtgttattctgtggaaagaaaaacctgtaaagtgtttaataaattagccctccttacataaattaaatgtcaaaattttgtaaaatattaatcagaataaatactgactctt

SEQ ID NO: 40966 - DNA, 1038 bp, Homo sapiens
ggacagagggggcgtcacgggggcaggagaagaaggaggaggaggcccgcgtcgcctccggcggggctcgcgctcgccccgcgctcgccctccgcctcgcccgagccccgggagggtgaaacgctttctcccagcatgcagcgggaggagggatttaacaccaagatggcggacggcccggatgagtacgataccgaagcgggctgtgtgccccttctccacccagaggaaatcaaaccccaaagccattataaccatggatatggtgaacctcttggacggaaaactcatattgatgattacagcacatgggacatagtcaaggctacacaatatggaatatatgaacgctgtcgagaattggtggaagcaggttatgatgtacggcaaccggacaaagaaaatgttaccctcctccattgggctgccatcaataacagaatagatttagtcaaatactatatttcgaaaggtgctattgtggatcaacttggaggggacctgaattcaactccattgcactgggccacaagacaaggccatctatccatggttgtgcaactaatgaaatatggtgcagatccttcattaattgatggagaaggatgtagctgtattcatctggctgctcagttcggacatacctcaattgttgcttatctcatagcaaaaggacaggatgtagatatgatggatcagaatggaatgacgcctttaatgtgggcagcatatagaacacatagtgtggatccaactagattgcttttaacattcaatgtttcagttaaccttggtgacaagtatcacaaaaacactgctctgcattgggcagtgctagcagggaataccacagtcattagccttcttctggaagctggagctaatgttgatgcccagaatatcaaggcaatccttaggtgtcacatggccctctagtggaagggatgctcagctggaccgaggcaactgcaggatattcccggggagttgttacccaagggattgcttttattcagggcgaatcagcactttcttgga

SEQ ID NO: 40967 - DNA, 4689 bp, Homo sapiens
ggacagagggggcgtcacgggggcaggagaagaaggaggaggaggcccgcgtcgcctccggcggggctcgcgctcgccccgcgctcgccctccgcctcgcccgagccccgggagggtgaaacgctttctcccagcatgcagcgggaggagggatttaacaccaagatggcggacggcccggatgagtacgataccgaagcgggctgtgtgccccttctccacccagaggaaatcaaaccccaaagccattataaccatggatatggtgaacctcttggacggaaaactcatattgatgattacagcacatgggacatagtcaaggctacacaatatggaatatatgaacgctgtcgagaattggtggaagcaggttatgatgtacggcaaccggacaaagaatactatatttcgaaaggtgctattgtggatcaacttggaggggacctgaattcaactccattgcactgggccacaagacaaggccatctatccatggttgtgcaactaatgaaatatggtgcagatccttcattaattgatggagaaggatgtagctgtattcatctggctgctcagttcggacatacctcaattgttgcttatctcatagcaaaaggacaggatgtagatatgatggatcagaatggaatgacgcctttaatgtgggcagcatatagaacacatagtgtggatccaactagattgcttttaacattcaatgtttcagttaaccttggtgacaagtatcacaaaaacactgctctgcattgggcagtgctagcagggaataccacagtcattagccttcttctggaagctggagctaatgttgatgcccagaatatcaagggcgaatcagcgcttgatttggcaaaacagagaaaaaatgtgtggatgatcaaccacttacaagaggcaaggcaagcaaaaggatatgacaatccgtccttccttagaaagctgaaagctgataaggaatttcggcagaaagtaatgttaggaactcctttcctagttatttggctggttgggtttatagcagacctaaatattgattcttggctcattaaagggctaatgtatggtggtgtttgggctacagtacagtttctttcaaaatcctttttcgatcattcaatgcatagtgcattgccccttgggatatatttggcaaccaaattctggatgtatgtgacgtggttcttctggttttggaatgatctcaactttttatttatccatcttccattccttgccaatagtgttgcacttttctacaattttggaaaatcttggaaatcagatccagggattattaaagcaacagaagagcaaaagaaaaagacaatagttgaacttgcagagacaggaagtctggacctcagtatattctgcagtacctgtttgatacgaaaaccggtgaggtccaaacattgtggtgtgtgcaaccgctgtatagcaaaatttgatcatcattgcccatgggtgggtaactgtgtaggtgcaggcaaccatagatattttatgggctacctattcttcttgctttttatgatctgctggatgatttatggttgtatatcttactggggactccactgtgagaccacttacaccaaggatggattttggacatacattactcagattgccacgtgttcaccttggatgttttggatgttcctgaacagtgttttccacttcatgtgggtggctgtattactcatgtgtcagatgtaccagatatcatgtttaggtattactacaaatgaaagaatgaatgccaggagatacaagcactttaaagtcacaacaacgtctattgaaagcccattcaaccatggatgtgtaagaaatattatagacttctttgaatttcgatgctgtggcctctttcgtcctgttatcgtggactggaccaggcagtatacaatagaatatgaccaaatatcaggatctgggtaccagctggtgtagcgacatcttatcctatgaagcatattgctgagtggtgcctgaaaattgtgtctgtccgtgtctttctcacactcgaatccacatcctttgaacaagagcatgctatgtgtagggctaatggtgaattttacagtctttttttcaacacttttattaacaaaagtaaacatggacagaacacactgccatttctgggaagagtaaagatgataaaaaataattttaatggttcttaatgtggaaattcacaacatactcaacttttgggttttgttctcacagtatttttcacaaaaaaagggtaaacttattctattgacagacatggtgtactgatcagaaatgttcagttttaactaaaactaaatttatgttatttggctaaatgttatgatgcagtctagtacgagtattgcatctaattccaggagcattgttttaagttgattgactagttattatgtacatttcagaatgtacacataaatactgtgatgaaaatcatgtgattgggatctactgtgatgttgtcttcaaaggcaggagaaaataatgttcacaataaaatgtgctaacaatgttttgtttctatcagctgttgcaatgctgatatatttctagttcagtgaaataatttgtagtaaccttactctgaggttttacggtctgataatgaagcacttgcatgagtatagtaagtcatgtttttttgttcaaatttaaaagccctgctaattgcatgacacaccacatagaatgtatactagcagatactatccagtgaagcataaattagaatttaatttgatgttcaaaaacagttccatttttaagggttaaggtggtattttcaagaaaaggcagaacaaataatgcaaaattctcagtaatagtgatacatggatatacttccttttaaattctcagctgcaaaataattgtagacaaaataatggcatttaactaaagatggagcatgatctaagtacatagcacatgtgaataaaagaaaagctgacagtatattctggtttcaataaaatgacctatcagaaagtagaatttcatccccaagagtatttcagtttatccaatattgagtaagttctgaaacagttttagaaaaaattttctttttgttaaatgtgatgcactgatcaatttttgtcacagcattttcataccttcatggtggactactagtcactgcttccataaatattgtttacagggtgagatttggtttattcatcttaagtgctgtagcaaactgtggttcgagcaacctgtgggaaatctgtgagagggaatggggtgggagatgtgggggaatggtggtcagactgatgacagatcctagaccaatgtaaagaatgtgtatctgtatataaataatttatcaaatagttttctctttgtgtctgtgttagtgtttttaaagctgctcatttcattttgtccaaccaaaaagaaaagggagataactaatgagcttctagtgatgttcaaaattgctgttaataggcattataccctgcaagttcactgcatgtctgatgcttggtaaaactagtcttccctgtaaaatgcagattacaggtattaaagcaatctagtggtatacccgccccttgccttagtaagaggagcagtgaaatgtatatagttgatgttcagtatttccaagtaccatttttatatagtagcttatttgaccataagtcacacatcaaaaaaagattacccttagtgtatgtgttttaatattagaaaattggcatatgtactttatttttgaaaagggaagagatgggtgtggggtggcaatagcattgtgccattttgtcatagaatgtaaaaattggttaactttacaaatgtcagctagttttgactactaattgggggaaattttagataatttttaaattcaaagttatttataaaatgctagaatttgttttaattttttgtattttgagccacttcacatgaagactcagttgcatttttatcgaatacatttttatcaacagttaaagactatggtggttttttcagagtttggctaagaatgttgttaccatcttctttgtttgtggtacaatattttcagtgcaaaagagatgtcattcagttaaaaagacaaacctctagatgtgtaattacatggaaaatactagcaatgtgaatgcttttgtagtaaccatcttgtagtacctgtgaaatctataactcagaaatggtcagatggtcaggagccagctatgcagcagtataccatctgtttaattattttgtaggtcctgtgtgtggaaccaactataaacccagttctaaagttgtgtatgatggtgaacctttgggaatagttcttatcaacttaattggatacttttagcaaataggaacttaattctcagcactgaacatgaattacttccttggagttttttttcattcatatttttgttgtttccaggaatttatttgatattaatgggcgtaaaacagcatcattgtacttaagctatggatgtttttattttatattttctttatttataactgtgccaagtattattttgctacttaccgtgttattctgtggaaagaaaaacctgtaaagtgtttaataaattagccctccttacataaattaaatgtcaaaattttgtaaaatattaatcagaataaatactgactctt

SEQ ID NO: 40968 - DNA, 4639 bp, Homo sapiens
ggacagagggggcgtcacgggggcaggagaagaaggaggaggaggcccgcgtcgcctccggcggggctcgcgctcgccccgcgctcgccctccgcctcgcccgagccccgggagggtgaaacgctttctcccagcatgcagcgggaggagggatttaacaccaagatggcggacggcccggatgagtacgataccgaagcgggctgtgtgccccttctccacccagagatatggaatatatgaacgctgtcgagaattggtggaagcaggttatgatgtacggcaaccggacaaagaaaatgttaccctcctccattgggctgccatcaataacagaatagatttagtcaaatactatatttcgaaaggtgctattgtggatcaacttggaggggacctgaattcaactccattgcactgggccacaagacaaggccatctatccatggttgtgcaactaatgaaatatggtgcagatccttcattaattgatggagaaggatgtagctgtattcatctggctgctcagttcggacatacctcaattgttgcttatctcatagcaaaaggacaggatgtagatatgatggatcagaatggaatgacgcctttaatgtgggcagcatatagaacacatagtgtggatccaactagattgcttttaacattcaatgtttcagttaaccttggtgacaagtatcacaaaaacactgctctgcattgggcagtgctagcagggaataccacagtcattagccttcttctggaagctggagctaatgttgatgcccagaatatcaagggcgaatcagcgcttgatttggcaaaacagagaaaaaatgtgtggatgatcaaccacttacaagaggcaaggcaagcaaaaggatatgacaatccgtccttccttagaaagctgaaagctgataaggaatttcggcagaaagtaatgttaggaactcctttcctagttatttggctggttgggtttatagcagacctaaatattgattcttggctcattaaagggctaatgtatggtggtgtttgggctacagtacagtttctttcaaaatcctttttcgatcattcaatgcatagtgcattgccccttgggatatatttggcaaccaaattctggatgtatgtgacgtggttcttctggttttggaatgatctcaactttttatttatccatcttccattccttgccaatagtgttgcacttttctacaattttggaaaatcttggaaatcagatccagggattattaaagcaacagaagagcaaaagaaaaagacaatagttgaacttgcagagacaggaagtctggacctcagtatattctgcagtacctgtttgatacgaaaaccggtgaggtccaaacattgtggtgtgtgcaaccgctgtatagcaaaatttgatcatcattgcccatgggtgggtaactgtgtaggtgcaggcaaccatagatattttatgggctacctattcttcttgctttttatgatctgctggatgatttatggttgtatatcttactggggactccactgtgagaccacttacaccaaggatggattttggacatacattactcagattgccacgtgttcaccttggatgttttggatgttcctgaacagtgttttccacttcatgtgggtggctgtattactcatgtgtcagatgtaccagatatcatgtttaggtattactacaaatgaaagaatgaatgccaggagatacaagcactttaaagtcacaacaacgtctattgaaagcccattcaaccatggatgtgtaagaaatattatagacttctttgaatttcgatgctgtggcctctttcgtcctgttatcgtggactggaccaggcagtatacaatagaatatgaccaaatatcaggatctgggtaccagctggtgtagcgacatcttatcctatgaagcatattgctgagtggtgcctgaaaattgtgtctgtccgtgtctttctcacactcgaatccacatcctttgaacaagagcatgctatgtgtagggctaatggtgaattttacagtctttttttcaacacttttattaacaaaagtaaacatggacagaacacactgccatttctgggaagagtaaagatgataaaaaataattttaatggttcttaatgtggaaattcacaacatactcaacttttgggttttgttctcacagtatttttcacaaaaaaagggtaaacttattctattgacagacatggtgtactgatcagaaatgttcagttttaactaaaactaaatttatgttatttggctaaatgttatgatgcagtctagtacgagtattgcatctaattccaggagcattgttttaagttgattgactagttattatgtacatttcagaatgtacacataaatactgtgatgaaaatcatgtgattgggatctactgtgatgttgtcttcaaaggcaggagaaaataatgttcacaataaaatgtgctaacaatgttttgtttctatcagctgttgcaatgctgatatatttctagttcagtgaaataatttgtagtaaccttactctgaggttttacggtctgataatgaagcacttgcatgagtatagtaagtcatgtttttttgttcaaatttaaaagccctgctaattgcatgacacaccacatagaatgtatactagcagatactatccagtgaagcataaattagaatttaatttgatgttcaaaaacagttccatttttaagggttaaggtggtattttcaagaaaaggcagaacaaataatgcaaaattctcagtaatagtgatacatggatatacttccttttaaattctcagctgcaaaataattgtagacaaaataatggcatttaactaaagatggagcatgatctaagtacatagcacatgtgaataaaagaaaagctgacagtatattctggtttcaataaaatgacctatcagaaagtagaatttcatccccaagagtatttcagtttatccaatattgagtaagttctgaaacagttttagaaaaaattttctttttgttaaatgtgatgcactgatcaatttttgtcacagcattttcataccttcatggtggactactagtcactgcttccataaatattgtttacagggtgagatttggtttattcatcttaagtgctgtagcaaactgtggttcgagcaacctgtgggaaatctgtgagagggaatggggtgggagatgtgggggaatggtggtcagactgatgacagatcctagaccaatgtaaagaatgtgtatctgtatataaataatttatcaaatagttttctctttgtgtctgtgttagtgtttttaaagctgctcatttcattttgtccaaccaaaaagaaaagggagataactaatgagcttctagtgatgttcaaaattgctgttaataggcattataccctgcaagttcactgcatgtctgatgcttggtaaaactagtcttccctgtaaaatgcagattacaggtattaaagcaatctagtggtatacccgccccttgccttagtaagaggagcagtgaaatgtatatagttgatgttcagtatttccaagtaccatttttatatagtagcttatttgaccataagtcacacatcaaaaaaagattacccttagtgtatgtgttttaatattagaaaattggcatatgtactttatttttgaaaagggaagagatgggtgtggggtggcaatagcattgtgccattttgtcatagaatgtaaaaattggttaactttacaaatgtcagctagttttgactactaattgggggaaattttagataatttttaaattcaaagttatttataaaatgctagaatttgttttaattttttgtattttgagccacttcacatgaagactcagttgcatttttatcgaatacatttttatcaacagttaaagactatggtggttttttcagagtttggctaagaatgttgttaccatcttctttgtttgtggtacaatattttcagtgcaaaagagatgtcattcagttaaaaagacaaacctctagatgtgtaattacatggaaaatactagcaatgtgaatgcttttgtagtaaccatcttgtagtacctgtgaaatctataactcagaaatggtcagatggtcaggagccagctatgcagcagtataccatctgtttaattattttgtaggtcctgtgtgtggaaccaactataaacccagttctaaagttgtgtatgatggtgaacctttgggaatagttcttatcaacttaattggatacttttagcaaataggaacttaattctcagcactgaacatgaattacttccttggagttttttttcattcatatttttgttgtttccaggaatttatttgatattaatgggcgtaaaacagcatcattgtacttaagctatggatgtttttattttatattttctttatttataactgtgccaagtattattttgctacttaccgtgttattctgtggaaagaaaaacctgtaaagtgtttaataaattagccctccttacataaattaaatgtcaaaattttgtaaaatattaatcagaataaatactgactctt

SEQ ID NO: 40969 - DNA, 363 bp, Homo sapiens
gtctatgtaatttttccctggatgtcttccccttctactcttgtgtggactgcacagtgtagctgtcagctcttccaccctgctgactggactcactggttcctaggtcccttctcttcccttattttcatttatattcctttcttttcctgaaacccatcaactattagctcctagaaggcatatggaaggtaaattttcgtccttgcatgtctaaggataattctatctacttttgttcttgatcaatggtatggttgattgcagaattcaaggtagaaaagtgttttcttttaaaactttgaaggcattctttttttctagcatccaatgttgtgcttgaagttcaataccatttacatt

SEQ ID NO: 40970 - DNA, 355 bp, Homo sapiens
tgagtgaatggttcccaataacaaaaggctggaagaatattgtatttatgtggaaaaaagagaaagaaaagaaaaatgcgctagccaaagatgactagaaacaaactaataccataaaagtcagaggaggatgaaattgaaggcaactgagaagcctggaaacacataaactaatggcaatccttgttttcagacacaatatattcttgagaaatggatggccataacatgaaatcctgactgtccacctgtttagacaataacagaaaccaaagtactacaaagcctcagagtcaaagggggccttaaaagtcatccagtcttaataagtggtgtggggacaggtagatattca

SEQ ID NO: 40971 - DNA, 531 bp, Homo sapiens
gcttgtgagaatgtcatttagagaaatcttaaagtaatttatccataatattaacttagcatgccttctctctgcaatgtacaatgtatcataggacaatgtatgatacagctcagttttgatatatcagcaagttgagtagtagtttttgtttgtttgttttagttgttttaaaagctggtgttgcagattcctatgcttagaaggaccaggcagagaataagccattaagggtgctgggaatgcaatagggagtgatggggagtgtggtaaaggggtcagcaatgcttctgccatgcctatcagggagctggtttccattagctgttggttgacccaggaatctgtacctgtgttgccagatctaaccattttccaggagaggctggaacttcatatttaaaaaatgagaatttgtcaactttaataatttggaagaaaattcaaattaaaccaataccaggcagtgtggtgtaccccacattacagaggaaagtaggggacttgggaggtacatgagtcaatctatag

SEQ ID NO: 40972 - DNA, 605 bp, Homo sapiens
tatttttgtttgtgagagaatgttgatgtatatacactttgaccagtgcaaaatttgttgtttttctttacccaaaacgttttttactgtttttttttcctgatgctattttataactagttttctggtcctcccactagcttggtgttcattaggcatgccaactcctattccttttctaacactctggcttgattggttacctaacaaacattggtggacctggaaattgatcttattaaatattttcaagtacaaaggaatgccatagtcgcaacagtggttttgtagacaaacctgggttcaattcatcactctggcattcacacttagactttggcgcaattactaattgggttgaacctcattaatctgtaaaatggatcttttatctctgagatatttccagatgtgacatagtaagtgccaggaatgttaattttctctactctgtgtatcttggaagagtaaaatgtgttttaatattaaatattctataattggtagtaatttcttttcagttcagaatactttttgtactatttgatgcttaaaatgatagatgcttattcctctctcctcaccatttgccacctaaaaaaaaa

SEQ ID NO: 40973 - DNA, 247 bp, Homo sapiens
cgtgtctcatgtctataattccagcattttgggaggctgaggtgggtgaattgctcgagctctggagtttgagaccagcctgggcaacatggtgaaaccccatctctacaaaacttacaaaacttagcttgttgtggtgacacatccctgtagtcccagctactctgggagctgagcggggaggatttgcttgagtccagggggttgagactgcaggaagccacgattgctccaccgcactccagct

SEQ ID NO: 40974 - DNA, 531 bp, Homo sapiens
tacagtctatggaaccatgagccaattaaaccctttttctttgtaaattacccagtctcaggtgtttctttagagcaacacagactgactaacacaccaagtctttagtaacccatcccgaaggagagtttgttttcctcttatttgctcatggtttcctcacttgttctgctcttgagccaggattaagattgtgagtaggggctgtcaacacagatgcctgggtgggcatccctctgcttatctccagtcctcagtttcctctgtaaaatgggaacagtaagaacagcactagccagtgattgctgtagtgatcagacatagatctcatggcatttgcctgggttccgatcccagcttggccagcagtagaaatgggagcttggatgagatcacccttctctgtgccttgtgatctgcccaccttggcctcccaaagtgctgggattacaggcatgagccaccatgcccggtgattttcttcttaaacagaagctatcaggactgaaagggatcctctagacgacctca

SEQ ID NO: 40975 - DNA, 456 bp, Homo sapiens
tacagtctatggaaccatgagccaattaaaccctttttctttgtaaattacccagtctcaggtgtttctttagagcaacacagactgactaacacaccaagtctttagtaacccatcccgaaggagagtttgttttcctcttatttgctcatggtttcctcacttgttctgctcttgagccaggattaagattgtgagtaggggctgtcaacacagatgcctgggtgggcatccctctgcttatctccagtcctcagtttcctctgtaaaatgggaacagtaagaacagcactagccagtgattgctgtagtgatcagacatagatctcatggcatttgcctgggttccgatcccagcttggccagcagtagaaatgggagcttggatgagatcacccttctctgtgccttgtgtccttaggtgtgtgctctgcataaagctgggagatgagagct

SEQ ID NO: 40976 - DNA, 436 bp, Homo sapiens
tagctgggtgcagtgcctcatggctgtaatcctatctacttggaaaactgaggtggaggaggaagattgcttgagccgtggctgttgaggctgcagtgagccaagattgtgtcactgtgctccagtctggatgacagagtgagatcctgtctcaaaacaaacaaacattcaagttttggccagagatgcagcggctcatgcctgtaatcccatcactttgggaggctgaggtgagcagatcacccgaggtcagaatttcgagaccagtctggccaagatggtgaaaccctgtctctactaaaaatgacaaaaattagcggggcatggtggcgcatgcctgtgatcccagctactcgagaggctgaggcaggagaattgcttgaacctgggtggtggaggttgccgtgagcccagatggtgccacagcactccagcc

SEQ ID NO: 40977 - DNA, 339 bp, Homo sapiens
gaacttaagccaaatctgctgtttccactcagcaaatgtgtggccacaagaggtgcttgacccgcctgcacacagctcctattaagtcttgtccatacaagcttaataataagataatatctttgctttgtatacacagtggagcctcatatgcataccataattgactatgcagggttagagaggccccaagtcaagttatgtcacagccacggcataatcaactatattcattaaaagcacaatcaggccaggctcacacctgtaatccccgcactctgggaggccaaagcaagtggatcacctgaggccagcctggccaacttggtgaaaccctat

SEQ ID NO: 40978 - DNA, 3456 bp, Homo sapiens
  misc_feature (1816)..(1816): n is a, c, g, or t
  misc_feature (2221)..(2221): n is a, c, g, or t
  misc_feature (2494)..(2494): n is a, c, g, or t
cgcgagggaagaaggtggcggctcccactcgcttctccctcgggtcgggtccgagctgccaggccgcatgccactccctgacggggcgcggaccccggggggcgtctgccgggaggcgcgcggcgggggctacaccaaccggaccttcgagtttgacgacggccaatgcgcccccaggcggccctgcgcgggggacggcgcgctcctggacaccgccggcttcaagatgagcgacctggactccgaggtgctgcccttgccgccgcgctaccgcttccgggacctgctgctgggcgacccgtccttccagaacgacgacagggtccaggtggagttctacgtcaacgagaacaccttcaaggagcggctcaagctgttcttcatcaaaaaccaaagatcgagcctgaggatccggctgttcaacttctccctgaagctgctcacctgcctgctctacattgtgcgcgtcctgctcgatgacccggccctgggcatcggatgctggggctgcccaaagcagaactactccttcaatgactcgtcctccgagatcaactgggctcctattctgtgggtggagagaaagatgacactgtgggcgatccaggtcatcgtggccataataagcttcctggagacgatgcttctcatctacctcagctacaaaggcaacatctgggagcagatcttccgcgtgtccttcgtcctggagatgatcaacactctgcccttcatcatcacgatcttctggccgccgctgcggaacctgttcatccccgtctttctgaactgctggctggccaagcacgcgctggaaaacatgattaatgacttccaccgtgccatcctgcggacacagtcagccatgttcaaccaggtcctcatcctcttctgcaccctgctgtgcctcgttttcacggggacctgcggcatccagcacctggagcgggcgggcgagaacctgtccctcctgacctccttctacttctgcatcgtcaccttctccaccgtgggctacggtgacgtcacgcccaagatctggccatcgcagctgctggtggtcatcatgatctgcgtggccctcgtggtgctcccactgcagttcgaggagctcgtctacctctggatggagcggcagaagtcagggggcaactacagccgccaccgtgcgcagacggagaagcacgtggtcctgtgtgtcagctccctcaagatcgaccttctcatggacttcctgaacgagttctacgcccacccccggctccaggactattacgtggtcatcctgtgccccacggagatggatgtccaggtgcgcagagtcctgcagatccctctgtggtcccagcgggtcatctacctccagggctctgcactcaaagaccaggacctcatgcgagccaagatggacaatggggaggcctgcttcatcctcagcagcaggaacgaggtggaccgcacggctgcagaccaccagaccatcctgcgcgcctgggccgtgaaggacttcgcccccaactgccccctctacgtccagatcctcaaacctgaaaacaagtttcacgtcaagtttgctgaccacgtggtgtgtgaggaggagtgcaagtacgccatgctggcgctgaactgcatctgcccggcgacctccaccctcatcaccctgctggtgcacacgtcccgcggccaggagggacaggagtctccggagcagtggcagcgcatgtatgggcgctgctccggcaacgaggtgtaccacatccgcatgggtgacagcaagttcttccgcgagtacgagggcaagagcttcacctacgcngccttccacgcccacaagaagtatggcgtgtgcctcatcgggctgaagcgggaggacaacaagagcatcctgctgaacccggggccccggcacatcctggccgcctctgacacctgcttctacatcaacatcaccaaggaggagaactcggccttcatcttcaagcaggaggagaagcggaagaagagggccttctcggggcaggggctgcacgagggtccggcccgcctgcccgtgcacagcatcatcgcctccatggggacagtggccatggacctgcagggcacagagcaccggcctacgcagagcggcggtgggggcgggggcagcaagctggcactgcccacggagaacggctcgggcagccggcggcccagcatcgcgcccgtcctggaactggccganagctcagccctgctgccctgcgacctgctgagcgaccagtcggaggatgaggtgacgccgtcggacgacgaggggctctccgtggtagagtatgtgaagggctaccctcccaactcgccctacatcggcagctccccaaccctgtgccacctcctgcctgtgaaagcccccttctgctgcctgcggctggacaagggctgcaagcacaacagctatgaagacgccaaggcctacgggttcaagaacaagctgatcatcgtctcggcagagacngccggcaatgggctgtacaacttcatcgtgccactgcgggcctactacagatcccgcaaggagctgaaccccatcgtgctgctgctggacaacaagcccgaccaccacttcctggaagccatctgctgcttccccatggtctactacatggagggctctgtggacaacctggacagcctgctgcagtgtggcatcatctatgcggacaacctggtggtggtggacaaggagagcaccatgagcgccgaggaggactacatggcggacgccaagaccatcgtcaacgtgcagaccatgttccggctcttccccagcctcagcatcaccacggagctcacccacccttccaacatgcgcttcatgcagttccgcgccaaggacagctactctctggctctttccaaactagaaaagagggagcgagagaatggctccaacctggccttcatgttccgcctgccgttcgccgccggccgcgtcttcagcatcagcatgttggacacactgctctaccagtccttcgtgaaggactacatgatcaccatcacccggctgctgctgggcctggacaccacgccgggctcggggtacctctgtgccatgaaaatcaccgagggcgacctgtggatccgcacgtacggccgcctcttccagaagctctgctcctccagcgccgagatccccattggcatctaccggacagagagccacgtcttctccacctcggagccccacgacctcagagcccagtcccagatctcggtgaacgtggaggactgtgaggacacacgggaagtgaaggggccctggggctcccgcgctggcaccggaggcagctcccagggccgccacacgggcggcggtgaccccgcagagcacccactgctacggcgcaagagcctgcagtgggcccggaggctgagccgcaaggcgcccaagcaggcaggccgggcggcggccgc

SEQ ID NO: 40979 - DNA, 3630 bp, Homo sapiens
gattcctcgccacattaccattagtttctattccttttacatccccaatgtctctcatatccgttgtcttttcttttggcctcccttttagagcctgggacagggctttgagaatgggggaagacgaaggctctggtattgttacccgcctttgcactgctggaagataggacagcatatttttcctaaaaggtgttgccttcttgtgtttgaggtggtttccccgggagaacttcatttcttctgggcataggggaattcgtctttttgtggtcgaggttcagaggtccctagcactcactcgtgtgcttgtgatttgctagacttcgggacccacaacctttaagcagcagaggagcacgaggatcgtgggagctaagaatagcaggacccagtgctccataaaggataatagtttccagtacactatccctcatgatgactccttaagtggttcatcgtctgcatcttcgtgtgaaccagtgagtgattttccagcatctttccgaaaatctacctactggatgaagatgagaagaatcaagccagctgctacttctcatgtcgaagggtcaggtggagtatcagccaaggggaaaaggaaacccaggcaggaagaagatgaagactatcgagaatttcctcagaagaagcataagctttatgggaggaagcaacggcctaaaactcagcccaatcccaaatcccaggcccgtcgtattcggaaggaaccaccagtttatgcagcaggcagtttggaggagcaatggtacttagaaatcgttgataaaggcagtgtctcctgccctacctgccaggcagtggggaggaagaccatagagggtttaaagaaacacatggaaaactgcaagcaggaaatgtttacttgtcatcattgtgggaaacaacttcgttcactggcagggatgaagtatcatgtcatggcaaatcataatagtttgcccattttgaaagccggagatgaaatagatgagccaagtgagagggaaaggctccgaacagttctaaagagactgggaaagctcaggtgcatgcgtgagagttgctccagtagcttcaccagcatcatgggatatctctaccatgtcagaaaatgtggcaaaggggctgcagagctggaaaagatgaccctgaaatgtcaccactgtggaaaaccatataggtcgaaggctggacttgcatatcacctgaggtcagagcatgggcctatatccttctttccagagtcaggacagccagagtgcttaaaggagatgaacctagagtcaaagagtgggggccgagttcagagacgttctgccaagatagctgtataccacctacaggagctggcctctgctgaactggccaaggaatggcccaagaggaaggtgcttcaggacctggtacctgatgatcgaaagttaaaatatactcgtccagggctccctaccttcagccaggaagtactacataaatggaagacagatatcaagaaatatcatcgtattcagtgtcctaaccagggctgtgaggctgtctacagcagtgtatctggccttaaagctcacctgggctcttgtacattgggaaactttgtggctggaaaatacaaatgtcttctatgtcagaaagaatttgtgtcagagagtggtgtcaagtatcacatcaactccgtccatgctgaggactggttcgttgtaaacccaacaacaaccaaaagctttgaaaagctgatgaagataaagcagcggcagcaagaagaagaaaagcggaggcagcagcacaggagcagaaggtctctaagaaggcggcagcagcctggcattgagcttcccgagacagagctgagtcttagagtagggaaggatcagaggaggaataatgaggaactggtagtgtcagcctcctgtaaggaaccagagcaggagccagtgccagcacagttccagaaagtaaagcccccaaagactaatcataaacgaggaaggaaataggcagtcagtgtaaaagtgctcctaggaaagcagatgtgatgctgttgtcacggggacctgtgctgggaggactgagtgaagattctttcagctgtttgtgtaaggctgtgactttctcagctccttcctcctgtgtaaatttcactgtcttcccttcttacattttgattcccccctccccttttagtaggttttcctgctattcctcgtcaagtcctcttgtttttttatcttgcccaaagagctccctctcaaggccaactataggctcctcttgccctgtacaaaactaagaaacctctttggttgtcctttccttcctggggtatagaatgttcttggaagctccattgatttagtagctgctccatcatctagcttgtgaaaccattccaaactaattttttaaaaccataactgatttgtcattttgtatttgtgatataacaagtctagaagttagaactgttgtcattcacataataagattactctgtctccttgggaaaaaaactttatggaggctgtttgtcctctcaatatggttttaagattgaaagtaagaaaacggatttaggatgaaaactctagaactaccctatgctgtttatactgggaaatgctttgtaccaagtagcagtgactagacccacagacatgaaaagcaaccttaggagtaaagtgacccaaacattaaaatgacaggaaagagaaagtagaagcagcaataaatactgccccaactttcctggagcccgaggcctcatccatagctatgatcacttgccctctgaagcttatttttgcttctttggttttaagaattgagaaatatcacattgcccctgatgttttgacagtctcctagtgctcctggtagtgccactaagggaaaaccaaggtgcgcattccttctccctggactttaccttacttgttagtctacgccccactgtttccacccatccccttagccaacctctgtctttttgaattttctgagaatattgtcctatcctcttttatatatggagttctctcctctttatatcctgagactttgacaccagatgtagatatttatctggagctggaaagaaaaattctttttctgtacctcatgcctatctggtaatgtttaatgggttatttctctttgagggtggctttctctggaacattggttagagcagctttgttgtcgtgtttctggattctcttccccattttgcgtaaatattggtcttatatattcttgcctattttgtggcatatgccacataaaaaatgaacctgatatagacaagtactaccttttcaaattctgaaaggctattaccactttaactctttgtgctcctccaaatagctttaaaatgtgggcttttgtgaagaccactttcaaacaagggagcactgaaacctgaattggatactgccagaataggtagttttgaaacaagttaaggacatggtatatgcactctgcattttcattggcagtgtgcccttaaagccctttcagtagatgagggttgtcagggaggagaaatgaagaagctatgttaatttctggtgagtaagacctggggaatgtttggcaatgacaaaagaaataaatgactctcagaaa

SEQ ID NO: 40980 - DNA, 3433 bp, Homo sapiens
aggcggagccgagcccacatccgggagaggagagcggaagtggcgttggtctggccggagcccttgggtgaaattgttaggcgtggagagggagtgatgtcttccagactcggtgctgtacccgccacttcgggacccacaacctttaagcagcagaggagcacgaggatcgtgggagctaagaatagcaggacccagtgctccataaaggataatagtttccagtacactatccctcatgatgactccttaagtggttcatcgtctgcatcttcgtgtgaaccagtgagtgattttccagcatctttccgaaaatctacctactggatgaagatgagaagaatcaagccagctgctacttctcatgtcgaagggtcaggtggagtatcagccaaggggaaaaggaaacccaggcaggaagaagatgaagactatcgagaatttcctcagaagaagcataagctttatgggaggaagcaacggcctaaaactcagcccaatcccaaatcccaggcccgtcgtattcggaaggaaccaccagtttatgcagcaggcagtttggaggagcaatggtacttagaaatcgttgataaaggcagtgtctcctgccctacctgccaggcagtggggaggaagaccatagagggtttaaagaaacacatggaaaactgcaagcaggaaatgtttacttgtcatcattgtgggaaacaacttcgttcactggcagggatgaagtatcatgtcatggcaaatcataatagtttgcccattttgaaagccggagatgaaatagatgagccaagtgagagggaaaggctccgaacagttctaaagagactgggaaagctcaggtgcatgcgtgagagttgctccagtagcttcaccagcatcatgggatatctctaccatgtcagaaaatgtggcaaaggggctgcagagctggaaaagatgaccctgaaatgtcaccactgtggaaaaccatataggtcgaaggctggacttgcatatcacctgaggtcagagcatgggcctatatccttctttccagagtcaggacagccagagtgcttaaaggagatgaacctagagtcaaagagtgggggccgagttcagagacgttctgccaagatagctgtataccacctacaggagctggcctctgctgaactggccaaggaatggcccaagaggaaggtgcttcaggacctggtacctgatgatcgaaagttaaaatatactcgtccagggctccctaccttcagccaggaagtactacataaatggaagacagatatcaagaaatatcatcgtattcagtgtcctaaccagggctgtgaggctgtctacagcagtgtatctggccttaaagctcacctgggctcttgtacattgggaaactttgtggctggaaaatacaaatgtcttctatgtcagaaagaatttgtgtcagagagtggtgtcaagtatcacatcaactccgtccatgctgaggactggttcgttgtaaacccaacaacaaccaaaagctttgaaaagctgatgaagataaagcagcggcagcaagaagaagaaaagcggaggcagcagcacaggagcagaaggtctctaagaaggcggcagcagcctggcattgagcttcccgagacagagctgagtcttagagtagggaaggatcagaggaggaataatgaggaactggtagtgtcagcctcctgtaaggaaccagagcaggagccagtgccagcacagttccagaaagtaaagcccccaaagactaatcataaacgaggaaggaaataggcagtcagtgtaaaagtgctcctaggaaagcagatgtgatgctgttgtcacggggacctgtgctgggaggactgagtgaagattctttcagctgtttgtgtaaggctgtgactttctcagctccttcctcctgtgtaaatttcactgtcttcccttcttacattttgattcccccctccccttttagtaggttttcctgctattcctcgtcaagtcctcttgtttttttatcttgcccaaagagctccctctcaaggccaactataggctcctcttgccctgtacaaaactaagaaacctctttggttgtcctttccttcctggggtatagaatgttcttggaagctccattgatttagtagctgctccatcatctagcttgtgaaaccattccaaactaattttttaaaaccataactgatttgtcattttgtatttgtgatataacaagtctagaagttagaactgttgtcattcacataataagattactctgtctccttgggaaaaaaactttatggaggctgtttgtcctctcaatatggttttaagattgaaagtaagaaaacggatttaggatgaaaactctagaactaccctatgctgtttatactgggaaatgctttgtaccaagtagcagtgactagacccacagacatgaaaagcaaccttaggagtaaagtgacccaaacattaaaatgacaggaaagagaaagtagaagcagcaataaatactgccccaactttcctggagcccgaggcctcatccatagctatgatcacttgccctctgaagcttatttttgcttctttggttttaagaattgagaaatatcacattgcccctgatgttttgacagtctcctagtgctcctggtagtgccactaagggaaaaccaaggtgcgcattccttctccctggactttaccttacttgttagtctacgccccactgtttccacccatccccttagccaacctctgtctttttgaattttctgagaatattgtcctatcctcttttatatatggagttctctcctctttatatcctgagactttgacaccagatgtagatatttatctggagctggaaagaaaaattctttttctgtacctcatgcctatctggtaatgtttaatgggttatttctctttgagggtggctttctctggaacattggttagagcagctttgttgtcgtgtttctggattctcttccccattttgcgtaaatattggtcttatatattcttgcctattttgtggcatatgccacataaaaaatgaacctgatatagacaagtactaccttttcaaattctgaaaggctattaccactttaactctttgtgctcctccaaatagctttaaaatgtgggcttttgtgaagaccactttcaaacaagggagcactgaaacctgaattggatactgccagaataggtagttttgaaacaagttaaggacatggtatatgcactctgcattttcattggcagtgtgcccttaaagccctttcagtagatgagggttgtcagggaggagaaatgaagaagctatgttaatttctggtgagtaagacctggggaatgtttggcaatgacaaaagaaataaatgactctcagaaa

SEQ ID NO: 40981 - DNA, 3098 bp, Homo sapiens
gtgtcatcgatgccaccgtgacccatctcatgtcgaagggtcaggtggagtatcagccaaggggaaaaggaaacccaggcaggaagaagatgaagactatcgagaatttcctcagaagaagcataagctttatgggaggaagcaacggcctaaaactcagcccaatcccaaatcccaggcccgtcgtattcggaaggaaccaccagtttatgcagcaggcagtttggaggagcaatggtacttagaaatcgttgataaaggcagtgtctcctgccctacctgccaggcagtggggaggaagaccatagagggtttaaagaaacacatggaaaactgcaagcaggaaatgtttacttgtcatcattgtgggaaacaacttcgttcactggcagggatgaagtatcatgtcatggcaaatcataatagtttgcccattttgaaagccggagatgaaatagatgagccaagtgagagggaaaggctccgaacagttctaaagagactgggaaagctcaggtgcatgcgtgagagttgctccagtagcttcaccagcatcatgggatatctctaccatgtcagaaaatgtggcaaaggggctgcagagctggaaaagatgaccctgaaatgtcaccactgtggaaaaccatataggtcgaaggctggacttgcatatcacctgaggtcagagcatgggcctatatccttctttccagagtcaggacagccagagtgcttaaaggagatgaacctagagtcaaagagtgggggccgagttcagagacgttctgccaagatagctgtataccacctacaggagctggcctctgctgaactggccaaggaatggcccaagaggaaggtgcttcaggacctggtacctgatgatcgaaagttaaaatatactcgtccagggctccctaccttcagccaggaagtactacataaatggaagacagatatcaagaaatatcatcgtattcagtgtcctaaccagggctgtgaggctgtctacagcagtgtatctggccttaaagctcacctgggctcttgtacattgggaaactttgtggctggaaaatacaaatgtcttctatgtcagaaagaatttgtgtcagagagtggtgtcaagtatcacatcaactccgtccatgctgaggactggttcgttgtaaacccaacaacaaccaaaagctttgaaaagctgatgaagataaagcagcggcagcaagaagaagaaaagcggaggcagcagcacaggagcagaaggtctctaagaaggcggcagcagcctggcattgagcttcccgagacagagctgagtcttagagtagggaaggatcagaggaggaataatgaggaactggtagtgtcagcctcctgtaaggaaccagagcaggagccagtgccagcacagttccagaaagtaaagcccccaaagactaatcataaacgaggaaggaaataggcagtcagtgtaaaagtgctcctaggaaagcagatgtgatgctgttgtcacggggacctgtgctgggaggactgagtgaagattctttcagctgtttgtgtaaggctgtgactttctcagctccttcctcctgtgtaaatttcactgtcttcccttcttacattttgattcccccctccccttttagtaggttttcctgctattcctcgtcaagtcctcttgtttttttatcttgcccaaagagctccctctcaaggccaactataggctcctcttgccctgtacaaaactaagaaacctctttggttgtcctttccttcctggggtatagaatgttcttggaagctccattgatttagtagctgctccatcatctagcttgtgaaaccattccaaactaattttttaaaaccataactgatttgtcattttgtatttgtgatataacaagtctagaagttagaactgttgtcattcacataataagattactctgtctccttgggaaaaaaactttatggaggctgtttgtcctctcaatatggttttaagattgaaagtaagaaaacggatttaggatgaaaactctagaactaccctatgctgtttatactgggaaatgctttgtaccaagtagcagtgactagacccacagacatgaaaagcaaccttaggagtaaagtgacccaaacattaaaatgacaggaaagagaaagtagaagcagcaataaatactgccccaactttcctggagcccgaggcctcatccatagctatgatcacttgccctctgaagcttatttttgcttctttggttttaagaattgagaaatatcacattgcccctgatgttttgacagtctcctagtgctcctggtagtgccactaagggaaaaccaaggtgcgcattccttctccctggactttaccttacttgttagtctacgccccactgtttccacccatccccttagccaacctctgtctttttgaattttctgagaatattgtcctatcctcttttatatatggagttctctcctctttatatcctgagactttgacaccagatgtagatatttatctggagctggaaagaaaaattctttttctgtacctcatgcctatctggtaatgtttaatgggttatttctctttgagggtggctttctctggaacattggttagagcagctttgttgtcgtgtttctggattctcttccccattttgcgtaaatattggtcttatatattcttgcctattttgtggcatatgccacataaaaaatgaacctgatatagacaagtactaccttttcaaattctgaaaggctattaccactttaactctttgtgctcctccaaatagctttaaaatgtgggcttttgtgaagaccactttcaaacaagggagcactgaaacctgaattggatactgccagaataggtagttttgaaacaagttaaggacatggtatatgcactctgcattttcattggcagtgtgcccttaaagccctttcagtagatgagggttgtcagggaggagaaatgaagaagctatgttaatttctggtgagtaagacctggggaatgtttggcaatgacaaaagaaataaatgactctcagaaa

SEQ ID NO: 40982 - DNA, 2308 bp, Homo sapiens
gcaaaatttatgctcttagttacgatgccgtcatggaataaaaatctcctatggctcagtgtgttacatctcatgatgagatttatactcaggagatataagagtgggatgatgctaagtaaacagactttgtagatcatttattaaagtccctagaattacgccttacaaaatatgtgcttgtaatagctgctctgtgttggatttctccatcttaaaatatagaatcctgaggtatggttccatatctgtttccttcttactgtgttctgccctaatcatgccttttttccattcttcctccacctttctttatgttcttcactatattttcgactggatgacatttctattttgcctctctaggactggttcgttgtaaacccaacaacaaccaaaagctttgaaaagctgatgaagataaagcagcggcagcaagaagaagaaaagcggaggcagcagcacaggagcagaaggtctctaagaaggcggcagcagcctggcattgagcttcccgagacagagctgagtcttagagtagggaaggatcagaggaggaataatgaggaactggtagtgtcagcctcctgtaaggaaccagagcaggagccagtgccagcacagttccagaaagtaaagcccccaaagactaatcataaacgaggaaggaaataggcagtcagtgtaaaagtgctcctaggaaagcagatgtgatgctgttgtcacggggacctgtgctgggaggactgagtgaagattctttcagctgtttgtgtaaggctgtgactttctcagctccttcctcctgtgtaaatttcactgtcttcccttcttacattttgattcccccctccccttttagtaggttttcctgctattcctcgtcaagtcctcttgtttttttatcttgcccaaagagctccctctcaaggccaactataggctcctcttgccctgtacaaaactaagaaacctctttggttgtcctttccttcctggggtatagaatgttcttggaagctccattgatttagtagctgctccatcatctagcttgtgaaaccattccaaactaattttttaaaaccataactgatttgtcattttgtatttgtgatataacaagtctagaagttagaactgttgtcattcacataataagattactctgtctccttgggaaaaaaactttatggaggctgtttgtcctctcaatatggttttaagattgaaagtaagaaaacggatttaggatgaaaactctagaactaccctatgctgtttatactgggaaatgctttgtaccaagtagcagtgactagacccacagacatgaaaagcaaccttaggagtaaagtgacccaaacattaaaatgacaggaaagagaaagtagaagcagcaataaatactgccccaactttcctggagcccgaggcctcatccatagctatgatcacttgccctctgaagcttatttttgcttctttggttttaagaattgagaaatatcacattgcccctgatgttttgacagtctcctagtgctcctggtagtgccactaagggaaaaccaaggtgcgcattccttctccctggactttaccttacttgttagtctacgccccactgtttccacccatccccttagccaacctctgtctttttgaattttctgagaatattgtcctatcctcttttatatatggagttctctcctctttatatcctgagactttgacaccagatgtagatatttatctggagctggaaagaaaaattctttttctgtacctcatgcctatctggtaatgtttaatgggttatttctctttgagggtggctttctctggaacattggttagagcagctttgttgtcgtgtttctggattctcttccccattttgcgtaaatattggtcttatatattcttgcctattttgtggcatatgccacataaaaaatgaacctgatatagacaagtactaccttttcaaattctgaaaggctattaccactttaactctttgtgctcctccaaatagctttaaaatgtgggcttttgtgaagaccactttcaaacaagggagcactgaaacctgaattggatactgccagaataggtagttttgaaacaagttaaggacatggtatatgcactctgcattttcattggcagtgtgcccttaaagccctttcagtagatgagggttgtcagggaggagaaatgaagaagctatgttaatttctggtgagtaagacctggggaatgtttggcaatgacaaaagaaataaatgactctcagaaa

SEQ ID NO: 40983 - DNA, 3496 bp, Homo sapiens
aggcggagccgagcccacatccgggagaggagagcggaagtggcgttggtctggccggagcccttgggtgaaattgttaggcgtggagagggagtgatgtcttccagactcggtgctgtacccgcctagcaggacccagtgctccataaaggataatagtttccagtacactatccctcatgatgactccttaagtggttcatcgtctgcatcttcgtgtgaaccagtgagtgattttccagcatctttccgaaaatctacctactggatgaagatgagaagaatcaagccagctgctacttctcatgtcgaagggtcaggtggagtatcagccaaggggaaaaggaaacccaggcaggaagaagatgaagactatcgagaatttcctcagaagaagcataagctttatgggaggaagcaacggcctaaaactcagcccaatcccaaatcccaggcccgtcgtattcggaaggaaccaccagtttatgcagcaggcagtttggaggagcaatggtacttagaaatcgttgataaaggcagtgtctcctgccctacctgccaggcagtggggaggaagaccatagagggtttaaagaaacacatggaaaactgcaagcaggaaatgtttacttgtcatcattgtgggaaacaacttcgttcactggcagggatgaagtatcatgtcatggcaaatcataatagtttgcccattttgaaagccggagatgaaatagatgagccaagtgagagggaaaggctccgaacagttctaaagagactgggaaagctcaggtgcatgcgtgagagttgctccagtagcttcaccagcatcatgggatatctctaccatgtcagaaaatgtggcaaaggggctgcagagctggaaaagatgaccctgaaatgtcaccactgtggaaaaccatataggtcgaaggctggacttgcatatcacctgaggtcagagcatgggcctatatccttctttccagagtcaggacagccagagtgcttaaaggagatgaacctagagtcaaagagtgggggccgagttcagagacgttctgccaagatagctgtataccacctacaggagctggcctctgctgaactggccaaggaatggcccaagaggaaggtgcttcaggacctggtacctgatgatcgaaagttaaaatatactcgtccagggctccctaccttcagccaggaagtactacataaatggaagacagatatcaagaaatatcatcgtattcagtgtcctaaccagggctgtgaggctgtctacagcagtgtatctggccttaaagctcacctgggctcttgtacattgggaaactttgtggctggaaaatacaaatgtcttctatgtcagaaagaatttgtgtcagagagtggtgtcaagtatcacatcaactccgtccatgctgaggactggttcgttgtaaacccaacaacaaccaaaagctttgaaaagctgatgaagataaagcagcggcagcaagaagaagaaaagcggaggcagcagcacaggagcagaaggtctctaagaaggcggcagcagcctggcattgagcttcccgagacagagctgagtcttagagtagggaaggatcagaggaggaataatgaggaactggtagtgtcagcctcctgtaaggaaccagagcaggagccagtgccagcacagttccagaaagtaaagcccccaaagactaatcataaacgaggaaggaaataggcagtcagtgtaaaagtgctcctaggaaagcagatgtgatgctgttgtcacggggacctgtgctgggaggactgagtgaagattctttcagctgtttgtgtaaggctgtgactttctcagctccttcctcctgtgtaaatttcactgtcttcccttcttacattttgattcccccctccccttttagtaggttttcctgctattcctcgtcaagtcctcttgtttttttatcttgcccaaagagctccctctcaaggccaactataggctcctcttgccctgtacaaaactaagaaacctctttggttgtcctttccttcctggggtatagaatgttcttggaagctccattgatttagtagctgctccatcatctagcttgtgaaaccattccaaactaattttttaaaaccataactgatttgtcattttgtatttgtgatataacaagtctagaagttagaactgttgtcattcacataataagattactctgtctccttgggaaaaaaactttatggaggctgtttgtcctctcaatatggttttaagattgaaagtaagaaaacggatttaggatgaaaactctagaactaccctatgctgtttatactgggaaatgctttgtaccaagtagcagtgactagacccacagacatgaaaagcaaccttaggagtaaagtgacccaaacattaaaatgacaggaaagagaaagtagaagcagcaataaatactgccccaactttcctggagcccgaggcctcatccatagctatgatcacttgccctctgaagcttatttttgcttctttggttttaagaattgagaaatatcacattgcccctgatgttttgacagtctcctagtgctcctggtagtgccactaagggaaaaccaaggtgcgcattccttctccctggactttaccttacttgttagtctacgccccactgtttccacccatccccttagccaacctctgtctttttgaattttctgagaatattgtcctatcctcttttatatatggagttctctcctctttatatcctgagactttgacaccagatgtagatatttatctggagctggaaagaaaaattctttttctgtacctcatgcctatctggtaatgtttaatgggttatttctctttgagggtggctttctctggaacattggttagagcagctttgttgtcgtgtttctggattctcttccccattttgcgtaaatattggtcttatatattcttgcctattttgtggcatatgccacataaaaaatgaacctgatatagacaagtactaccttttcaaattctgaaaggctattaccactttaactctttgtgctcctccaaatagctttaaaatgtgggcttttgtgaagaccactttcaaacaagggagcactgaaacctgaattggatactgccagaataggtagttttgaaacaagttaaggacatggtatatgcactctgcattttcattggcagtgtgcccttaaagccctttcagtagatgagggttgtcagggaggagaaatgaagaagctatgttaatttctggtgagtaagacctggggaatgtttggcaatgacaaaagaaataaatgactctcagaaagatgtttccagtgttctttgacgccgacctgctgcatgactccttgacactgtatgggggtaagaagatggctagagatgggggtgagtttgaaataaattccacatgcagttgtctcagta

SEQ ID NO: 40984 - DNA, 1026 bp, Homo sapiens
tcagcgctaaccctatgcgtgtacaagtagcagtgactagacccacagacatgaaaagcaaccttaggagtaaagtgacccaaacattaaaatgacaggaaagagaaagtagaagcagcaataaatactgccccaactttcctggagcccgaggcctcatccatagctatgatcacttgccctctgaagcttatttttgcttctttggttttaagaattgagaaatatcacattgcccctgatgttttgacagtctcctagtgctcctggtagtgccactaagggaaaaccaaggtgcgcattccttctccctggactttaccttacttgttagtctacgccccactgtttccacccatccccttagccaacctctgtctttttgaattttctgagaatattgtcctatcctcttttatatatggagttctctcctctttatatcctgagactttgacaccagatgtagatatttatctggagctggaaagaaaaattctttttctgtacctcatgcctatctggtaatgtttaatgggttatttctctttgagggtggctttctctggaacattggttagagcagctttgttgtcgtgtttctggattctcttccccattttgcgtaaatattggtcttatatattcttgcctattttgtggcatatgccacataaaaaatgaacctgatatagacaagtactaccttttcaaattctgaaaggctattaccactttaactctttgtgctcctccaaatagctttaaaatgtgggcttttgtgaagaccactttcaaacaagggagcactgaaacctgaattggatactgccagaataggtagttttgaaacaagttaaggacatggtatatgcactctgcattttcattggcagtgtgcccttaaagccctttcagtagatgagggttgtcagggaggagaaatgaagaagctatgttaatttctggtgagtaagacctggggaatgtttggcaatgacaaaagaaataaatgactctcagaaa

SEQ ID NO: 40985 - DNA, 1755 bp, Homo sapiens
  misc_feature (1739)..(1739): n is a, c, g, or t
  misc_feature (1747)..(1747): n is a, c, g, or t
  misc_feature (1753)..(1753): n is a, c, g, or t
  misc_feature (1755)..(1755): n is a, c, g, or t
aggcggagccgagcccacatccgggagaggagagcggaagtggcgttggtctggccggagcccttgggtgaaattgttaggcgtggagagggagtgatgtcttccagactcggtgctgtacccgcctagcaggacccagtgctccataaaggataatagtttccagtacactatccctcatgatgactccttaagtggttcatcgtctgcatcttcgtgtgaaccagtgagtgattttccagcatctttccgaaaatctacctactggatgaagatgagaagaatcaagccagctgctacttctcatgtcgaagggtcaggtggagtatcagccaaggggaaaaggaaacccaggcaggaagaagatgaagactatcgagaatttcctcagaagaagcataagctttatgggaggaagcaacggcctaaaactcagcccaatcccaaatcccaggcccgtcgtattcggaaggaaccaccagtttatgcagcaggcagtttggaggagcaatggtacttagaaatcgttgataaaggcagtgtctcctgccctacctgccaggcagtggggaggaagaccatagagggtttaaagaaacacatggaaaactgcaagcaggaaatgtttacttgtcatcattgtgggaaacaacttcgttcactggcagggatgaagtatcatgtcatggcaaatcataatagtttgcccattttgaaagccggagatgaaatagatgagccaagtgagagggaaaggctccgaacagttctaaagagactgggaaagctcaggtgcatgcgtgagagttgctccagtagcttcaccagcatcatgggatatctctaccatgtcagaaaatgtggcaaaggggctgcagagctggaaaagatgaccctgaaatgtcaccactgtggaaaaccatataggtcgaaggctggacttgcatatcacctgaggtcagagcatgggcctatatccttctttccagagtcaggacagccagagtgcttaaaggagatgaacctagagtcaaagagtgggggccgagttcagagacgttctgccaagatagctgtataccacctacaggagctggcctctgctgaactggccaaggaatggcccaagaggaaggtgcttcaggacctggtacctgatgatcgaaagttaaaatatactcgtccagggctccctaccttcagccaggaagtactacataaatggaagacagatatcaagaaatatcatcgtattcagtgtcctaaccagggctgtgaggctgtctacagcagtgtatctggccttaaagctcacctgggctcttgtacattgggaaactttgtggctggaaaatacaaatgtcttctatgtcagaaagaatttgtgtcagagagtggtgtcaagtatcacatcaactccgtccatgctgaggactggttcgttgtaaacccaacaacaaccaaaagctttgaaaagctgatgaagataaagcagcggcagcaagaagaagaaaagcggaggcagcagcacaggagcagaaggtctctaagaaggcggcagcagcctggcattgagcttcccgagacagagctgagtcttagagtagggaaggatcagaggaggaataatgaggaactggtagtgtcagcctcctgtaaggaaccagagcaggagccagtgccagcacagttccagaaagtaaagcccccaaagactaatcataacgctggggagttcnaaaaaaanaaaagntn

SEQ ID NO: 40986 - DNA, 1777 bp, Homo sapiens
aggcggagccgagcccacatccgggagaggagagcggaagtggcgttggtctggccggagcccttgggtgaaattgttaggcgtggagagggagtgatgtcttccagactcggtgctgtacccgcctagcaggacccagtgctccataaaggataatagtttccagtacactatccctcatgatgactccttaagtggttcatcgtctgcatcttcgtgtgaaccagtgagtgattttccagcatctttccgaaaatctacctactggatgaagatgagaagaatcaagccagctgctacttctcatgtcgaagggtcaggtggagtatcagccaaggggaaaaggaaacccaggcaggaagaagatgaagactatcgagaatttcctcagaagaagcataagctttatgggaggaagcaacggcctaaaactcagcccaatcccaaatcccaggcccgtcgtattcggaaggaaccaccagtttatgcagcaggcagtttggaggagcaatggtacttagaaatcgttgataaaggcagtgtctcctgccctacctgccaggcagtggggaggaagaccatagagggtttaaagaaacacatggaaaactgcaagcaggaaatgtttacttgtcatcattgtgggaaacaacttcgttcactggcagggatgaagtatcatgtcatggcaaatcataatagtttgcccattttgaaagccggagatgaaatagatgagccaagtgagagggaaaggctccgaacagttctaaagagactgggaaagctcaggtgcatgcgtgagagttgctccagtagcttcaccagcatcatgggatatctctaccatgtcagaaaatgtggcaaaggggctgcagagctggaaaagatgaccctgaaatgtcaccactgtggaaaaccatataggtcgaaggctggacttgcatatcacctgaggtcagagcatgggcctatatccttctttccagagtcaggacagccagagtgcttaaaggagatgaacctagagtcaaagagtgggggccgagttcagagacgttctgccaagatagctgtataccacctacaggagctggcctctgctgaactggccaaggaatggcccaagaggaaggtgcttcaggacctggtacctgatgatcgaaagttaaaatatactcgtccagggctccctaccttcagccaggaagtactacataaatggaagacagatatcaagaaatatcatcgtattcagtgtcctaaccagggctgtgaggctgtctacagcagtgtatctggccttaaagctcacctgggctcttgtacattgggaaactttgtggctggaaaatacaaatgtcttctatgtcagaaagaatttgtgtcagagagtggtgtcaagtatcacatcaactccgtccatgctgaggtgaggtttttgtaatcctgtgggcctgatatgtaagccacaagagaggtagactttgtccctattgttatggactaaggctgtcaaggaaagtatctctaaagtggttaccagagccattagagttaaaatattctctaaacttagatatataattgtatttttctgtgaaagtatttgaagtcactgtgaggggtgggcggggtggcttatgcctctaatcccagcactttgggaggccaaggcaggaggatcacttgaacccaggagtttgaggctgcagtgagctggttgcgctactgcactccagcctaggcaacagagatcctgactcaaaaaaaaaaa

SEQ ID NO: 40987 - DNA, 411 bp, Homo sapiens
acaaatgtcttctatgtcagaaagaatttgtgtcagagagtggtgtcaagtatcacatcaactccgtccatgctgaggtgaggtttttgtaatcctgtgggcctgatatgtaagccacaagagaggtagactttgtccctattgttatggactaaggctgtcaaggaaagtatctctaaagtggttaccagagccattagagttaaaatattctctaaacttagatatataattgtatttttctgtgaaagtatttgaagtcactgtgaggggtgggcggggtggcttatgcctctaatcccagcactttgggaggccaaggcaggaggatcacttgaacccaggagtttgaggctgcagtgagctggttgcgctactgcactccagcctaggcaacagagatcctgactc

SEQ ID NO: 40988 - DNA, 621 bp, Homo sapiens
attctggattttgaaggcactttttgcgacagtagatcatagtgggaagaattgtacattggtgcctctggtgaattttgggcatttgatcattttgggggaggaaccaagacaacctggaagtgaagtgaaaggaacataggaaggtagaaagatgtggcatattacctgagaaaaagtaggagactttcaggttgtgttgaagtagggtgggtgattggaacagaattgcactaggatggatttatgttgataatcatccatccaagctggttttcctaaatctattactatattggatctttttccttcttatctttgctgaagtagaattccctcttttcatctctaacaatccctacacatagcccagttatgttgctgaatttaccagtaattcttttttgtttctctcttggaaatagggaaactttgtggctggaaaatacaaatgtcttctatgtcagaaagaatttgtgtcagagagtggtgtcaagtatcacatcaactccgtccatgctgaggtgaggtttttgtaatcctgtgggcctgatatgtaagccacaagagaggtagactttgtccctattgttatggactaaggctgtcaaggaaagtatc

SEQ ID NO: 40989 - DNA, 3374 bp, Homo sapiens
aggcggagccgagcccacatccgggagaggagagcggaagtggcgttggtctggccggagcccttgggtgaaattgttaggcgtggagagggagtgatgtcttccagactcggtgctgtacccgcctagcaggacccagtgctccataaaggataatagtttccagtacactatccctcatgatgactccttaagtggttcatcgtctgcatcttcgtgtgaaccagtgagtgattttccagcatctttccgaaaatctacctactggatgaagatgagaagaatcaagccagctgctacttctcatgtcgaagggtcaggtggagtatcagccaaggggaaaaggaaacccaggcaggaagaagatgaagactatcgagaatttcctcagaagaagcataagctttatgggaggaagcaacggcctaaaactcagcccaatcccaaatcccaggcccgtcgtattcggaaggaaccaccagtttatgcagcaggcagtttggaggagcaatggtacttagaaatcgttgataaaggcagtgtctcctgccctacctgccaggcagtggggaggaagaccatagagggtttaaagaaacacatggaaaactgcaagcaggaaatgtttacttgtcatcattgtgggaaacaacttcgttcactggcagggatgaagtatcatgtcatggcaaatcataatagtttgcccattttgaaagccggagatgaaatagatgagccaagtgagagggaaaggctccgaacagttctaaagagactgggaaagctcaggtgcatgcgtgagagttgctccagtagcttcaccagcatcatgggatatctctaccatgtcagaaaatgtggcaaaggggctgcagagctggaaaagatgaccctgaaatgtcaccactgtggaaaaccatataggtcgaaggctggacttgcatatcacctgaggtcagagcatgggcctatatccttctttccagagtcaggacagccagagtgcttaaaggagatgaacctagagtcaaagagtgggggccgagttcagagacgttctgccaagatagctgtataccacctacaggagctggcctctgctgaactggccaaggaatggcccaagaggaaggtgcttcaggacctggtacctgatgatcgaaagttaaaatatactcgtccagggctccctaccttcagccaggaagtactacataaatggaagacagatatcaagaaatatcatcgtattcagtgtcctaaccagggctgtgaggctgtctacagcagtgtatctggccttaaagctcacctgggctcttgtacattgggaaactttgtggctggaaaatacaaatgtcttctatgtcagaaagaatttgtgtcagagagtggtgtcaagtatcacatcaactccgtccatgctgaggactggttcgttgtaaacccaacaacaaccaaaagctttgaaaagctgatgaagataaagcagcggcagcaagaagaagaaaagcggaggcagcagcacaggagcagaaggtctctaagaaggcggcagcagcctggcattgagcttcccgagacagagctgagtcttagagtagggaaggatcagaggaggaataatgaggaactggtagtgtcagcctcctgtaaggaaccagagcaggagccagtgccagcacagttccagaaagtaaagcccccaaagactaatcataaacgaggaaggaaataggcagtcagtgtaaaagtgctcctaggaaagcagatgtgatgctgttgtcacggggacctgtgctgggaggactgagtgaagattctttcagctgtttgtgtaaggctgtgactttctcagctccttcctcctgtgtaaatttcactgtcttcccttcttacattttgattcccccctccccttttagtaggttttcctgctattcctcgtcaagtcctcttgtttttttatcttgcccaaagagctccctctcaaggccaactataggctcctcttgccctgtacaaaactaagaaacctctttggttgtcctttccttcctggggtatagaatgttcttggaagctccattgatttagtagctgctccatcatctagcttgtgaaaccattccaaactaattttttaaaaccataactgatttgtcattttgtatttgtgatataacaagtctagaagttagaactgttgtcattcacataataagattactctgtctccttgggaaaaaaactttatggaggctgtttgtcctctcaatatggttttaagattgaaagtaagaaaacggatttaggatgaaaactctagaactaccctatgctgtttatactgggaaatgctttgtaccaagtagcagtgactagacccacagacatgaaaagcaaccttaggagtaaagtgacccaaacattaaaatgacaggaaagagaaagtagaagcagcaataaatactgccccaactttcctggagcccgaggcctcatccatagctatgatcacttgccctctgaagcttatttttgcttctttggttttaagaattgagaaatatcacattgcccctgatgttttgacagtctcctagtgctcctggtagtgccactaagggaaaaccaaggtgcgcattccttctccctggactttaccttacttgttagtctacgccccactgtttccacccatccccttagccaacctctgtctttttgaattttctgagaatattgtcctatcctcttttatatatggagttctctcctctttatatcctgagactttgacaccagatgtagatatttatctggagctggaaagaaaaattctttttctgtacctcatgcctatctggtaatgtttaatgggttatttctctttgagggtggctttctctggaacattggttagagcagctttgttgtcgtgtttctggattctcttccccattttgcgtaaatattggtcttatatattcttgcctattttgtggcatatgccacataaaaaatgaacctgatatagacaagtactaccttttcaaattctgaaaggctattaccactttaactctttgtgctcctccaaatagctttaaaatgtgggcttttgtgaagaccactttcaaacaagggagcactgaaacctgaattggatactgccagaataggtagttttgaaacaagttaaggacatggtatatgcactctgcattttcattggcagtgtgcccttaaagccctttcagtagatgagggttgtcagggaggagaaatgaagaagctatgttaatttctggtgagtaagacctggggaatgtttggcaatgacaaaagaaataaatgactctcagaaa

SEQ ID NO: 40990 - DNA, 3402 bp, Homo sapiens
  misc_feature (1)..(1): n is a, c, g, or t
nccaggctggtaccgcccggatgtagggcatcttgggtgaaatcgtcgaggcgtggagagggagtgatgtcttccataactcggtgctgtagggcgccacttcgggacccacagcctttaagcagcagaggagcacgaggatcgtgggagctaatagcaggacccagtgctccataaaggataatagtttccagtacactatccctcatgatgactccttaagtggttcatcgtctgcatcttcgtgtgaaccagtgagtgattttccagcatctttccgaaaatctacctactggatgaagatgagaagaatcaagccagctgctacttctcatgtcgaagggtcaggtggagtatcagccaaggggaaaaggaaacccaggcaggaagaagatgaagactatcgagaatttcctcagaagaagcataagctttatgggaggaagcaacggcctaaaactcagcccaatcccaaatcccaggcccgtcgtattcggaaggaaccaccagtttatgcagcaggcagtttggaggagcaatggtacttagaaatcgttgataaaggcagtgtctcctgccctacctgccaggcagtggggaggaagaccatagagggtttaaagaaacacatggaaaactgcaagcaggaaatgtttacttgtcatcattgtgggaaacaacttcgttcactggcagggatgaagtatcatgtcatggcaaatcataatagtttgcccattttgaaagccggagatgaaatagatgagccaagtgagagggaaaggctccgaacagttctaaagagactgggaaagctcaggtgcatgcgtgagagttgctccagtagcttcaccagcatcatgggatatctctaccatgtcagaaaatgtggcaaaggggctgcagagctggaaaagatgaccctgaaatgtcaccactgtggaaaaccatataggtcgaaggctggacttgcatatcacctgaggtcagagcatgggcctatatccttctttccagagtcaggacagccagagtgcttaaaggagatgaacctagagtcaaagagtgggggccgagttcagagacgttctgccaagatagctgtataccacctacaggagctggcctctgctgaactggccaaggaatggcccaagaggaaggtgcttcaggacctggtacctgatgatcgaaagttaaaatatactcgtccagggctccctaccttcagccaggaagtactacataaatggaagacagatatcaagaaatatcatcgtattcagtgtcctaaccagggctgtgaggctgtctacagcagtgtatctggccttaaagctcacctgggctcttgtacattgggaaactttgtggctggaaaatacaaatgtcttctatgtcagaaagaatttgtgtcagagagtggtgtcaagtatcacatcaactccgtccatgctgaggactggttcgttgtaaacccaacaacaaccaaaagctttgaaaagctgatgaagataaagcagcggcagcaagaagaagaaaagcggaggcagcagcacaggagcagaaggtctctaagaaggcggcagcagcctggcattgagcttcccgagacagagctgagtcttagagtagggaaggatcagaggaggaataatgaggaactggtagtgtcagcctcctgtaaggaaccagagcaggagccagtgccagcacagttccagaaagtaaagcccccaaagactaatcataaacgaggaaggaaataggcagtcagtgtaaaagtgctcctaggaaagcagatgtgatgctgttgtcacggggacctgtgctgggaggactgagtgaagattctttcagctgtttgtgtaaggctgtgactttctcagctccttcctcctgtgtaaatttcactgtcttcccttcttacattttgattcccccctccccttttagtaggttttcctgctattcctcgtcaagtcctcttgtttttttatcttgcccaaagagctccctctcaaggccaactataggctcctcttgccctgtacaaaactaagaaacctctttggttgtcctttccttcctggggtatagaatgttcttggaagctccattgatttagtagctgctccatcatctagcttgtgaaaccattccaaactaattttttaaaaccataactgatttgtcattttgtatttgtgatataacaagtctagaagttagaactgttgtcattcacataataagattactctgtctccttgggaaaaaaactttatggaggctgtttgtcctctcaatatggttttaagattgaaagtaagaaaacggatttaggatgaaaactctagaactaccctatgctgtttatactgggaaatgctttgtaccaagtagcagtgactagacccacagacatgaaaagcaaccttaggagtaaagtgacccaaacattaaaatgacaggaaagagaaagtagaagcagcaataaatactgccccaactttcctggagcccgaggcctcatccatagctatgatcacttgccctctgaagcttatttttgcttctttggttttaagaattgagaaatatcacattgcccctgatgttttgacagtctcctagtgctcctggtagtgccactaagggaaaaccaaggtgcgcattccttctccctggactttaccttacttgttagtctacgccccactgtttccacccatccccttagccaacctctgtctttttgaattttctgagaatattgtcctatcctcttttatatatggagttctctcctctttatatcctgagactttgacaccagatgtagatatttatctggagctggaaagaaaaattctttttctgtacctcatgcctatctggtaatgtttaatgggttatttctctttgagggtggctttctctggaacattggttagagcagctttgttgtcgtgtttctggattctcttccccattttgcgtaaatattggtcttatatattcttgcctattttgtggcatatgccacataaaaaatgaacctgatatagacaagtactaccttttcaaattctgaaaggctattaccactttaactctttgtgctcctccaaatagctttaaaatgtgggcttttgtgaagaccactttcaaacaagggagcactgaaacctgaattggatactgccagaataggtagttttgaaacaagttaaggacatggtatatgcactctgcattttcattggcagtgtgcccttaaagccctttcagtagatgagggttgtcagggaggagaaatgaagaagctatgttaatttctggtgagtaagacctggggaatgtttggcaatgacaaaagaaataaatgactctcagaaa

SEQ ID NO: 40991 - DNA, 3187 bp, Homo sapiens
aggcggagccgagcccacatccgggagaggagagcggaagtggcgttggtctggccggagcccttgggtgaaattgttaggcgtggagagggagtgatgtcttccagactcggtgctgtacccgcctagcaggacccagtgctccataaaggataatagtttccagtacactatccctcatgatgactccttaagtggttcatcgtctgcatcttcgtgtgaaccagtgagtgattttccagcatctttccgaaaatctacctactggatgaagatgagaagaatcaagccagctgctacttctcatgtcgaagggtcaggtggagtatcagccaaggggaaaaggaaacccaggcaggaagaagatgaagactatcgagaatttcctcagaagaagcataagctttatgggaggaagcaacggcctaaaactcagcccaatcccaaatcccaggcccgtcgtattcggaaggaaccaccagtttatgcagcaggcagtttggaggagcaatggtacttagaaatcgttgataaaggcagtgtctcctgccctacctgccaggcagtggggaggaagaccatagagggtttaaagaaacacatggaaaactgcaagcaggaaatgtttacttgtcatcattgtgggaaacaacttcgttcactggcagggatgaagtatcatgtcatggcaaatcataatagtttgcccattttgaaagccggagatgaaatagatgagccaagtgagagggaaaggctccgaacagttctaaagagactgggaaagctcaggtgcatgcgtgagagttgctccagtagcttcaccagcatcatgggatatctctaccatgtcagaaaatgtggcaaaggggctgcagagctggaaaagatgaccctgaaatgtcaccactgtggaaaaccatataggtcgaaggctggacttgcatatcacctgaggtcagagcatgggcctatatccttctttccagagtcaggacagccagagtgcttaaaggagatgaacctagagtcaaagagtgggggccgagttcagagacgttctgccaagatagctgtataccacctacaggagctggcctctgctgaactggccaaggaatggcccaagaggaaggtgcttcaggacctggtacctgatgatcgaaagttaaaatatactcgtccagggctccctaccttcagccaggaagtactacataaatggaagacagatatcaagaaatatcatcgtattcagtgtcctaaccagggctgtgaggctgtctacagcagtgtatctggccttaaagctcacctgggctcttgtacattgggaaactttgtggctggaaaatacaaatgtcttctatgtcagaaagaatttgtgtcagagagtggtgtcaagtatcacatcaactccgtccatgctgaggactggttcgttgtaaacccaacaacaaccaaaagctttgaaaagctgatgaagataaagcagcggcagcaagaagaagaaaagcggaggcagcagcacaggagcagaaggtctctaagaaggcggcagcagcctggcattgagcttcccgagacagagctgagtcttagagtagggaaggatcagaggaggactgagtgaagattctttcagctgtttgtgtaaggctgtgactttctcagctccttcctcctgtgtaaatttcactgtcttcccttcttacattttgattcccccctccccttttagtaggttttcctgctattcctcgtcaagtcctcttgtttttttatcttgcccaaagagctccctctcaaggccaactataggctcctcttgccctgtacaaaactaagaaacctctttggttgtcctttccttcctggggtatagaatgttcttggaagctccattgatttagtagctgctccatcatctagcttgtgaaaccattccaaactaattttttaaaaccataactgatttgtcattttgtatttgtgatataacaagtctagaagttagaactgttgtcattcacataataagattactctgtctccttgggaaaaaaactttatggaggctgtttgtcctctcaatatggttttaagattgaaagtaagaaaacggatttaggatgaaaactctagaactaccctatgctgtttatactgggaaatgctttgtaccaagtagcagtgactagacccacagacatgaaaagcaaccttaggagtaaagtgacccaaacattaaaatgacaggaaagagaaagtagaagcagcaataaatactgccccaactttcctggagcccgaggcctcatccatagctatgatcacttgccctctgaagcttatttttgcttctttggttttaagaattgagaaatatcacattgcccctgatgttttgacagtctcctagtgctcctggtagtgccactaagggaaaaccaaggtgcgcattccttctccctggactttaccttacttgttagtctacgccccactgtttccacccatccccttagccaacctctgtctttttgaattttctgagaatattgtcctatcctcttttatatatggagttctctcctctttatatcctgagactttgacaccagatgtagatatttatctggagctggaaagaaaaattctttttctgtacctcatgcctatctggtaatgtttaatgggttatttctctttgagggtggctttctctggaacattggttagagcagctttgttgtcgtgtttctggattctcttccccattttgcgtaaatattggtcttatatattcttgcctattttgtggcatatgccacataaaaaatgaacctgatatagacaagtactaccttttcaaattctgaaaggctattaccactttaactctttgtgctcctccaaatagctttaaaatgtgggcttttgtgaagaccactttcaaacaagggagcactgaaacctgaattggatactgccagaataggtagttttgaaacaagttaaggacatggtatatgcactctgcattttcattggcagtgtgcccttaaagccctttcagtagatgagggttgtcagggaggagaaatgaagaagctatgttaatttctggtgagtaagacctggggaatgtttggcaatgacaaaagaaataaatgactctcagaaa

SEQ ID NO: 40992 - DNA, 3014 bp, Homo sapiens
aggcggagccgagcccacatccgggagaggagagcggaagtggcgttggtctggccggagcccttgggtgaaattgttaggcgtggagagggagtgatgtcttccagactcggtgctgtacccgcctagcaggacccagtgctccataaaggataatagtttccagtacactatccctcatgatgactccttaagtggttcatcgtctgcatcttcgtgtgaaccagtgagtgattttccagcatctttccgaaaatctacctactggatgaagatgagaagaatcaagccagctgctacttctcatgtcgaagggtcaggtggagtatcagccaaggggaaaaggaaacccaggcaggaagaagatgaagactatcgagaatttcctcagaagaagcataagctttatgggaggaagcaacggcctaaaactcagcccaatcccaaatcccaggcccgtcgtattcggaaggaaccaccagtttatgcagcaggcagtttggaggagcaatggtacttagaaatcgttgataaaggcagtgtctcctgccctacctgccaggcagtggggaggaagaccatagagggtttaaagaaacacatggaaaactgcaagcaggaaatgtttacttgtcatcattgtgggaaacaacttcgttcactggcagggatgaagtatcatgtcatggcaaatcataatagtttgcccattttgaaagccggagatgaaatagatgagccaagtgagagggaaaggctccgaacagttctaaagagactgggaaagctcaggtgcatgcgtgagagttgctccagtagcttcaccagcatcatgggatatctctaccatgtcagaaaatgtggcaaaggggctgcagagctggaaaagatgaccctgaaatgtcaccactgtggaaaaccatataggtcgaaggctggacttgcatatcacctgaggtcagagcatgggcctatatccttctttccagagtcaggacagccagagtgcttaaaggagatgaacctagagtcaaagagtgggggccgagttcagagacgttctgccaagatagctgtataccacctacaggagctggcctctgctgaactggccaaggaatggcccaagaggaaggtgcttcaggacctggtacctgatgatcgaaagttaaaatatactcgtccagggctccctaccttcagccaggaagtactacataaatggaagacagatatcaagaaatatcatcgtattcagtgtcctaaccagggctgtgaggctgtctacagcagtgtatctggccttaaagctcacctgggctcttgtacattgggaaactttgtggctggaaaatacaaatgtcttctatgtcagaaagaatttgtgtcagagagtggtgtcaagtatcacatcaactccgtccatgctgaggactggttcgttgtaaacccaacaacaaccaaaagctttgaaaagctgatgaagataaagcagcggcagcaagaagaagaaaagcggaggcagcagcacaggagcagaaggtctctaagaaggcggcagcagcctggcattgagcttcccgagacagagctgagtcttagagtagggaaggatcagaggaggaataatgaggaactggtagtgtcagcctcctgtaaggaaccagagcaggagccagtgccagcacagttccagaaagtaaagcccccaaagactaatcataaacgaggaaggaaataggcagtcagtgtaaaagtgctcctaggaaagcagatgtgatgctgttgtcacggggacctgtgctgggaggactgagtgaagattctttcagctgtttgtgtaaggctgtgactttctcagctccttcctcctgtgtaaatttcactgtcttcccttcttacattttgattcccccctccccttttagtaggttttcctgctattcctcgtcaagtcctcttgtttttttatcttgcccaaagagctccctctcaaggccaactataggctcctcttgccctgtacaaaactaagaaacctctttggttgtcctttccttcctggggtatagaatgttcttggaagctccattgatttagtagctgctccatcatctagcttgtgaaaccattccaaactaattttttaaaaccataactgatttgtcattttgtatttgtgatataacaagtctagaagttagaactgttgtcattcacataataagattactctgtctccttgggaaaaaaactttatggaggctgtttgtcctctcaatatggttttaagattgaaagtaagaaaacggatttaggatgaaaactctagaactaccctatgctgtttatactgggaaatgctttgtaccaagtagcagtgactagacccacagacatgaaaagcaaccttaggagtaaagtgacccaaacattaaaatgacaggaaagagaaagtagaagcagcaataaatactgccccaactttcctggagcccgaggcctcatccatagctatgatcacttgccctctgaagcttatttttgcttctttggttttaagaattgagaaatatcacattgcccctgatgttttgacagtctcctagtgctcctggtagtgccactaagggaaaaccaaggtgcgcattccttctccctggactttaccttacttgttagtctacgccccactgtttccacccatccccttagccaacctctgtctttttgaattttctgagaatattgtcctatcctcttttatatatggagttctctcctctttatatcctgagactttgacaccagatgtagatatttatctggagctggaaagaaaaattctttttctgtacctcatgcctatctggtaatgtttaatgggttatttctctttgagggtggctttctctggaacattggttagagcagctttgttgtcgtgtttctggattctcttccccattttgcgtaaatattgtacacgcatagggtacaggctcgcttcgtaa

SEQ ID NO: 40993 - DNA, 482 bp, Homo sapiens
aacagcgttgcatgcaacagagaaatattttgtgacaggaagagttaattgatatatcagacttcattgttgtcttcttttaagaaattgccctaaccaccccagccttcagcaaccaccaccctgatcagtcagcagccatcaacaaggaggcaagaccctccaccagcaaaaagattacagcttgctgaaggttcagatgattgttagcattttttagtatgaagtacttttaaattaaggtggtttttttagacataatgctattgcagacttaatagactatggtatagtgtaaacataacttttatatgcactggaaaaccaaaaaatttgtgtgacttgctttactgcagtatttgctttattgtggtgatctggaaccaaacttgcaatatctctgaggtgtgcctgtaattttatttccagacttcatcttatcaaactacaatgttctgttcagtattaaatgtttacagcca

SEQ ID NO: 40994 - DNA, 1875 bp, Homo sapiens
agttcggttttgctttcactgtgacaaagcagcatcaaattcaatgcgatgtctcacaatagctgcgctctccctcttccaagcacagagattctctctctacgccacaaagccactgccatgggatggggacaggtggcatcagcaactcaagactgtcttccctaccctcttcattgcctctttcaacagtatgaagttaaaatcaggactacccaggcagggggagctgcaaagaccttggtttctctggcccttccaacagcaagtatcgccaggagcagctccctaatctacatactacagatctatccacaagaagacagatggaaccactcttttcttctgaattctagaaccttaaggaagttaacctgagtggctcagcttggatcaagtgcccatcctggtccaaacaactgtagcagcacatctgtgtatttgtgtatcttgttcctccataatcttgcagtccggggaaagtgtgcagatggatgggtccctgaaaagcaagagttgtttagacaacgctagaggtgttcagttctgggagacaagagttgggccaggttgataactagcctaagagagtcggaatcagatgaataagaactagatcttgggtgacaacctagatcaagagtcttgaggttcagtcatttcaaaaagctcaagtctcattgcttcttggccttctggctaagatcatgtgcagtatctgttcttaccagtttaatatctgatacatcctctatctgaggataatataataaatagatttttggagcaaggagatggaataggagcttgctctgtccactctacacattggcctggattgcagtacctccaggaatggtgcaccctctctaccacccccaaaaagcccaagtctcaagaggtagtctggaaaaaagtgtttttggatttacctacatttttttttccaagatggagtctcgctctgtcacccaggctggagtgcagtggcgccatcttggctcactgtaacctctgcctccaggattcaagcagttctcctgcctcagtctcccaagtagctgggattacaggtgtgtgccaaccatgctcagctaatttttctatttttagtagagacagggtttcaccatgttggccaggcaggtctcaaagtcctgacctcaggtgatctgcctgccttggcctcccgaagtgctaagattacaggcgtgagccactgcgcccggcctaatttttgtaattttagtagagacgagttttcaccatgttgaccaggctggtctcgaactcctgacctcaggtgatccacccccgccctcggcctcccaaagtgctggcactacaggcatgagccaccgctcctggccgggtttgcctacattttggagatgctgcacaccatgtccctcttttcaagagtcacgtaagtatttacatatggaagaccctgagaaggcacctgggaaaaaacctgtttaactgtaaatataataatgtatgtatttgtatgtggagctcttcttttagtggattatctataaaccgtccactgttcccaatgcatactttggagacagacctacactaccagttttcacctgctagttatttttataagggttgggatggtccatgagtgaacagtcttgatttaaagcagtgtttcccaaacctcatttatttgcctatagccttcctggagtttgtcttatatgtccgctctgtgcactattcctatatgtttttatgtaaatcaatcacttttttaaaaagcctcatcccagttatatccttaaaacaatggttattttttctcatacacatcgaaatacatatctattagaattaaaatgcttgtccatgcactatcaa

SEQ ID NO: 40995 - DNA, 527 bp, Homo sapiens
gggtagttttgtgagactcagttcccaagtttaactttttcctttggcatagtaaatttggagtcctgagattttattttcctttcacattaccaaagtaatacatagtaattatagaaagcacacgtaggcagaaaaggagaaaatattatttatcatcatacctttgagagagaagctaaccactcttaacattttgatgttttaatctttataagtgtctgtgatttttttttcaaaagtgagatacgtattttcattatctgctttttttcactgagcagtatgttttcccatgttcttaattgctaatggctgcaaagtattccatttatggatgtatagtttaaccaactcaaataaatgttaatggattaagatattacttatcattacattttaaaggttgagagtaaaattgcctgagaacctgaggagacaaggtctttactggttttcttttttctcttaatattttgctatgttactgagttaataaagcatttaagattaaagtgagaagaatg

SEQ ID NO: 40996 - DNA, 618 bp, Homo sapiens
ttcgtctaaaaaaaaaaaaaagactgtgtaagttacttaactcctctgagcttgtcatcttatctgcaaaatgggatcactagcgtgtatctcgctgagcggtacagatgaactatgtaaagcatttggcccaatgcctggcactgctaagcatgcaataaatggaagttactatcataatgtgtaacacatataattatgacaattatatttccaagatattctgggatctttacagtttcataattttgctctttttactatacaacactccttttattgaaacaaatacagattttggagtcagacagacctagtctggatttgaattccagctctccttcttaccagcctggggccatggagaatgttgtccatttccctgagcctcagtgttcttctctgtaaaatgtggatgatacctgactcccaggcattttgccaggattacatgggattcctacacagtgcaatgtctagtgataatataaatactaaaagcaacttgttaaatgtataaataaatgtgatttatttttgctcctttacatacagtatcatggatataatttgtagatgtgtgtactgtgaatacaatggccacttctcttgctccca

SEQ ID NO: 40997 - DNA, 1435 bp, Homo sapiens
  misc_feature (11)..(11): n is a, c, g, or t
agagaagcgancaaaacatagcgccaggtacgaggctgggtgtggccgggatgaagccgatcctactgcagggccatgagcggtccattacgcagattaagtataaccgcgaaggagacctcctctttactgtggccaaggaccctatcgtcaatgtatggtactctgtgaatggtgagaggctgggcacctacatgggccataccggagctgtgtggtgtgtggacgctgactgggacaccaagcatgtcctcactggctcagctgacaacagctgtcgtctctgggactgtgaaacaggaaagcagctggcccttctcaagaccaattcggctgtccggacctgcggttttgactttgggggcaacatcatcatgttctccacggacaagcagatgggctaccagtgctttgtgagcttttttgacctgcgggatccgagccagattgacaacaatgagccctacatgaagatcccttgcaatgactctaaaatcaccagtgctgtttggggacccctgggggagtgcatcatcgctggccatgagagtggagagctcaaccagtatagtgccaagtctggagaggtgttggtgaatgttaaggagcactcccggcagatcaacgacatccagttatccagggacatgaccatgtttgtgaccgcgtccaaggacaacacagccaagctttttgactccacaactcttgaacatcagaagactttccggacagaacgtcctgtcaactcagctgccctctcccccaactatgaccatgtggtcctgggcggtggtcaggaagccatggatgtaaccacaacctccaccaggattggcaagtttgaggccaggttcttccatttggcctttgaagaagagtttggaagagtcaagggtcactttggacctatcaacagtgttgccttccatcctgatggcaagagctacagcagcggcggcgaagatggttacgtccgtatccattacttcgacccacagtacttcgaatttgagtttgaggcttaagaagctggatctcctgccgggcgtggtggctcatgcctgtaatcccaccactttttttttaaggcaggcggatcacctgaggtcaggagtttaagaccagcctgaccaacatggagaaacctcgtctctactaaaaatacaaaaattagccaggcatggtggcacacgcctatagtcccagctactcaggaggctgaggcaggagaatcacttgaacccaggaggcagaggttgcagtgagctgagatcacgtcattgcactccatcctgagccacaagagcaaaactccgtctcaaaaaaaaaaaagaagaaggtggatctccaaccaggccagagaagattctcacagaaggttttgaactctaagaaataaattggtttggtaataaatggcttctggtcagat

SEQ ID NO: 40998 - DNA, 1005 bp, Homo sapiens
  misc_feature (2)..(2): n is a, c, g, or t
  misc_feature (12)..(12): n is a, c, g, or t
  misc_feature (14)..(14): n is a, c, g, or t
tnggctagtagngncgcgtgtgaatcggccgaggcttcctcgcgtcacagccgggatgaagccgatcctactgcagggccatgagcggtccattacgcagattaagtataaccgcgaaggagacctcctctttactgtggccaaggaccctatcgtcaatgtatggtactctgtgaatggtgagaggctgggcacctacatgggccataccggagctgtgtggtgtgtggacgctgactgggacaccaagcatgtcctcactggctcagctgacaacagctgtcgtctctgggactgtgaaacaggaaagcagctggcccttctcaagaccaattcggctgtccggacctgcggttttgactttgggggcaacatcatcatgttctccacggacaagcagatgggctaccagtgctttgtgagcttttttgacctgcgggatccgagccagattgacaacaatgagccctacatgaagatcccttgcaatgactctaaaatcaccagtgctgtttggggacccctgggggagtgcatcatcgctggccatgagagtggagagctcaaccagtatagtgccaagtctggagaggtgttggtgaatgttaaggagcactcccggcagatcaacgacatccagttatccagggacatgaccatgtttgtgaccgcgtccaaggacaacacagccaagctttttgactccacaactcttgaacatcagaagactttccggacagaacgtcctgtcaactcagctgccctctcccccaactatgaccatggtcctgggcgggggtcaggaagcatggttgtaaccaaactccacaggatggcagttgaggcaggtctccattggcttgaaaaattgggaagtcagggccttggcctataaggtgctcatcggggaacaacggcgacatgtacgagcaagccacatgagggaggaaacgtcgggggaagaccataaggccgcaaaccaaccaaagcgaccagaaaagaacc

SEQ ID NO: 40999 - DNA, 491 bp, Homo sapiens
agctacagcagcggcggcgaagatggttacgtccgtatccattacttcgacccacagtacttcgaatttgagtttgaggcttaagaagctggatctcctgccgggcgtggtggctcatgcctgtaatcccaccactttttttttaaggcaggcggatcacctgaggtcaggagtttaagaccagcctgaccaacatggagaaacctcgtctctactaaaaatacaaaaattagccaggcatggtggcacacgcctatagtcccagctactcaggaggctgaggcaggagaatcacttgaacccaggaggcagaggttgcagtgagctgagatcacgtcattgcactccatcctgagccacaagagcaaaactccgtctcaaaaaaaaaaaagaagaaggtggatctccaaccaggccagagaagattctcacagaaggttttgaactctaagaaataaattggtttggtaataaatggcttctggtcagat

SEQ ID NO: 41000 - DNA, 498 bp, Homo sapiens
aagtcagttcaggtcacattgggccaggacttgaatatacttcttttgattccaaatctcatgttcttttcacagttctgttctccctcttatgtttacataaagataacaatttggtggctcatgcctgtaatcccaccactttttttttaaggcaggcggatcacctgaggtcaggagtttaagaccagcctgaccaacatggagaaacctcgtctctactaaaaatacaaaaattagccaggcatggtggcacacgcctatagtcccagctactcaggaggctgaggcaggagaatcacttgaacccaggaggcagaggttgcagtgagctgagatcacgtcattgcactccatcctgagccacaagagcaaaactccgtctcaaaaaaaaaaaagaagaaggtggatctccaaccaggccagagaagattctcacagaaggttttgaactctaagaaataaattggtttggtaataaatggcttctggtcagat

SEQ ID NO: 41001 - DNA, 309 bp, Homo sapiens
ttgcccaggctggagtgcagtggcgccatctcggctcactgcgacctccacctccgcatggtggcacacgcctatagtcccagctactcaggaggctgaggcaggagaatcacttgaacccaggaggcagaggttgcagtgagctgagatcacgtcattgcactccatcctgagccacaagagcaaaactccgtctcaaaaaaaaaaaagaagaaggtggatctccaaccaggccagagaagattctcacagaaggttttgaactctaagaaataaattggtttggtaataaatggcttctggtcagat

SEQ ID NO: 41002 - DNA, 438 bp, Homo sapiens
  misc_feature (100)..(100): n is a, c, g, or t
aaaacttttggtaaagttcaacccttacccccaacagaataactttgtaagaagtgagccgtggaggggcagaaaggcatcacaccctttcctcactcantataaggagcacagcccaacactcctgtaacaaaagacaggttaacaaaagaaaagcacaacaagcttatttaatcagagttctttattttgttgtattttatttttttgaggtggagtctcactctgttgcccaggctggattgaacccaggaggcagaggttgcagtgagctgagatcacgtcattgcactccatcctgagccacaagagcaaaactccgtctcaaaaaaaaaaaagaagaaggtggatctccaaccaggccagagaagattctcacagaaggttttgaactctaagaaataaattggtttggtaataaatggcttctggtcagat

SEQ ID NO: 41003 - DNA, 1447 bp, Homo sapiens
agtgagctcgaaaccttttccggtcttactcacgttgcggccttcctcgcgtcacagccgggatgaagccgatcctactgcagggccatgagcggtccattacgcagattaagtataaccgcgaaggagacctcctctttactgtggccaaggaccctatcgtcaatgtatggtactctgtgaatggtgagaggctgggcacctacatgggccataccggagctgtgtggtgtgtggacgctgactgggacaccaagcatgtcctcactggctcagctgacaacagctgtcgtctctgggactgtgaaacaggaaagcagctggcccttctcaagaccaattcggctgtccggacctgcggttttgactttgggggcaacatcatcatgttctccacggacaagcagatgggctaccagtgctttgtgagcttttttgacctgcgggatccgagccagattgacaacaatgagccctacatgaagatcccttgcaatgactctaaaatcaccagtgctgtttggggacccctgggggagtgcatcatcgctggccatgagagtggagagctcaaccagtatagtgccaagtctggagaggtgttggtgaatgttaaggagcactcccggcagatcaacgacatccagttatccagggacatgaccatgtttgtgaccgcgtccaaggacaacacagccaagctttttgactccacaactcttgaacatcagaagactttccggacagaacgtcctgtcaactcagctgccctctcccccaactatgaccatgtggtcctgggcggtggtcaggaagccatggatgtaaccacaacctccaccaggattggcaagtttgaggccaggttcttccatttggcctttgaagaagagtttggaagagtcaagggtcactttggacctatcaacagtgttgccttccatcctgatggcaagagctacagcagcggcggcgaagatggttacgtccgtatccattacttcgacccacagtacttcgaatttgagtttgaggcttaagaagctggatctcctgccgggcgtggtggctcatgcctgtaatcccaccactttttttttaaggcaggcggatcacctgaggtcaggagtttaagaccagcctgaccaacatggagaaacctcgtctctactaaaaatacaaaaattagccaggcatggtggcacacgcctatagtcccagctactcaggaggctgaggcaggagaatcacttgaacccaggaggcagaggttgcagtgagctgagatcacgtcattgcactccatcctgagccacaagagcaaaactccgtctcaaaaaaaaaaaagaagaaggtggatctccaaccaggccagagaagattctcacagaaggttttgaactctaagaaataaattggtttggtaataaatggcttctggtcagat

SEQ ID NO: 41004 - DNA, 1588 bp, Homo sapiens
agtgagctcgaaaccttttccggtcttactcacgttgcggccttcctcgcgtcacagccgggatgaagccgatcctactgcagggccatgagcggtccattacgcagattaagtataaccgcgaaggagacctcctctttactgtggccaaggaccctatcgtcaatgtatggtactctgtgaatggtgagaggctgggcacctacatgggccataccggagctgtgtggtgtgtggacgctgactgggacaccaagcatgtcctcactggctcagctgacaacagctgtcgtctctgggactgtgaaacaggaaagcagctggcccttctcaagaccaattcggctgtccggacctgcggttttgactttgggggcaacatcatcatgttctccacggacaagcagatgggctaccagtgctttgtgagcttttttgacctgcgggatccgagccagattgacaacaatgagccctacatgaagatcccttgcaatgactctaaaatcaccagtgctgtttggggacccctgggggagtgcatcatcgctggccatgagagtggagagctcaaccagtatagtgccaagtctggagaggtgttggtgaatgttaaggagcactcccggcagatcaacgacatccagttatccagggacatgaccatgtttgtgaccgcgtccaaggacaacacagccaagctttttgactccacaactcttgaacatcagaagactttccggacagaacgtcctgtcaactcagctgccctctcccccaactatgaccatgtggtcctgggcggtggtcaggaagccatggatgtaaccacaacctccaccaggattggcaagtttgaggccaggttcttccatttggcctttgaagaagagtttggaagagtcaagggtcactttggacctatcaacagtgttgccttccatcctgatggcaagagctacagcagcggcggcgaagatggttacgtccgtatccattacttcgacccacagtacttcgaatttgagtttgaggcttaagaagctggatctcctgccgggcgtggtggctcatgcctgtaatcccaccactttttttttaaggcaggcggatcacctgaggtcaggagtttaagaccagcctgaccaacatggagaaacctcgtctctactaaaaatacaaaaattagccaggcatggtggcacacgcctatagtcccagctactcaggaggctgaggcaggagaatcacttgaacccaggaggcagaggttgcagtgagctgagatcacgtcattgcactccatcctgagccacaagagcaaaactccgtctcaaaaaaaaaaaagaagaaggtggatctccaaccaggccagagaagattctcacagaaggttttgaactctaagaaataaattggtttggtaataaatggcttctggtcagatacacaccacacaaagtacaacacacacacacaccaacacaaactccggggcatatatcgcgggcgccaacaagatgtttataacggcgcttgcaaagggtttcgcacccttttgtcaaaggggaaacgcggcccaatagaa

SEQ ID NO: 41005 - DNA, 1635 bp, Homo sapiens
agaaggatgagctaaaaaagtccctgtacgccatcttctcccagtttggccagatcctggatatcctggtatcacggagcctgaagatgaggggccaggcctttgtcatcttcaaggaggtcagcagcgccaccaacgccctgcgctccatgcagggtttccctttctatgacaaacctatgcgtatccagtatgccaagaccgactcagatatcattcacgttgcggccttcctcgcgtcacagccgggatgaagccgatcctactgcagggccatgagcggtccattacgcagattaagtataaccgcgaaggagacctcctctttactgtggccaaggaccctatcgtcaatgtatggtactctgtgaatggtgagaggctgggcacctacatgggccataccggagctgtgtggtgtgtggacgctgactgggacaccaagcatgtcctcactggctcagctgacaacagctgtcgtctctgggactgtgaaacaggaaagcagctggcccttctcaagaccaattcggctgtccggacctgcggttttgactttgggggcaacatcatcatgttctccacggacaagcagatgggctaccagtgctttgtgagcttttttgacctgcgggatccgagccagattgacaacaatgagccctacatgaagatcccttgcaatgactctaaaatcaccagtgctgtttggggacccctgggggagtgcatcatcgctggccatgagagtggagagctcaaccagtatagtgccaagtctggagaggtgttggtgaatgttaaggagcactcccggcagatcaacgacatccagttatccagggacatgaccatgtttgtgaccgcgtccaaggacaacacagccaagctttttgactccacaactcttgaacatcagaagactttccggacagaacgtcctgtcaactcagctgccctctcccccaactatgaccatgtggtcctgggcggtggtcaggaagccatggatgtaaccacaacctccaccaggattggcaagtttgaggccaggttcttccatttggcctttgaagaagagtttggaagagtcaagggtcactttggacctatcaacagtgttgccttccatcctgatggcaagagctacagcagcggcggcgaagatggttacgtccgtatccattacttcgacccacagtacttcgaatttgagtttgaggcttaagaagctggatctcctgccgggcgtggtggctcatgcctgtaatcccaccactttttttttaaggcaggcggatcacctgaggtcaggagtttaagaccagcctgaccaacatggagaaacctcgtctctactaaaaatacaaaaattagccaggcatggtggcacacgcctatagtcccagctactcaggaggctgaggcaggagaatcacttgaacccaggaggcagaggttgcagtgagctgagatcacgtcattgcactccatcctgagccacaagagcaaaactccgtctcaaaaaaaaaaaagaagaaggtggatctccaaccaggccagagaagattctcacagaaggttttgaactctaagaaataaattggtttggtaataaatggcttctggtcagat

SEQ ID NO: 41006 - DNA, 1650 bp, Homo sapiens
agtgagctcgaaaccttttccggtcttactcacgttgcggccttcctcgcgtcacagccgggatgaagccgatcctactgcagggccatgagcggtccattacgcagattaagtataaccgcgaaggagacctcctctttactgtggccaaggaccctatcgtcaatgtatggtactctgtgaatggtgagaggctgggcacctacatgggccataccggagctgtgtggtgtgtggacgctgactgggacaccaagcatgtcctcactggctcagctgacaacagctgtcgtctctgggactgtgaaacaggaaagcagctggcccttctcaagaccaattcggctgtccggacctgcggttttgactttgggggcaacatcatcatgttctccacggacaagcagatgggctaccagtgctttgtgagcttttttgacctgcgggatccgagccagattgacaacaatgagccctacatgaagatcccttgcaatgactctaaaatcaccagtgctgtttggggacccctgggggagtgcatcatcgctggccatgagagtggagagctcaaccagtatagtgccaagtctggagaggtgttggtgaatgttaaggagcactcccggcagatcaacgacatccagttatccagggacatgaccatgtttgtgaccgcgtccaaggacaacacagccaagctttttgactccacaactcttgaacatcagaagactttccggacagaacgtcctgtcaactcagctgccctctcccccaactatgaccatgtggtcctgggcggtggtcaggaagccatggatgtaaccacaacctccaccaggattggcaagtttgaggccaggttcttccatttggcctttgaagaagagtttggaagagtcaagggtcactttggacctatcaacagtgttgccttccatcctgatggcaagagctacagcagcggcggcgaagatggttacgtccgtatccattacttcgacccacagtacttcgaatttgagtttgaggcttaagaagctggatctcctgccgggcgtggtggctcatgcctgtaatcccaccactttttttttaaggcaggcggatcacctgaggtcaggagtttaagaccagcctgaccaacatggagaaacctcgtctctactaaaaatacaaaaattagccaggcatggtggcacacgcctatagtcccagctactcaggaggctgaggcaggagaatcacttgaacccaggaggcagaggttgcagtgagctgagatcacgtcattgcactccatcctgagccacaagagcaaactttatctaaaaaaaaaaaagaaaaaaaattccatattattcttagtggtgagaacctttgaaatttactcttagcaattttgaaatatacaatacactattattaactgtagtcatcatgctgtacagtatatctcaaaaacttattcctcctgtctgaatgaaactttttaccctttgactagcatctccccattcccttcactccgtctcaaaaaaaaaaaagaagaaggtggatctccaaccaggccagagaagattctcacagaaggttttgaactctaagaaataaattggtttggtaataaatggcttctggtcagat

SEQ ID NO: 41007 - DNA, 1306 bp, Homo sapiens
  misc_feature (1259)..(1259): n is a, c, g, or t
agtgagctcgaaaccttttccggtcttactcacgttgcggccttcctcgcgtcacagccgggatgaagccgatcctactgcagggccatgagcggtccattacgcagattaagtataaccgcgaaggagacctcctctttactgtggccaaggaccctatcgtcaatgtatggtactctgtgaatggtgagaggctgggcacctacatgggccataccggagctgtgtggtgtgtggacgctgactgggacaccaagcatgtcctcactggctcagctgacaacagctgtcgtctctgggactgtgaaacaggaaagcagctggcccttctcaagaccaattcggctgtccggacctgcggttttgactttgggggcaacatcatcatgttctccacggacaagcagatgggctaccagtgctttgtgagcttttttgacctgcgggatccgagccagattgacaacaatgagccctacatgaagatcccttgcaatgactctaaaatcaccagtgctgtttggggacccctgggggagtgcatcatcgctggccatgagagtggagagctcaaccagtatagtgccaagtctggagaggtgttggtgaatgttaaggagcactcccggcagatcaacgacatccagttatccagggacatgaccatgtttgtgaccgcgtccaaggacaacacagccaagctttttgactccacaactcttgaacatcagaagactttccggacagaacgtcctgtcaactcagctgccctctcccccaactatgaccatgtggtcctgggcggtggtcaggaagccatggatgtaaccacaacctccaccaggattggcaagtttgaggccaggttcttccatttggcctttgaagaagagtttggaagagtcaagggtcactttggacctatcaacagtgttgccttccatcctgatggcaagagctacagcagcggcggcgaagatggttacgtccgtatccattacttcgacccacagtacttcgaatttgagtttgaggcttaagaagctggatctcctgccgggcgtggtggctcatgcctgtaatcccaccactttttttttaaggcaggcggatcacctgaggtcaggagtttaagaccagcctgaccaacatggagaaacctcgtctctactaaaaatacaaaaattagccaggcatggtggcacacgcctatagtcccagctactcaggaggctgaggcaggagaatcacaggggggnggtgaaggactgaatggtccctcctccattggcacaaagaattttgg

SEQ ID NO: 41008 - DNA, 1061 bp, Homo sapiens
agtgagctcgaaaccttttccggtcttactcacgttgcggccttcctcgcgtcacagccgggatgaagccgatcctactgcagggccatgagcggtccattacgcagattaagtataaccgcgaaggagacctcctctttactgtggccaaggaccctatcgtcaatgtatggtactctgtgaatggtgagaggctgggcacctacatgggccataccggagctgtgtggtgtgtggacgctgactgggacaccaagcatgtcctcactggctcagctgacaacagctgtcgtctctgggactgtgaaacaggaaagcagctggcccttctcaagaccaattcggctgtccggacctgcggttttgactttgggggcaacatcatcatgttctccacggacaagcagatgggctaccagtgctttgtgagcttttttgacctgcgggatccgagccagattgacaacaatgagccctacatgaagatcccttgcaatgactctaaaatcaccagtgctgtttggggacccctgggggagtgcatcatcgctggccatgagagtggagagctcaaccagtatagtgccaagtctggagaggtgttggtgaatgttaaggagcactcccggcagatcaacgacatccagttatccagggacatgaccatgtttgtgaccgcgtccaaggacaacacagccaagctttttgactccacaactcttgaacatcagaagactttccggacagaacgtcctgtcaactcagctgccctctcccccaactatgaccatgtggtcctgggcggtggtcaggaagccatggatgtaaccacaacctccaccaggattggcaagtttgaggccagttgaacccaggaggcagaggttgcagtgagctgagatcacgtcattgcactccatcctgagccacaagagcaaaactccgtctcaaaaaaaaaaaagaagaaggtggatctccaaccaggccagagaagattctcacagaaggttttgaactctaagaaataaattggtttggtaataaatggcttctggtcagat

SEQ ID NO: 41009 - DNA, 1728 bp, Homo sapiens
agaaggatgagctaaaaaagtccctgtacgccatcttctcccagtttggccagatcctggatatcctggtatcacggagcctgaagatgaggggccaggcctttgtcatcttcaaggaggtcagcagcgccaccaacgccctgcgctccatgcagggtttccctttctatgacaaacctatgcgtatccagtatgccaagaccgactcagatatcattcacgttgcggccttcctcgcgtcacagccgggatggtgagtttcagagttaggggtattgcagtgggggtcctgggctgaggctggggcccaattccgagcactgacgttactgtcttgtccccacagaagccgatcctactgcagggccatgagcggtccattacgcagattaagtataaccgcgaaggagacctcctctttactgtggccaaggaccctatcgtcaatgtatggtactctgtgaatggtgagaggctgggcacctacatgggccataccggagctgtgtggtgtgtggacgctgactgggacaccaagcatgtcctcactggctcagctgacaacagctgtcgtctctgggactgtgaaacaggaaagcagctggcccttctcaagaccaattcggctgtccggacctgcggttttgactttgggggcaacatcatcatgttctccacggacaagcagatgggctaccagtgctttgtgagcttttttgacctgcgggatccgagccagattgacaacaatgagccctacatgaagatcccttgcaatgactctaaaatcaccagtgctgtttggggacccctgggggagtgcatcatcgctggccatgagagtggagagctcaaccagtatagtgccaagtctggagaggtgttggtgaatgttaaggagcactcccggcagatcaacgacatccagttatccagggacatgaccatgtttgtgaccgcgtccaaggacaacacagccaagctttttgactccacaactcttgaacatcagaagactttccggacagaacgtcctgtcaactcagctgccctctcccccaactatgaccatgtggtcctgggcggtggtcaggaagccatggatgtaaccacaacctccaccaggattggcaagtttgaggccaggttcttccatttggcctttgaagaagagtttggaagagtcaagggtcactttggacctatcaacagtgttgccttccatcctgatggcaagagctacagcagcggcggcgaagatggttacgtccgtatccattacttcgacccacagtacttcgaatttgagtttgaggcttaagaagctggatctcctgccgggcgtggtggctcatgcctgtaatcccaccactttttttttaaggcaggcggatcacctgaggtcaggagtttaagaccagcctgaccaacatggagaaacctcgtctctactaaaaatacaaaaattagccaggcatggtggcacacgcctatagtcccagctactcaggaggctgaggcaggagaatcacttgaacccaggaggcagaggttgcagtgagctgagatcacgtcattgcactccatcctgagccacaagagcaaaactccgtctcaaaaaaaaaaaagaagaaggtggatctccaaccaggccagagaagattctcacagaaggttttgaactctaagaaataaattggtttggtaataaatggcttctggtcagat

SEQ ID NO: 41010 - DNA, 1445 bp, Homo sapiens
aaaattaggctaggtacgaggcctgggtaaaatttggccgaggctcgcgtacagcttgggatgaagccgatcctactgcagggccatgagcggtccattacgcagattaagtataaccgcgaaggagacctcctctttactgtggccaaggaccctatcgtcaatgtatggtactctgtgaatggtgagaggctgggcacctacatgggccataccggagctgtgtggtgtgtggacgctgactgggacaccaagcatgtcctcactggctcagctgacaacagctgtcgtctctgggactgtgaaacaggaaagcagctggcccttctcaagaccaattcggctgtccggacctgcggttttgactttgggggcaacatcatcatgttctccacggacaagcagatgggctaccagtgctttgtgagcttttttgacctgcgggatccgagccagattgacaacaatgagccctacatgaagatcccttgcaatgactctaaaatcaccagtgctgtttggggacccctgggggagtgcatcatcgctggccatgagagtggagagctcaaccagtatagtgccaagtctggagaggtgttggtgaatgttaaggagcactcccggcagatcaacgacatccagttatccagggacatgaccatgtttgtgaccgcgtccaaggacaacacagccaagctttttgactccacaactcttgaacatcagaagactttccggacagaacgtcctgtcaactcagctgccctctcccccaactatgaccatgtggtcctgggcggtggtcaggaagccatggatgtaaccacaacctccaccaggattggcaagtttgaggccaggttcttccatttggcctttgaagaagagtttggaagagtcaagggtcactttggacctatcaacagtgttgccttccatcctgatggcaagagctacagcagcggcggcgaagatggttacgtccgtatccattacttcgacccacagtacttcgaatttgagtttgaggcttaagaagctggatctcctgccgggcgtggtggctcatgcctgtaatcccaccactttttttttaaggcaggcggatcacctgaggtcaggagtttaagaccagcctgaccaacatggagaaacctcgtctctactaaaaatacaaaaattagccaggcatggtggcacacgcctatagtcccagctactcaggaggctgaggcaggagaatcacttgaacccaggaggcagaggttgcagtgagctgagatcacgtcattgcactccatcctgagccacaagagcaaaactccgtctcaaaaaaaaaaaagaagaaggtggatctccaaccaggccagagaagattctcacagaaggttttgaactctaagaaataaattggtttggtaataaatggcttctggtcagat

SEQ ID NO: 41011 - DNA, 1405 bp, Homo sapiens
ccagcagccggtttaatcggacgaagccgatcctactgcagggccatgagcggtccattacgcagattaagtataaccgcgaaggagacctcctctttactgtggccaaggaccctatcgtcaatgtatggtactctgtgaatggtgagaggctgggcacctacatgggccataccggagctgtgtggtgtgtggacgctgactgggacaccaagcatgtcctcactggctcagctgacaacagctgtcgtctctgggactgtgaaacaggaaagcagctggcccttctcaagaccaattcggctgtccggacctgcggttttgactttgggggcaacatcatcatgttctccacggacaagcagatgggctaccagtgctttgtgagcttttttgacctgcgggatccgagccagattgacaacaatgagccctacatgaagatcccttgcaatgactctaaaatcaccagtgctgtttggggacccctgggggagtgcatcatcgctggccatgagagtggagagctcaaccagtatagtgccaagtctggagaggtgttggtgaatgttaaggagcactcccggcagatcaacgacatccagttatccagggacatgaccatgtttgtgaccgcgtccaaggacaacacagccaagctttttgactccacaactcttgaacatcagaagactttccggacagaacgtcctgtcaactcagctgccctctcccccaactatgaccatgtggtcctgggcggtggtcaggaagccatggatgtaaccacaacctccaccaggattggcaagtttgaggccaggttcttccatttggcctttgaagaagagtttggaagagtcaagggtcactttggacctatcaacagtgttgccttccatcctgatggcaagagctacagcagcggcggcgaagatggttacgtccgtatccattacttcgacccacagtacttcgaatttgagtttgaggcttaagaagctggatctcctgccgggcgtggtggctcatgcctgtaatcccaccactttttttttaaggcaggcggatcacctgaggtcaggagtttaagaccagcctgaccaacatggagaaacctcgtctctactaaaaatacaaaaattagccaggcatggtggcacacgcctatagtcccagctactcaggaggctgaggcaggagaatcacttgaacccaggaggcagaggttgcagtgagctgagatcacgtcattgcactccatcctgagccacaagagcaaaactccgtctcaaaaaaaaaaaagaagaaggtggatctccaaccaggccagagaagattctcacagaaggttttgaactctaagaaataaattggtttggtaataaatggcttctggtcagat

SEQ ID NO: 41012 - DNA, 1437 bp, Homo sapiens
  misc_feature (16)..(16): n is a, c, g, or t
  misc_feature (23)..(24): n is a, c, g, or t
catgttggttcgcccnggagtanngatatcgtcgatccacgcgctccgcgggatgaagccgatcctactgcagggccatgagcggtccattacgcagattaagtataaccgcgaaggagacctcctctttactgtggccaaggaccctatcgtcaatgtatggtactctgtgaatggtgagaggctgggcacctacatgggccataccggagctgtgtggtgtgtggacgctgactgggacaccaagcatgtcctcactggctcagctgacaacagctgtcgtctctgggactgtgaaacaggaaagcagctggcccttctcaagaccaattcggctgtccggacctgcggttttgactttgggggcaacatcatcatgttctccacggacaagcagatgggctaccagtgctttgtgagcttttttgacctgcgggatccgagccagattgacaacaatgagccctacatgaagatcccttgcaatgactctaaaatcaccagtgctgtttggggacccctgggggagtgcatcatcgctggccatgagagtggagagctcaaccagtatagtgccaagtctggagaggtgttggtgaatgttaaggagcactcccggcagatcaacgacatccagttatccagggacatgaccatgtttgtgaccgcgtccaaggacaacacagccaagctttttgactccacaactcttgaacatcagaagactttccggacagaacgtcctgtcaactcagctgccctctcccccaactatgaccatgtggtcctgggcggtggtcaggaagccatggatgtaaccacaacctccaccaggattggcaagtttgaggccaggttcttccatttggcctttgaagaagagtttggaagagtcaagggtcactttggacctatcaacagtgttgccttccatcctgatggcaagagctacagcagcggcggcgaagatggttacgtccgtatccattacttcgacccacagtacttcgaatttgagtttgaggcttaagaagctggatctcctgccgggcgtggtggctcatgcctgtaatcccaccactttttttttaaggcaggcggatcacctgaggtcaggagtttaagaccagcctgaccaacatggagaaacctcgtctctactaaaaatacaaaaattagccaggcatggtggcacacgcctatagtcccagctactcaggaggctgaggcaggagaatcacttgaacccaggaggcagaggttgcagtgagctgagatcacgtcattgcactccatcctgagccacaagagcaaaactccgtctcaaaaaaaaaaaagaagaaggtggatctccaaccaggccagagaagattctcacagaaggttttgaactctaagaaataaattggtttggtaataaatggcttctggtcagat

SEQ ID NO: 41013 - DNA, 1373 bp, Homo sapiens
agtgagctcgaaaccttttccggtcttactcacgttgcggccttcctcgcgtcacagccgggatgaagccgatcctactgcagggccatgagcggtccattacgcagattaagtataaccgcgaaggagacctcctctttactgtggccaaggaccctatcgtcaatgtatggtactctgtgaatggtgagaggctgggcacctacatgggccataccggagctgtgtggtgtgtggacgctgactgggacaccaagcatgtcctcactggctcagctgacaacagctgtcgtctctgggactgtgaaacaggaaagcagctggcccttctcaagaccaattcggctgtccggacctgcggttttgactttgggggcaacatcatcatgttctccacggacaagcagatgggctaccagtgctttgtgagcttttttgacctgcgggatccgagccagattgacaacaatgagccctacatgaagatcccttgcaatgactctaaaatcaccagtgctgtttggggacccctgggggagtgcatcatcgctggccatgagagtggagagctcaaccagtatagtgccaagtctggagaggtgttggtgaatgttaaggagcactcccggcagatcaacgacatccagttatccagggacatgaccatgtttgtgaccgcgtccaaggacaacacagccaagctttttgactccacaactcttgaacatcagaagactttccggacagaacgtcctgtcaactcagctgccctctcccccaactatgaccatgttcttccatttggcctttgaagaagagtttggaagagtcaagggtcactttggacctatcaacagtgttgccttccatcctgatggcaagagctacagcagcggcggcgaagatggttacgtccgtatccattacttcgacccacagtacttcgaatttgagtttgaggcttaagaagctggatctcctgccgggcgtggtggctcatgcctgtaatcccaccactttttttttaaggcaggcggatcacctgaggtcaggagtttaagaccagcctgaccaacatggagaaacctcgtctctactaaaaatacaaaaattagccaggcatggtggcacacgcctatagtcccagctactcaggaggctgaggcaggagaatcacttgaacccaggaggcagaggttgcagtgagctgagatcacgtcattgcactccatcctgagccacaagagcaaaactccgtctcaaaaaaaaaaaagaagaaggtggatctccaaccaggccagagaagattctcacagaaggttttgaactctaagaaataaattggtttggtaataaatggcttctggtcagat

SEQ ID NO: 41014 - DNA, 1007 bp, Homo sapiens
  misc_feature (849)..(849): n is a, c, g, or t
agtgagctcgaaaccttttccggtcttactcacgttgcggccttcctcgcgtcacagccgggatgaagccgatcctactgcagggccatgagcggtccattacgcagattaagtataaccgcgaaggagacctcctctttactgtggccaaggaccctatcgtcaatgtatggtactctgtgaatggtgagaggctgggcacctacatgggccataccggagctgtgtggtgtgtggacgctgactgggacaccaagcatgtcctcactggctcagctgacaacagctgtcgtctctgggactgtgaaacaggaaagcagctggcccttctcaagaccaattcggctgtccggacctgcggttttgactttgggggcaacatcatcatgttctccacggacaagcagatgggctaccagtgctttgtgagcttttttgacctgcgggatccgagccagattgacaacaatgagccctacatgaagatcccttgcaatgactctaaaatcaccagtgctgtttggggacccctgggggagtgcatcatcgctggccatgagagtggagagctcaaccagtatagtgccaagtctggagaggtgttggtgaatgttaaggagcactcccggcagatcaacgacatccagttatccagggacatgaccatgtttgtgaccgcgtccaaggacaacacagccaagctttttgactccacaactcttgaacatcagaagactttccggacagaacgtcctgtcaactcagctgccctctcccccaactatgaccattgtggtcctggcggggccggaagccatggtgttcccaactccacaggttgcagttgangccggtctccatgccttgagaagcgttgggagccggccttgggcctcacggggcccccctggggagcccgccgcgggaaaggggcgttctttcgcccgttcatgttgcaaaggccccggggcggccccctgggcgcggggaccggcctccaaggggcg

SEQ ID NO: 41015 - DNA, 1413 bp, Homo sapiens
tacaagcccggggactgaccaagccagaatccataactgctagggacaccaatgacgacggtccattacgcagattaagtataaccgcgaaggagacctcctctttactgtggccaaggaccctatcgtcaatgtatggtactctgtgaatggtgagaggctgggcacctacatgggccataccggagctgtgtggtgtgtggacgctgactgggacaccaagcatgtcctcactggctcagctgacaacagctgtcgtctctgggactgtgaaacaggaaagcagctggcccttctcaagaccaattcggctgtccggacctgcggttttgactttgggggcaacatcatcatgttctccacggacaagcagatgggctaccagtgctttgtgagcttttttgacctgcgggatccgagccagattgacaacaatgagccctacatgaagatcccttgcaatgactctaaaatcaccagtgctgtttggggacccctgggggagtgcatcatcgctggccatgagagtggagagctcaaccagtatagtgccaagtctggagaggtgttggtgaatgttaaggagcactcccggcagatcaacgacatccagttatccagggacatgaccatgtttgtgaccgcgtccaaggacaacacagccaagctttttgactccacaactcttgaacatcagaagactttccggacagaacgtcctgtcaactcagctgccctctcccccaactatgaccatgtggtcctgggcggtggtcaggaagccatggatgtaaccacaacctccaccaggattggcaagtttgaggccaggttcttccatttggcctttgaagaagagtttggaagagtcaagggtcactttggacctatcaacagtgttgccttccatcctgatggcaagagctacagcagcggcggcgaagatggttacgtccgtatccattacttcgacccacagtacttcgaatttgagtttgaggcttaagaagctggatctcctgccgggcgtggtggctcatgcctgtaatcccaccactttttttttaaggcaggcggatcacctgaggtcaggagtttaagaccagcctgaccaacatggagaaacctcgtctctactaaaaatacaaaaattagccaggcatggtggcacacgcctatagtcccagctactcaggaggctgaggcaggagaatcacttgaacccaggaggcagaggttgcagtgagctgagatcacgtcattgcactccatcctgagccacaagagcaaaactccgtctcaaaaaaaaaaaagaagaaggtggatctccaaccaggccagagaagattctcacagaaggttttgaactctaagaaataaattggtttggtaataaatggcttctggtcagat

SEQ ID NO: 41016 - DNA, 1500 bp, Homo sapiens
  misc_feature (81)..(81): n is a, c, g, or t
cagaaactttcttgaccatcctgttctggcgctgcgggcccaggtatggatgaagctgaacacttgcgtgtcattgaggcnctgtgttaccgtatgccaatatcactgcgatcattgaactattgccgtggattgctcacctacattacatatataacttgctgcggcgagggaaccgtaatcggttctgtgatcatgagtcccatcatgggagattgctggaagtacgattgactggcatctattgaagcagcgtaatcgaagcgagctcgagatctgagattactgccctcggactggggacaccaagcatgtcctcactggctcagctgacaacagctgtcgtctctgggactgtgaaacaggaaagcagctggcccttctcaagaccaattcggctgtccggacctgcggttttgactttgggggcaacatcatcatgttctccacggacaagcagatgggctaccagtgctttgtgagcttttttgacctgcgggatccgagccagattgacaacaatgagccctacatgaagatcccttgcaatgactctaaaatcaccagtgctgtttggggacccctgggggagtgcatcatcgctggccatgagagtggagagctcaaccagtatagtgccaagtctggagaggtgttggtgaatgttaaggagcactcccggcagatcaacgacatccagttatccagggacatgaccatgtttgtgaccgcgtccaaggacaacacagccaagctttttgactccacaactcttgaacatcagaagactttccggacagaacgtcctgtcaactcagctgccctctcccccaactatgaccatgtggtcctgggcggtggtcaggaagccatggatgtaaccacaacctccaccaggattggcaagtttgaggccaggttcttccatttggcctttgaagaagagtttggaagagtcaagggtcactttggacctatcaacagtgttgccttccatcctgatggcaagagctacagcagcggcggcgaagatggttacgtccgtatccattacttcgacccacagtacttcgaatttgagtttgaggcttaagaagctggatctcctgccgggcgtggtggctcatgcctgtaatcccaccactttttttttaaggcaggcggatcacctgaggtcaggagtttaagaccagcctgaccaacatggagaaacctcgtctctactaaaaatacaaaaattagccaggcatggtggcacacgcctatagtcccagctactcaggaggctgaggcaggagaatcacttgaacccaggaggcagaggttgcagtgagctgagatcacgtcattgcactccatcctgagccacaagagcaaaactccgtctcaaaaaaaaaaaagaagaaggtggatctccaaccaggccagagaagattctcacagaaggttttgaactctaagaaataaattggtttggtaataaatggcttctggtcagat

SEQ ID NO: 41017 - DNA, 1401 bp, Homo sapiens
agtgagctcgaaaccttttccggtcttactcacgttgcggccttcctcgcgtcacagccgggatgaagccgatcctactgcagggccatgagcggtccattacgcagattaagtataaccgcgaaggagacctcctctttactgtggccaaggaccctatcgtcaatgtatggtactctgtgaatggtgagaggctgggcacctacatgggccataccggagctgtgtggtgtgtggacgctgactgggacaccaagcatgtcctcactggctcagctgacaacagctgtcgtctctgggactgtgaaacaggaaagcagctggcccttctcaagaccaattcggctgtccggacctgcggttttgactttgggggcaacatcatcatgttctccacggacaagcagatgggctaccagtgctttgtgagcttttttgacctgcgggatccgagccagattgacaacaatgagccctacatgaagatcccttgcaatgactctaaaatcaccagtgctgtttggggacccctgggggagtgcattctggagaggtgttggtgaatgttaaggagcactcccggcagatcaacgacatccagttatccagggacatgaccatgtttgtgaccgcgtccaaggacaacacagccaagctttttgactccacaactcttgaacatcagaagactttccggacagaacgtcctgtcaactcagctgccctctcccccaactatgaccatgtggtcctgggcggtggtcaggaagccatggatgtaaccacaacctccaccaggattggcaagtttgaggccaggttcttccatttggcctttgaagaagagtttggaagagtcaagggtcactttggacctatcaacagtgttgccttccatcctgatggcaagagctacagcagcggcggcgaagatggttacgtccgtatccattacttcgacccacagtacttcgaatttgagtttgaggcttaagaagctggatctcctgccgggcgtggtggctcatgcctgtaatcccaccactttttttttaaggcaggcggatcacctgaggtcaggagtttaagaccagcctgaccaacatggagaaacctcgtctctactaaaaatacaaaaattagccaggcatggtggcacacgcctatagtcccagctactcaggaggctgaggcaggagaatcacttgaacccaggaggcagaggttgcagtgagctgagatcacgtcattgcactccatcctgagccacaagagcaaaactccgtctcaaaaaaaaaaaagaagaaggtggatctccaaccaggccagagaagattctcacagaaggttttgaactctaagaaataaattggtttggtaataaatggcttctggtcagat

SEQ ID NO: 41018 - DNA, 1282 bp, Homo sapiens
agtgagctcgaaaccttttccggtcttactcacgttgcggccttcctcgcgtcacagccgggatgaagccgatcctactgcagggccatgagcggtccattacgcagattaagtataaccgcgaaggagacctcctctttactgtggccaaggaccctatcgtcaatgtatggtactctgtgaatggtgagaggctgggcacctacatgggccataccggagctgtgtggtgtgtggacgctgactgggacaccaagcatgtcctcactggctcagctgacaacagctgtcgtctctgggactgtgaaacaggaaagcagctggcccttctcaagaccaattcggctgtccggacctgcggttttgactttgggggcaacatcatcatgttctccacggacaagcagatgggctaccagtgcttttctggagaggtgttggtgaatgttaaggagcactcccggcagatcaacgacatccagttatccagggacatgaccatgtttgtgaccgcgtccaaggacaacacagccaagctttttgactccacaactcttgaacatcagaagactttccggacagaacgtcctgtcaactcagctgccctctcccccaactatgaccatgtggtcctgggcggtggtcaggaagccatggatgtaaccacaacctccaccaggattggcaagtttgaggccaggttcttccatttggcctttgaagaagagtttggaagagtcaagggtcactttggacctatcaacagtgttgccttccatcctgatggcaagagctacagcagcggcggcgaagatggttacgtccgtatccattacttcgacccacagtacttcgaatttgagtttgaggcttaagaagctggatctcctgccgggcgtggtggctcatgcctgtaatcccaccactttttttttaaggcaggcggatcacctgaggtcaggagtttaagaccagcctgaccaacatggagaaacctcgtctctactaaaaatacaaaaattagccaggcatggtggcacacgcctatagtcccagctactcaggaggctgaggcaggagaatcacttgaacccaggaggcagaggttgcagtgagctgagatcacgtcattgcactccatcctgagccacaagagcaaaactccgtctcaaaaaaaaaaaagaagaaggtggatctccaaccaggccagagaagattctcacagaaggttttgaactctaagaaataaattggtttggtaataaatggcttctggtcagat

SEQ ID NO: 41019 - DNA, 1169 bp, Homo sapiens
agtgagctcgaaaccttttccggtcttactcacgttgcggccttcctcgcgtcacagccgggatgaagccgatcctactgcagggccatgagcggtccattacgcagattaagtataaccgcgaaggagacctcctctttactgtggccaaggaccctatcgtcaatgtatggtactctgtgaatggtgagaggctgggcacctacatgggccataccggagctgtgtggtgtgtggacgctgactgggacaccaagcatgtcctcactggctcagctgacaacagctgtcgtctctgggactgtgaaacagtctggagaggtgttggtgaatgttaaggagcactcccggcagatcaacgacatccagttatccagggacatgaccatgtttgtgaccgcgtccaaggacaacacagccaagctttttgactccacaactcttgaacatcagaagactttccggacagaacgtcctgtcaactcagctgccctctcccccaactatgaccatgtggtcctgggcggtggtcaggaagccatggatgtaaccacaacctccaccaggattggcaagtttgaggccaggttcttccatttggcctttgaagaagagtttggaagagtcaagggtcactttggacctatcaacagtgttgccttccatcctgatggcaagagctacagcagcggcggcgaagatggttacgtccgtatccattacttcgacccacagtacttcgaatttgagtttgaggcttaagaagctggatctcctgccgggcgtggtggctcatgcctgtaatcccaccactttttttttaaggcaggcggatcacctgaggtcaggagtttaagaccagcctgaccaacatggagaaacctcgtctctactaaaaatacaaaaattagccaggcatggtggcacacgcctatagtcccagctactcaggaggctgaggcaggagaatcacttgaacccaggaggcagaggttgcagtgagctgagatcacgtcattgcactccatcctgagccacaagagcaaaactccgtctcaaaaaaaaaaaagaagaaggtggatctccaaccaggccagagaagattctcacagaaggttttgaactctaagaaataaattggtttggtaataaatggcttctggtcagat

SEQ ID NO: 41020 - DNA, 950 bp, Homo sapiens
ctggctggtacgcctcgagtatgggatatcgtcgaccacgccgtcggcatcgctggccatgagagtggagagctcaaccagtatagtgccaagtctggagaggtgttggtgaatgttaaggagcactcccggcagatcaacgacatccagttatccagggacatgaccatgtttgtgaccgcgtccaaggacaacacagccaagctttttgactccacaactcttgaacatcagaagactttccggacagaacgtcctgtcaactcagctgccctctcccccaactatgaccatgtggtcctgggcggtggtcaggaagccatggatgtaaccacaacctccaccaggattggcaagtttgaggccaggttcttccatttggcctttgaagaagagtttggaagagtcaagggtcactttggacctatcaacagtgttgccttccatcctgatggcaagagctacagcagcggcggcgaagatggttacgtccgtatccattacttcgacccacagtacttcgaatttgagtttgaggcttaagaagctggatctcctgccgggcgtggtggctcatgcctgtaatcccaccactttttttttaaggcaggcggatcacctgaggtcaggagtttaagaccagcctgaccaacatggagaaacctcgtctctactaaaaatacaaaaattagccaggcatggtggcacacgcctatagtcccagctactcaggaggctgaggcaggagaatcacttgaacccaggaggcagaggttgcagtgagctgagatcacgtcattgcactccatcctgagccacaagagcaaaactccgtctcaaaaaaaaaaaagaagaaggtggatctccaaccaggccagagaagattctcacagaaggttttgaactctaagaaataaattggtttggtaataaatggcttctggtcagat

SEQ ID NO: 41021 - DNA, 1015 bp, Homo sapiens
agtgagctcgaaaccttttccggtcttactcacgttgcggccttcctcgcgtcacagccgggatgaagccgatcctactgcagggccatgagcggtccattacgcagattaagtataaccgcgaaggagacctcctctttactgtggccaaggacccttctggagaggtgttggtgaatgttaaggagcactcccggcagatcaacgacatccagttatccagggacatgaccatgtttgtgaccgcgtccaaggacaacacagccaagctttttgactccacaactcttgaacatcagaagactttccggacagaacgtcctgtcaactcagctgccctctcccccaactatgaccatgtggtcctgggcggtggtcaggaagccatggatgtaaccacaacctccaccaggattggcaagtttgaggccaggttcttccatttggcctttgaagaagagtttggaagagtcaagggtcactttggacctatcaacagtgttgccttccatcctgatggcaagagctacagcagcggcggcgaagatggttacgtccgtatccattacttcgacccacagtacttcgaatttgagtttgaggcttaagaagctggatctcctgccgggcgtggtggctcatgcctgtaatcccaccactttttttttaaggcaggcggatcacctgaggtcaggagtttaagaccagcctgaccaacatggagaaacctcgtctctactaaaaatacaaaaattagccaggcatggtggcacacgcctatagtcccagctactcaggaggctgaggcaggagaatcacttgaacccaggaggcagaggttgcagtgagctgagatcacgtcattgcactccatcctgagccacaagagcaaaactccgtctcaaaaaaaaaaaagaagaaggtggatctccaaccaggccagagaagattctcacagaaggttttgaactctaagaaataaattggtttggtaataaatggcttctggtcagat

SEQ ID NO: 41022 - DNA, 1198 bp, Homo sapiens
  misc_feature (16)..(16): n is a, c, g, or t
  misc_feature (23)..(24): n is a, c, g, or t
catgttggttcgcccnggagtanngatatcgtcgatccacgcgctccgcgggatgaagccgatcctactgcagggccatgagcggtccattacgcagattaagtataaccgcgaaggagacctcctctttactgtggccaaggaccctatcgtcaatgtatggtactctgtgaatggtgagaggctgggcacctacatgggccataccggagctgtgtggtgtgtggacgctgactgggacaccaagcatgtcctcactggctcagctgacaacagctgtcgtctctgggactgtgaaacaggaaagcagctggcccttctcaagaccaattcggctgtccggacctgcggttttgactttgggggcaacatcatcatgttctccacggacaagcagatgggctaccagtgcttttctggagaggtgttggtgaatgttaaggagcactcccggcagatcaacgacatccagttatccagggacatgaccatgtttgtgaccgcgtccaaggacaacacagccaagctttttgactccacaactcttgaacatcagaagactttccggacagaacgtcctgtcaactcagctgccctctcccccaactatgaccatgttcttccatttggcctttgaagaagagtttggaagagtcaagggtcactttggacctatcaacagtgttgccttccatcctgatggcaagagctacagcagcggcggcgaagatggttacgtccgtatccattacttcgacccacagtacttcgaatttgagtttgaggcttaagaagctggatctcctgccgggcgtggtggctcatgcctgtaatcccaccactttttttttaaggcaggcggatcacctgaggtcaggagtttaagaccagcctgaccaacatggagaaacctcgtctctactaaaaatacaaaaattagccaggcatggtggcacacgcctatagtcccagctactcaggaggctgaggcaggagaatcacttgaacccaggaggcagaggttgcagtgagctgagatcacgtcattgcactccatcctgagccacaagagcaaaactccgtctcaaaaaaaaaaaagaagaaggtggatctccaaccaggccagagaagattctcacagaaggttttgaactctaagaaataaattggtttggtaataaatggcttctggtcagat

SEQ ID NO: 41023 - DNA, 719 bp, Homo sapiens
agtgagctcgaaaccttttccggtcttactcacgttgcggccttcctcgcgtcacagccgggatgaagccgatcctactgcagggccatgagcggtccattacgcagattaagtataaccgcgaaggagacctcctctttactgtggccaaggaccctatcgtcaatgtatggtactctgtgaatggtgagaggctgggcacctacatgggccataccggagctgtgtggtgtgtggacgctgactgggacaccaagcatgtcctcactggctcagctgacaacagctgtcgtctctgggactgtgaaacagtctggagaggtgttggtgaatgttaaggagcactcccggcagatcaacgacatccagttatccagggacatgaccatgtttgtgaccgcgtccaaggacaacacagccaagctttttgactccacaactcttgaacatcagaagactttccggacagaacgtcctgtcaactcagctgccctctcccccaactatgaccatgtggtcctgggcggtggtcaggaagccatggatgtaaccacaacctccaccaggattggcaagtttgaggccaggttcttccatttggcctttgaagaagagtttggaagagtcaagggtcactttggacctatcaacagtgttgccttccatcctgatggcaagaggtagggtaccagtgaagcagctgacctaagcctgggttg

SEQ ID NO: 41024 - DNA, 442 bp, Homo sapiens
gttttgaactctaagaaataaattggtttggtaataaatggcttctgtgagaatcttctggtggctcatgcctgtaatcccaccactttttttttaaggcaggcggatcacctgaggtcaggagtttaagaccagcctgaccaacatggagaaacctcgtctctactaaaaatacaaaaattagccaggcatggtggcacacgcctatagtcccagctactcaggaggctgaggcaggagaatcacttgaacccaggaggcagaggttgcagtgagctgagatcacgtcattgcactccatcctgagccacaagagcaaaactccgtctcaaaaaaaaaaaagaagaaggtggatctccaaccaggccagagaagattctcacagaaggttttgaactctaagaaataaattggtttggtaataaatggcttctggtcagat

SEQ ID NO: 41025 - DNA, 602 bp, Homo sapiens
  misc_feature (1)..(1): n is a, c, g, or t
ngaaatgaaaaagtacactttagaaaataaagaggaaggatcactctcagatactgaagccgatgcagtctctggacaacttccagatcccacaacgaatcccagtgctggaaaggacgggccctcccttctggtggtggagcaggtccgggtggtggatctggaagggagcctgaaggtggtgtacccgtccaaggccgacctggcactgcccctccccacgtgactgtcgtgcgctgacgccagggccgcctgtccgcgtttgtttggccggttttgcggaggtttctatgcggcaatgctgaattatccgttagattttcaccccagcttttttgtttgtttttgtttttgagatggagtctcgctctgtcgcctaggctggagcgcagtggcgtgatctctgttgaacccaggaggcagaggttgcagtgagctgagatcacgtcattgcactccatcctgagccacaagagcaaaactccgtctcaaaaaaaaaaaagaagaaggtggatctccaaccaggccagagaagattctcacagaaggttttgaactctaagaaataaattggtttggtaataaatggcttctggtcagat

SEQ ID NO: 41026 - DNA, 407 bp, Homo sapiens
tgggttgtgggcgcggccttcctcgcgtcacagccgggatgaagccgatcctactgcagggccatgagcggtccattacgcagattaagtataaccgcgaaggagacctcctctttactgtggccaaggaccctatcgtcaatgtatggtactctgtgaatggtgagaggctgggcacctacatgggccataccggagctgtgtggtgtgtggacgctgactgtcagaggaacagtgatgccaagggagggacaaagacacaaggggtaatgatgacgtaagagttgcattagcgcgatttaagaagagcgatggggacagtagccatgcgaaggtgacttgggggtatgatgagggtttaaagagaaatgaggattttataaaggagaaatggcaacaaagcgatg

SEQ ID NO: 41027 - DNA, 828 bp, Homo sapiens
gacagagtaagactccatctcaaaataaataaataataataacaatttgcatttggggagtgccacctccaaagtgttttggaagaagatagaaagtgaattaattgtgtcccttttcctccagggttcttccatttggcctttgaagaagagtttggaagagtcaagggtcactttggacctatcaacagtgttgccttccatcctgatggcaagaggtagggtaccagtgaagcagctgacctaagcctgggttgggtctctgcctttcccagagtaagcacctgactggtgcctggctatctttttccagctacagcagcggcggcgaagatggttacgtccgtatccattacttcgacccacagtacttcgaatttgagtttgaggcttaagaagctggatctcctgccgggcgtggtggctcatgcctgtaatcccaccactttttttttaaggcaggcggatcacctgaggtcaggagtttaagaccagcctgaccaacatggagaaacctcgtctctactaaaaatacaaaaattagccaggcatggtggcacacgcctatagtcccagctactcaggaggctgaggcaggagaatcacttgaacccaggaggcagaggttgcagtgagctgagatcacgtcattgcactccatcctgagccacaagagcaaaactccgtctcaaaaaaaaaaaagaagaaggtggatctccaaccaggccagagaagattctcacagaaggttttgaactctaagaaataaattggtttggtaataaatggcttctggtcagatattttgtggtgtctgtttcatcattt

SEQ ID NO: 41028 - DNA, 977 bp, Homo sapiens
  misc_feature (2)..(2): n is a, c, g, or t
  misc_feature (12)..(12): n is a, c, g, or t
  misc_feature (14)..(14): n is a, c, g, or t
  misc_feature (819)..(819): n is a, c, g, or t
tnggctagtagngncgcgtgtgaatcggccgagggaagccgatcctactgcagggccatgagcggtccattacgcagattaagtataaccgcgaaggagacctcctctttactgtggccaaggaccctatcgtcaatgtatggtactctgtgaatggtgagaggctgggcacctacatgggccataccggagctgtgtggtgtgtggacgctgactgggacaccaagcatgtcctcactggctcagctgacaacagctgtcgtctctgggactgtgaaacaggaaagcagctggcccttctcaagaccaattcggctgtccggacctgcggttttgactttgggggcaacatcatcatgttctccacggacaagcagatgggctaccagtgctttgtgagcttttttgacctgcgggatccgagccagattgacaacaatgagccctacatgaagatcccttgcaatgactctaaaatcaccagtgctgtttggggacccctgggggagtgcatcatcgctggccatgagagtggagagctcaaccagtatagtgccaagtctggagaggtgttggtgaatgttaaggagcactcccggcagatcaacgacatccagttatccagggacatgaccatgtttgtgaccgcgtccaaggacaacacagccaagctttttgactccacaactcttgaacatcagaagactttccggacagaacgtcctgtcaactcagctgccctctcccccaactatgaccattgtggtcctggcggggccggaagccatggtgttcccaactccacaggttgcagttgangccggtctccatgccttgagaagcgttgggagccggccttgggcctcacggggcccccctggggagcccgccgcgggaaaggggcgttctttcgcccgttcatgttgcaaaggccccggggcggccccctgggcgcggggaccggcctccaaggggcg

SEQ ID NO: 41029 - DNA, 1448 bp, Homo sapiens
agtgagctcgaaaccttttccggtcttactcacgttgcggccttcctcgcgtcacagccgggatgaagccgatcctactgcagggccatgagcggtccattacgcagattaagtataaccgcgaaggagacctcctctttactgtggccaaggaccctatcgtcaatgtatggtactctgtgaatggtgagaggctgggcacctacatgggccataccggagctgtgtggtgtgtggacgctgactgggacaccaagcatgtcctcactggctcagctgacaacagctgtcgtctctgggactgtgaaacaggaaagcagctggcccttctcaagaccaattcggctgtccggacctgcggttttgactttgggggcaacatcatcatgttctccacggacaagcagatgggctaccagtgctttgtgagcttttttgacctgcgggatccgagccagattgacaacaatgagccctacatgaagatcccttgcaatgactctaaaatcaccagtgctgtttggggacccctgggggagtgcatcatcgctggccatgagagtggagagctcaaccagtatagtgccaagtctggagaggtgttggtgaatgttaaggagcactcccggcagatcaacgacatccagttatccagggacatgaccatgtttgtgaccgcgtccaaggacaacacagccaagctttttgactccacaactcttgaacatcagaagactttccggacagaacgtcctgtcaactcagctgccctctcccccaactatgaccatgtggtcctgggcggtggtcaggaagccatggatgtaaccacaacctccaccaggattggcaagtttgaggccaggttcttccatttggcctttgaagaagagtttggaagagtcaagggtcactttggacctatcaacagtgttgccttccatcctgatggcaagagctacagcagcggcggcgaagatggttacgtccgtatccattacttcgacccacagtacttcgaatttgagtttgaggcttaagaagctggatctcctgccgggcgtggtggctcatgcctgtaatcccaccactttttttttaaggcaggcggatcacctgaggtcaggagtttaagaccagcctgaccaacatggagaaacctcgtctctactaaaaatacaaaaattagccaggcatggtggcacacgcctatagtcccagctactcaggaggctgaggcaggagaatcacttgaacccaggaggcagaggttgcagtgagctgagatcacgtcattgcactccatcctgagccacaagagcaaaactccgtctcaaaaaaaaaaaagaagaaggtggatctccaaccaggccagagaagattctcacagaaggttttgaactctaagaaataaattggtttggtaataaatggcttctggtcagata

SEQ ID NO: 41030 - DNA, 1908 bp, Homo sapiens
agtgagctcgaaaccttttccggtcttactcacgttgcggccttcctcgcgtcacagccgggatgaagccgatcctactgcagggccatgagcggtccattacgcagattaagtataaccgcgaaggagacctcctctttactgtggccaaggaccctatcgtcaatgtatggtactctgtgaatggtgagaggctgggcacctacatgggccataccggagctgtgtggtgtgtggacgctgactgggacaccaagcatgtcctcactggctcagctgacaacagctgtcgtctctgggactgtgaaacaggaaagcagctggcccttctcaagaccaattcggctgtccggacctgcggttttgactttgggggcaacatcatcatgttctccacggacaagcagatgggctaccagtgctttgtgagcttttttgacctgcgggatccgagccagattgacaacaatgagccctacatgaagatcccttgcaatgactctaaaatcaccagtgctgtttggggacccctgggggagtgcatcatcgctggccatgagagtggagagctcaaccagtatagtgccaagtctggagaggtgttggtgaatgttaaggagcactcccggcagatcaacgacatccagttatccagggacatgaccatgtttgtgaccgcgtccaaggacaacacagccaagctttttgactccacaactcttgaacatcagaagactttccggacagaacgtcctgtcaactcagctgccctctcccccaactatgaccatgtggtcctgggcggtggtcaggaagccatggatgtaaccacaacctccaccaggattggcaagtttgaggccaggttcttccatttggcctttgaagaagagtttggaagagtcaagggtcactttggacctatcaacagtgttgccttccatcctgatggcaagagctacagcagcggcggcgaagatggttacgtccgtatccattacttcgacccacagtacttcgaatttgagtttgaggcttaagaagctggatctcctgccgggcgtggtggctcatgcctgtaatcccaccactttttttttaaggcaggcggatcacctgaggtcaggagtttaagaccagcctgaccaacatggagaaacctcgtctctactaaaaatacaaaaattagccaggcatggtggcacacgcctatagtcccagctactcaggaggctgaggcaggagaatcacttgaacccaggaggcagaggttgcagtgagctgagatcacgtcattgcactccatcctgagccacaagagcaaaactccgtctcaaaaaaaaaaaagaagaaggtggatctccaaccaggccagagaagattctcacagaaggttttgaactctaagaaataaattggtttggtaataaatggcttctggtcagattaaaaaaaaacaaaaaaaaaaaaaaaaaaaaaaaaaaaaaaaaaacaaaaacaaaaaaaaaacaaaaaaaaaacataaaacaacacacaaacaacaaaatcacaaacacacaacccataaccaaaaaccactacaaaaaaaaacaaaacaaaacaaaaacaaacaccacacagtccaccacataccatccgcatcggcctcctgacgcgccacgcaacgaaagcaacgcactccacgcagcgtgcgacgctacttgaaccacatgcgacgcagtcctagtacttcatagtagaacgcataccgatagaagtagcgacgagggagacaacagcctccctaacacatgacagcaacaacaggacaagcgaaccacacacacgcgtcccgaacgccaagagagatgcaatacaccatccatcacattatgtagaaagaccgaatcacgcagagaccgaccctcc

SEQ ID NO: 41031 - DNA, 1101 bp, Homo sapiens
agtgagctcgaaaccttttccggtcttactcacgttgcggccttcctcgcgtcacagccgggatgaagccgatcctactgcagggccatgagcggtccattacgcagattaagtataaccgcgaaggagacctcctctttactgtggccaaggaccctatcgtcaatgtatggtactctgtgaatggtgagaggctgggcacctacatgggccataccggagctgtgtggtgtgtggacgctgactgggacaccaagcatgtcctcactggctcagctgacaacagctgtcgtctctgggactgtgaaacaggaaagcagctggcccttctcaagaccaattcggctgtccggacctgcggttttgactttgggggcaacatcatcatgttctccacggacaagcagatgggctaccagtgctttgtgagcttttttgacctgcgggatccgagccagattgacaacaatgagccctacatgaagatcccttgcaatgactctaaaatcaccagtgctgtttggggacccctgggggagtgcatcatcgctggccatgagagtggagagctcaaccagtatagtgccaagtctggagaggtgttggtgaatgttaaggagcactcccggcagatcaacgacatccagttatccagggacatgaccatgtttgtgaccgcgtccaaggacaacacagccaagctttttgactccacaactcttgaacatcagaagactttccggacagaacgtcctgtcaactcagctgccctctcccccaactatgaccatgtggtcctgggcggtggtcaggaagccatggatgtaaccacaacctccaccaggattggcaagtttgaggccaggttcttccatttggcctttgaagaagagtttggaagagtcaagggtcactttggacctatcaacagtgttgccttccatcctgatggcaagagctacagcagcggcggcgaagatggttacgtccgtatccattacttcgacccacagtacttcgaatttgagtttgaggctggtctcaaacttctgactcaagtgatctgcccaccttggctcccaaagtgctgggattacaggt

SEQ ID NO: 41032 - DNA, 1432 bp, Homo sapiens
ggacgcgtgggtcgacccacgcgtcgcttcctcgcgtcacagccgggatgaagccgatcctactgcagggccatgagcggtccattacgcagattaagtataaccgcgaaggagacctcctctttactgtggccaaggaccctatcgtcaatgtatggtactctgtgaatggtgagaggctgggcacctacatgggccataccggagctgtgtggtgtgtggacgctgactgggacaccaagcatgtcctcactggctcagctgacaacagctgtcgtctctgggactgtgaaacaggaaagcagctggcccttctcaagaccaattcggctgtccggacctgcggttttgactttgggggcaacatcatcatgttctccacggacaagcagatgggctaccagtgctttgtgagcttttttgacctgcgggatccgagccagattgacaacaatgagccctacatgaagatcccttgcaatgactctaaaatcaccagtgctgtttggggacccctgggggagtgcatcatcgctggccatgagagtggagagctcaaccagtatagtgccaagtctggagaggtgttggtgaatgttaaggagcactcccggcagatcaacgacatccagttatccagggacatgaccatgtttgtgaccgcgtccaaggacaacacagccaagctttttgactccacaactcttgaacatcagaagactttccggacagaacgtcctgtcaactcagctgccctctcccccaactatgaccatgtggtcctgggcggtggtcaggaagccatggatgtaaccacaacctccaccaggattggcaagtttgaggccaggttcttccatttggcctttgaagaagagtttggaagagtcaagggtcactttggacctatcaacagtgttgccttccatcctgatggcaagagctacagcagcggcggcgaagatggttacgtccgtatccattacttcgacccacagtacttcgaatttgagtttgaggcttaagaagctggatctcctgccgggcgtggtggctcatgcctgtaatcccaccactttttttttaaggcaggcggatcacctgaggtcaggagtttaagaccagcctgaccaacatggagaaacctcgtctctactaaaaatacaaaaattagccaggcatggtggcacacgcctatagtcccagctactcaggaggctgaggcaggagaatcacttgaacccaggaggcagaggttgcagtgagctgagatcacgtcattgcactccatcctgagccacaagagcaaaactccgtctcaaaaaaaaaaaagaagaaggtggatctccaaccaggccagagaagattctcacagaaggttttgaactctaagaaataaattggtttggtaataaatggcttctggtcagat

SEQ ID NO: 41033 - DNA, 1435 bp, Homo sapiens
  misc_feature (22)..(22): n is a, c, g, or t
  misc_feature (35)..(35): n is a, c, g, or t
tccacctaggctaggtacgagnctggggttagctnctcgcgtacagcgggatgaagccgatcctactgcagggccatgagcggtccattacgcagattaagtataaccgcgaaggagacctcctctttactgtggccaaggaccctatcgtcaatgtatggtactctgtgaatggtgagaggctgggcacctacatgggccataccggagctgtgtggtgtgtggacgctgactgggacaccaagcatgtcctcactggctcagctgacaacagctgtcgtctctgggactgtgaaacaggaaagcagctggcccttctcaagaccaattcggctgtccggacctgcggttttgactttgggggcaacatcatcatgttctccacggacaagcagatgggctaccagtgctttgtgagcttttttgacctgcgggatccgagccagattgacaacaatgagccctacatgaagatcccttgcaatgactctaaaatcaccagtgctgtttggggacccctgggggagtgcatcatcgctggccatgagagtggagagctcaaccagtatagtgccaagtctggagaggtgttggtgaatgttaaggagcactcccggcagatcaacgacatccagttatccagggacatgaccatgtttgtgaccgcgtccaaggacaacacagccaagctttttgactccacaactcttgaacatcagaagactttccggacagaacgtcctgtcaactcagctgccctctcccccaactatgaccatgtggtcctgggcggtggtcaggaagccatggatgtaaccacaacctccaccaggattggcaagtttgaggccaggttcttccatttggcctttgaagaagagtttggaagagtcaagggtcactttggacctatcaacagtgttgccttccatcctgatggcaagagctacagcagcggcggcgaagatggttacgtccgtatccattacttcgacccacagtacttcgaatttgagtttgaggcttaagaagctggatctcctgccgggcgtggtggctcatgcctgtaatcccaccactttttttttaaggcaggcggatcacctgaggtcaggagtttaagaccagcctgaccaacatggagaaacctcgtctctactaaaaatacaaaaattagccaggcatggtggcacacgcctatagtcccagctactcaggaggctgaggcaggagaatcacttgaacccaggaggcagaggttgcagtgagctgagatcacgtcattgcactccatcctgagccacaagagcaaaactccgtctcaaaaaaaaaaaagaagaaggtggatctccaaccaggccagagaagattctcacagaaggttttgaactctaagaaataaattggtttggtaataaatggcttctggtcagat

SEQ ID NO: 41034 - DNA, 1440 bp, Homo sapiens
  misc_feature (2)..(2): n is a, c, g, or t
  misc_feature (12)..(12): n is a, c, g, or t
  misc_feature (14)..(14): n is a, c, g, or t
tnggctagtagngncgcgtgtgaatcggccgaggcttcctcgcgtcacagccgggatgaagccgatcctactgcagggccatgagcggtccattacgcagattaagtataaccgcgaaggagacctcctctttactgtggccaaggaccctatcgtcaatgtatggtactctgtgaatggtgagaggctgggcacctacatgggccataccggagctgtgtggtgtgtggacgctgactgggacaccaagcatgtcctcactggctcagctgacaacagctgtcgtctctgggactgtgaaacaggaaagcagctggcccttctcaagaccaattcggctgtccggacctgcggttttgactttgggggcaacatcatcatgttctccacggacaagcagatgggctaccagtgctttgtgagcttttttgacctgcgggatccgagccagattgacaacaatgagccctacatgaagatcccttgcaatgactctaaaatcaccagtgctgtttggggacccctgggggagtgcatcatcgctggccatgagagtggagagctcaaccagtatagtgccaagtctggagaggtgttggtgaatgttaaggagcactcccggcagatcaacgacatccagttatccagggacatgaccatgtttgtgaccgcgtccaaggacaacacagccaagctttttgactccacaactcttgaacatcagaagactttccggacagaacgtcctgtcaactcagctgccctctcccccaactatgaccatgtggtcctgggcggtggtcaggaagccatggatgtaaccacaacctccaccaggattggcaagtttgaggccaggttcttccatttggcctttgaagaagagtttggaagagtcaagggtcactttggacctatcaacagtgttgccttccatcctgatggcaagagctacagcagcggcggcgaagatggttacgtccgtatccattacttcgacccacagtacttcgaatttgagtttgaggcttaagaagctggatctcctgccgggcgtggtggctcatgcctgtaatcccaccactttttttttaaggcaggcggatcacctgaggtcaggagtttaagaccagcctgaccaacatggagaaacctcgtctctactaaaaatacaaaaattagccaggcatggtggcacacgcctatagtcccagctactcaggaggctgaggcaggagaatcacttgaacccaggaggcagaggttgcagtgagctgagatcacgtcattgcactccatcctgagccacaagagcaaaactccgtctcaaaaaaaaaaaagaagaaggtggatctccaaccaggccagagaagattctcacagaaggttttgaactctaagaaataaattggtttggtaataaatggcttctggtcagat

SEQ ID NO: 41035 - DNA, 1423 bp, Homo sapiens
tgggttgtgggcgcggccttcctcgcgtcacagccgggatgaagccgatcctactgcagggccatgagcggtccattacgcagattaagtataaccgcgaaggagacctcctctttactgtggccaaggaccctatcgtcaatgtatggtactctgtgaatggtgagaggctgggcacctacatgggccataccggagctgtgtggtgtgtggacgctgactgggacaccaagcatgtcctcactggctcagctgacaacagctgtcgtctctgggactgtgaaacaggaaagcagctggcccttctcaagaccaattcggctgtccggacctgcggttttgactttgggggcaacatcatcatgttctccacggacaagcagatgggctaccagtgctttgtgagcttttttgacctgcgggatccgagccagattgacaacaatgagccctacatgaagatcccttgcaatgactctaaaatcaccagtgctgtttggggacccctgggggagtgcatcatcgctggccatgagagtggagagctcaaccagtatagtgccaagtctggagaggtgttggtgaatgttaaggagcactcccggcagatcaacgacatccagttatccagggacatgaccatgtttgtgaccgcgtccaaggacaacacagccaagctttttgactccacaactcttgaacatcagaagactttccggacagaacgtcctgtcaactcagctgccctctcccccaactatgaccatgtggtcctgggcggtggtcaggaagccatggatgtaaccacaacctccaccaggattggcaagtttgaggccaggttcttccatttggcctttgaagaagagtttggaagagtcaagggtcactttggacctatcaacagtgttgccttccatcctgatggcaagagctacagcagcggcggcgaagatggttacgtccgtatccattacttcgacccacagtacttcgaatttgagtttgaggcttaagaagctggatctcctgccgggcgtggtggctcatgcctgtaatcccaccactttttttttaaggcaggcggatcacctgaggtcaggagtttaagaccagcctgaccaacatggagaaacctcgtctctactaaaaatacaaaaattagccaggcatggtggcacacgcctatagtcccagctactcaggaggctgaggcaggagaatcacttgaacccaggaggcagaggttgcagtgagctgagatcacgtcattgcactccatcctgagccacaagagcaaaactccgtctcaaaaaaaaaaaagaagaaggtggatctccaaccaggccagagaagattctcacagaaggttttgaactctaagaaataaattggtttggtaataaatggcttctggtcagat

SEQ ID NO: 41036 - DNA, 1012 bp, Homo sapiens
agtgagctcgaaaccttttccggtcttactcacgttgcggccttcctcgcgtcacagccgggatgaagccgatcctactgcagggccatgagcggtccattacgcagattaagtataaccgcgaaggagacctcctctttactgtggccaaggaccctatcgtcaatgtatggtactctgtgaatggtgagaggctgggcacctacatgggccataccggagctgtgtggtgtgtggacgctgactgggacaccaagcatgtcctcactggctcagctgacaacagctgtcgtctctgggactgtgaaacaggaaagcagctggcccttctcaagaccaattcggctgtccggacctgcggttttgactttgggggcaacatcatcatgttctccacggacaagcagatgggctaccagtgctttgtgagcttttttgacctgcgggatccgagccagattgacaacaatgagccctacatgaagatcccttgcaatgactctaaaatcaccagtgctgtttggggacccctgggggagtgcatcatcgctggccatgagagtggagagctcaaccagtatagtgccaagtctggagaggtgttggtgaatgttaaggagcactcccggcagatcaacgacatccagttatccagggacatgaccatgtttgtgaccgcgtccaaggacaacacagccaagctttttgactccacaactcttgaacatcagaagactttccggacagaacgtcctgtcaactcagctgccctctcccccaactatgaccatggtcctgggcgggggtcaggaagcatggttgtaaccaaactccacaggatggcagttgaggcaggtctccattggcttgaaaaattgggaagtcagggccttggcctataaggtgctcatcggggaacaacggcgacatgtacgagcaagccacatgagggaggaaacgtcgggggaagaccataaggccgcaaaccaaccaaagcgaccagaaaagaacc

SEQ ID NO: 41037 - DNA, 1327 bp, Homo sapiens
agtgagctcgaaaccttttccggtcttactcacgttgcggccttcctcgcgtcacagccgggatgaagccgatcctactgcagggccatgagcggtccattacgcagattaagtataaccgcgaaggagacctcctctttactgtggccaaggaccctatcgtcaatgtatggtactctgtgaatggtgagaggctgggcacctacatgggccataccggagctgtgtggtgtgtggacgctgactgggacaccaagcatgtcctcactggctcagctgacaacagctgtcgtctctgggactgtgaaacaggaaagcagctggcccttctcaagaccaattcggctgtccggacctgcggttttgactttgggggcaacatcatcatgttctccacggacaagcagatgggctaccagtgctttgtgagcttttttgacctgcgggatccgagccagattgacaacaatgagccctacatgaagatcccttgcaatgactctaaaatcaccagtgctgtttggggacccctgggggagtgcatcatcgctggccatgagagtggagagctcaaccagtatagtgccaagtctggagaggtgttggtgaatgttaaggagcactcccggcagatcaacgacatccagttatccagggacatgaccatgtttgtgaccgcgtccaaggacaacacagccaagctttttgactccacaactcttgaacatcagaagactttccggacgttcttccatttggcctttgaagaagagtttggaagagtcaagggtcactttggacctatcaacagtgttgccttccatcctgatggcaagagctacagcagcggcggcgaagatggttacgtccgtatccattacttcgacccacagtacttcgaatttgagtttgaggcttaagaagctggatctcctgccgggcgtggtggctcatgcctgtaatcccaccactttttttttaaggcaggcggatcacctgaggtcaggagtttaagaccagcctgaccaacatggagaaacctcgtctctactaaaaatacaaaaattagccaggcatggtggcacacgcctatagtcccagctactcaggaggctgaggcaggagaatcacttgaacccaggaggcagaggttgcagtgagctgagatcacgtcattgcactccatcctgagccacaagagcaaaactccgtctcaaaaaaaaaaaagaagaaggtggatctccaaccaggccagagaagattctcacagaaggttttgaactctaagaaataaattggtttggtaataaatggcttctggtcagat

SEQ ID NO: 41038 - DNA, 1323 bp, Homo sapiens
gcgactctagaggactccctaagagaccgtgttgatcgtcaatgtatggtactctgtgaatggtgagaggctgggcacctacatgggccataccggagctgtgtggtgtgtggacgctgactgggacaccaagcatgtcctcactggctcagctgacaacagctgtcgtctctgggactgtgaaacaggaaagcagctggcccttctcaagaccaattcggctgtccggacctgcggttttgactttgggggcaacatcatcatgttctccacggacaagcagatgggctaccagtgctttgtgagcttttttgacctgcgggatccgagccagattgacaacaatgagccctacatgaagatcccttgcaatgactctaaaatcaccagtgctgtttggggacccctgggggagtgcatcatcgctggccatgagagtggagagctcaaccagtatagtgccaagtctggagaggtgttggtgaatgttaaggagcactcccggcagatcaacgacatccagttatccagggacatgaccatgtttgtgaccgcgtccaaggacaacacagccaagctttttgactccacaactcttgaacatcagaagactttccggacagaacgtcctgtcaactcagctgccctctcccccaactatgaccatgtggtcctgggcggtggtcaggaagccatggatgtaaccacaacctccaccaggattggcaagtttgaggccaggttcttccatttggcctttgaagaagagtttggaagagtcaagggtcactttggacctatcaacagtgttgccttccatcctgatggcaagagctacagcagcggcggcgaagatggttacgtccgtatccattacttcgacccacagtacttcgaatttgagtttgaggcttaagaagctggatctcctgccgggcgtggtggctcatgcctgtaatcccaccactttttttttaaggcaggcggatcacctgaggtcaggagtttaagaccagcctgaccaacatggagaaacctcgtctctactaaaaatacaaaaattagccaggcatggtggcacacgcctatagtcccagctactcaggaggctgaggcaggagaatcacttgaacccaggaggcagaggttgcagtgagctgagatcacgtcattgcactccatcctgagccacaagagcaaaactccgtctcaaaaaaaaaaaagaagaaggtggatctccaaccaggccagagaagattctcacagaaggttttgaactctaagaaataaattggtttggtaataaatggcttctggtcagat

SEQ ID NO: 41039 - DNA, 1417 bp, Homo sapiens
agtgagctcgaaaccttttccggtcttactcacgttgcggccttcctcgcgtcacagccgggatgaagccgatcctactgcagggccatgagcggtccattacgcagattaagtataaccgcgaaggagacctcctctttactgtggccaaggaccctatcgtcaatgtatggtactctgtgaatggtgagaggctgggcacctacatgggccataccggagctgtgtggtgtgtggacgctgactctgacaacagctgtcgtctctgggactgtgaaacaggaaagcagctggcccttctcaagaccaattcggctgtccggacctgcggttttgactttgggggcaacatcatcatgttctccacggacaagcagatgggctaccagtgctttgtgagcttttttgacctgcgggatccgagccagattgacaacaatgagccctacatgaagatcccttgcaatgactctaaaatcaccagtgctgtttggggacccctgggggagtgcatcatcgctggccatgagagtggagagctcaaccagtatagtgccaagtctggagaggtgttggtgaatgttaaggagcactcccggcagatcaacgacatccagttatccagggacatgaccatgtttgtgaccgcgtccaaggacaacacagccaagctttttgactccacaactcttgaacatcagaagactttccggacagaacgtcctgtcaactcagctgccctctcccccaactatgaccatgtggtcctgggcggtggtcaggaagccatggatgtaaccacaacctccaccaggattggcaagtttgaggccaggttcttccatttggcctttgaagaagagtttggaagagtcaagggtcactttggacctatcaacagtgttgccttccatcctgatggcaagagctacagcagcggcggcgaagatggttacgtccgtatccattacttcgacccacagtacttcgaatttgagtttgaggcttaagaagctggatctcctgccgggcgtggtggctcatgcctgtaatcccaccactttttttttaaggcaggcggatcacctgaggtcaggagtttaagaccagcctgaccaacatggagaaacctcgtctctactaaaaatacaaaaattagccaggcatggtggcacacgcctatagtcccagctactcaggaggctgaggcaggagaatcacttgaacccaggaggcagaggttgcagtgagctgagatcacgtcattgcactccatcctgagccacaagagcaaaactccgtctcaaaaaaaaaaaagaagaaggtggatctccaaccaggccagagaagattctcacagaaggttttgaactctaagaaataaattggtttggtaataaatggcttctggtcagat

SEQ ID NO: 41040 - DNA, 1260 bp, Homo sapiens
ctcgtgcgctcgcgtcacagccgggatgaagccgatcctactgcagggccatgagcggtccattacgcagattaagtataaccgcgaaggagacctcctctttactgtggccaaggaccctatcgtcaatgtatggtactctgtgaatggtgagaggctgggcacctacatgggccataccggagctgtgtggtgtgtggacgctgactgggacaccaagcatgtcctcactggctcagctgacaacagctgtcgtctctgggactgtgaaacagacaacaatgagccctacatgaagatcccttgcaatgactctaaaatcaccagtgctgtttggggacccctgggggagtgcatcatcgctggccatgagagtggagagctcaaccagtatagtgccaagtctggagaggtgttggtgaatgttaaggagcactcccggcagatcaacgacatccagttatccagggacatgaccatgtttgtgaccgcgtccaaggacaacacagccaagctttttgactccacaactcttgaacatcagaagactttccggacagaacgtcctgtcaactcagctgccctctcccccaactatgaccatgtggtcctgggcggtggtcaggaagccatggatgtaaccacaacctccaccaggattggcaagtttgaggccaggttcttccatttggcctttgaagaagagtttggaagagtcaagggtcactttggacctatcaacagtgttgccttccatcctgatggcaagagctacagcagcggcggcgaagatggttacgtccgtatccattacttcgacccacagtacttcgaatttgagtttgaggcttaagaagctggatctcctgccgggcgtggtggctcatgcctgtaatcccaccactttttttttaaggcaggcggatcacctgaggtcaggagtttaagaccagcctgaccaacatggagaaacctcgtctctactaaaaatacaaaaattagccaggcatggtggcacacgcctatagtcccagctactcaggaggctgaggcaggagaatcacttgaacccaggaggcagaggttgcagtgagctgagatcacgtcattgcactccatcctgagccacaagagcaaaactccgtctcaaaaaaaaaaaagaagaaggtggatctccaaccaggccagagaagattctcacagaaggttttgaactctaagaaataaattggtttggtaataaatggcttctggtcagat

SEQ ID NO: 41041 - DNA, 1145 bp, Homo sapiens
tgggttgtgggcgcggccttcctcgcgtcacagccgggatgaagccgatcctactgcagggccatgagcggtccattacgcagattaagtataaccgcgaaggagacctcctctttactgtggccaaggaccctatcgtcaatgtatggtactctgtgaatggtgagaggctgggcacctacatgggccataccggagctgtgtggtgtgtggacgctgactgggacaccaagcatgtcctcactggctcagctgacaacagctgtcgtctctgggactgtgaaacagtctggagaggtgttggtgaatgttaaggagcactcccggcagatcaacgacatccagttatccagggacatgaccatgtttgtgaccgcgtccaaggacaacacagccaagctttttgactccacaactcttgaacatcagaagactttccggacagaacgtcctgtcaactcagctgccctctcccccaactatgaccatgtggtcctgggcggtggtcaggaagccatggatgtaaccacaacctccaccaggattggcaagtttgaggccaggttcttccatttggcctttgaagaagagtttggaagagtcaagggtcactttggacctatcaacagtgttgccttccatcctgatggcaagagctacagcagcggcggcgaagatggttacgtccgtatccattacttcgacccacagtacttcgaatttgagtttgaggcttaagaagctggatctcctgccgggcgtggtggctcatgcctgtaatcccaccactttttttttaaggcaggcggatcacctgaggtcaggagtttaagaccagcctgaccaacatggagaaacctcgtctctactaaaaatacaaaaattagccaggcatggtggcacacgcctatagtcccagctactcaggaggctgaggcaggagaatcacttgaacccaggaggcagaggttgcagtgagctgagatcacgtcattgcactccatcctgagccacaagagcaaaactccgtctcaaaaaaaaaaaagaagaaggtggatctccaaccaggccagagaagattctcacagaaggttttgaactctaagaaataaattggtttggtaataaatggcttctggtcagat

SEQ ID NO: 41042 - DNA, 1071 bp, Homo sapiens
tgggttgtgggcgcggccttcctcgcgtcacagccgggatgaagccgatcctactgcagggccatgagcggtccattacgcagattaagtataaccgcgaaggagacctcctctttactgtggccaaggaccctatcgtcaatgtatggtactctgtgaatggtgagaggctgggcacctacatgggccataccggagctgtgtggtgtgtggacgctgactgggacaccaagcatgtcctcactggctcagctgacaacagctgtcgtctctgggactgtgaaacagtctggagaggtgttggtgaatgttaaggagcactcccggcagatcaacgacatccagttatccagggacatgaccatgtttgtgaccgcgtccaaggacaacacagccaagctttttgactccacaactcttgaacatcagaagactttccggacagaacgtcctgtcaactcagctgccctctcccccaactatgaccatgttcttccatttggcctttgaagaagagtttggaagagtcaagggtcactttggacctatcaacagtgttgccttccatcctgatggcaagagctacagcagcggcggcgaagatggttacgtccgtatccattacttcgacccacagtacttcgaatttgagtttgaggcttaagaagctggatctcctgccgggcgtggtggctcatgcctgtaatcccaccactttttttttaaggcaggcggatcacctgaggtcaggagtttaagaccagcctgaccaacatggagaaacctcgtctctactaaaaatacaaaaattagccaggcatggtggcacacgcctatagtcccagctactcaggaggctgaggcaggagaatcacttgaacccaggaggcagaggttgcagtgagctgagatcacgtcattgcactccatcctgagccacaagagcaaaactccgtctcaaaaaaaaaaaagaagaaggtggatctccaaccaggccagagaagattctcacagaaggttttgaactctaagaaataaattggtttggtaataaatggcttctggtcagat

SEQ ID NO: 41043 - DNA, 874 bp, Homo sapiens
ctcgtgcgctcgcgtcacagccgggatgaagccgatcctactgcagggccatgagcggtccattacgcagattaagtataaccgcgaaggagacctcctctttactgtggccaaggaccctatcgtcaatgtatggtactctgtgaatggtgagaggctgggcacctacatgggccataccggagctgtgtggtgtgtggacgctgactgggacaccaagcatgtcctcactggctcagctgacaacagctgtcgtctctgggactgtgaaacagacaacaatgagccctacatgaagatcccttgcaatgactctaaaatcaccagtgctgtttggggacccctgggggagtgcatcatcgctggccatgagagtggagagctcaaccagtatagtgccaagtctggagaggtgttggtgaatgttaaggagcactcccggcagatcaacgacatccagttatccagggacatgaccatgtttgtgaccgcgtccaaggacaacacagccaagctttttgactccacaactcttgaacatcagaagactttccggacagaacgtcctgtcaactcagctgccctctcccccaactatgaccatgtggtcctgggcggtggtcaggaagccatggatgtaaccacaacctccaccaggattggcaagtttgaggccagttgaacccaggaggcagaggttgcagtgagctgagatcacgtcattgcactccatcctgagccacaagagcaaaactccgtctcaaaaaaaaaaaagaagaaggtggatctccaaccaggccagagaagattctcacagaaggttttgaactctaagaaataaattggtttggtaataaatggcttctggtcagat

SEQ ID NO: 41044 - DNA, 396 bp, Homo sapiens
aggccaaggcgggtggatcatgaggtcaggagttcaagacccacctggccaagatggtgaaaccctgcctctactaaaaacacaaaaattagccaggtgtggtggcatgcatctataatcccagatactcgggtggctgaggcaggagaatcgcttgaacctgggaggcggaggttgcagtgagctgagatcacaccactgcactctagcctaggtgacagagcgagactctgtctcaaaaaaaaaaaaaaaaaaaaaaagagcctgggccagacacagtggcccacgcctgtaattacagaacttttggggatgaaggagggaggattacttgaactcagaagtttgagaccagcctggggaaaataatgaaatcccatctcaacaaaaaattaa

SEQ ID NO: 41045 - DNA, 2769 bp, Homo sapiens
gagcgagagagcccctttagcaagaaaacatcaagagtttttgagtgtggtgtgtggttcccttcgtccccatcagtcgcttcaatatttcaaaatggatccggttctgtggcgggtgcgagagtgaggctgtgggggacctccaggccgaacctccgcgaagcctcgcggcttctgcgtgccctggccccgggaggataaggatttcccttccctcctacttgcgcgcggagccgagctcttgttgagctatggagtcgccaacaaaggagattgaagaatttgagagcaactctctgaaatacctgcaaccggaacagatcgagaaaatctggcttcggctccgcgggctgaggaaatataagaaaacgtcccagagattacggtctttggtcaaacaattagagagaggggaagcttcagtggtagatcttaagaagaatttggaatatgcagccacagtgcttgaatctgtgtatattgatgaaacaaggagactcctggatacagaggatgagctcagtgacattcagtcagatgctgtgccttctgaggtccgagactggctggcctccaccttcacgcggcagatggggatgatgctcaggaggagcgacgagaagccccggttcaagagcatcgttcacgcagtgcaggctgggatatttgtggagagaatgtatagacggacatcaaacatggttggactgagctatccaccagctgttattgaggcattaaaggatgtggacaagtggtcctttgacgtcttttccctcaatgaggccagtggggatcatgcactgaaatttattttctatgaactactcacacgttatgatctgatcagccgtttcaagatccccatttctgcacttgtctcatttgtggaggccctggaagtgggatacagcaagcacaaaaatccttaccataacttaatgcacgctgccgatgttacacagacagtgcattacctcctctataagacaggagtggcgaactggctgacggagctggagatctttgctataatcttctcagctgccatccatgactacgagcataccggaaccaccaacaatttccacattcagactcggtctgatccagctattctgtataatgacagatctgtactggagaatcaccatttaagtgcagcttatcgccttctgcaagatgacgaggaaatgaatattttgattaacctctcaaaggatgactggagggagtttcgaaccttggtaattgaaatggtgatggccacagatatgtcttgtcacttccaacaaatcaaagcaatgaagactgctctgcagcagccagaagccattgaaaagccaaaagccttatcccttatgctgcatacagcagatattagccatccagcaaaagcatgggacctccatcatcgctggacaatgtcactcctggaggagttcttcagacagggtgacagagaagcagagctggggctgcctttttctcctctgtgtgaccgaaagtccactatggttgctcagtcacaagtaggtttcattgatttcatcgtggaacccaccttcactgtgcttacggacatgaccgagaagattgtgagtccattaatcgatgaaacctctcaaactggtgggacaggacagaggcgttcgagtttgaatagcatcagctcgtcagatgccaagcgatcaggtgtcaagacctctggttcagagggaagtgccccgatcaacaattctgtcatctccgttgactataagagctttaaagctacttggacggaagtggtgcacatcaatcgggagagatggagggccaaggtacccaaagaggagaaggccaagaaggaagcagaggaaaaggctcgcctggccgcagaggagcagcaaaaggaaatggaagccaaaagccaggctgaagaaggcgcatctggcaaagctgagaaaaagacgtctggagaaactaagaatcaagtcaatggaacacgggcaaacaaaagtgacaaccctcgtgggaaaaattccaaagccgagaagtcatcaggagaacagcaacagaatggtgacttcaaagatggtaaaaataagacagacaagaaggatcactctaacatcggaaatgattcaaagaaaacagatgattcacaagagtaaaaaagacctcatagacaataaaagaggctgccagtgtcttgcatcattctagctgagcttcttcattctccttcttctccttcttccacaaagacccatatctggagaaggtgtacaactttcaaacacaagccccccaccccctgacccttggccttccctcacaccatctccttccaggggatgaatctttgggggttggtttgaggtcttagaactctgggggatattcccctgagcaaaacaaacaacgtgagatttttactcaaacagaaacaaaacatgaaggggcatcctcaaaatcctttgctaatgacctggctttcaaggcatctgtctggcctgatgagaatggacatcctggatatgctgggagaggcctgaaaaaagccacacacacagtaattgccattttatgactgtcaatgccgttactttaaatgttgtcatttttgcactggctactgatgatacagccatgctgacattcatcaccgcaaagatgatgattccagtctctggttcctttcctgagtcaggaacatttgttttctccaatttcctttcagacttaaaattgttcttatgctttttttcccacttctgtaataca

SEQ ID NO: 41046 - DNA, 807 bp, Homo sapiens
gagcgagagagcccctttagcaagaaaacatcaagagtttttgagtgtggtgtgtggttcccttcgtccccatcagtcgcttcaatatttcaaaatggatccggttctgtggcgggtgcgagagtgaggctgtgggggacctccaggccgaacctccgcgaagcctcgcggcttctgcgtgccctggccccgggaggataaggatttcccttccctcctacttgcgcgcggagccgagctcttgttgaggtgagggttccggaagcccacgcagctccgcaggtcggtggtggccgcggctgccctgcgggggtgagtgtgcccggccggggtcggagcccagcgtgtgcccggcagacggcggtgcccgcgcgcccctccctccgcgcccgcggtgacagcccagacaccagcccgggcgctgacagacgacttttctcacttgtcagttttctcgcttgtcagcagagctgctgctatggagtcgccaacaaaggagattgaagaatttgagagcaactctctgaaatacctgcaaccggaacagatcgagaaaatctggcttcggctccgcgggctggctgtgtctaaatgggagaagattgaagggggaaactttacaatatctgaagctaagaatatatctatgaacgaggggcgtgtcaggaaggaggaaatataagaaaacgtcccagaggtaagaacgtctttctgagctgcaactggttgattcatttgtggcccagctcttcacaagtctggctcatggtggactggaactgtaataaacaggcttttggttctttc

SEQ ID NO: 41047 - DNA, 3407 bp, Homo sapiens
  misc_feature (2545)..(2545): n is a, c, g, or t
  misc_feature (2963)..(2963): n is a, c, g, or t
agcggggcggctcccgctttgctcagccgccgcttttctctcccttctcactttctctcctccccacccagccctccttttcacctccaaaccctttagctgcgcgctgatcgcttctgtggctttgtttggggtagggggagaatacgaatagacccgaggtgctttctcttggagctggagtccaatcccaatccctatctctatccctatccctgtgcttatccctgggcattagcccgggaccatggctggttcccgcagctgcatccggagcgcacctggggccatggtttgccgcgatcggagtccgctctaagtcggagtctgggggcgcagaagggggagcgcgccgagaaagtgcccggcaaacgcgcgccgcgcatggctgggcatcgcgagctgggcgaggagacggggaggggacagcccaaactatctcagcttcaccgccagtggtcacctacctgcagctatggagtcgccaacaaaggagattgaagaatttgagagcaactctctgaaatacctgcaaccggaacagatcgagaaaatctggcttcggctccgcgggctgaggaaatataagaaaacgtcccagagattacggtctttggtcaaacaattagagagaggggaagcttcagtggtagatcttaagaagaatttggaatatgcagccacagtgcttgaatctgtgtatattgatgaaacaaggagactcctggatacagaggatgagctcagtgacattcagtcagatgctgtgccttctgaggtccgagactggctggcctccaccttcacgcggcagatggggatgatgctcaggaggagcgacgagaagccccggttcaagagcatcgttcacgcagtgcaggctgggatatttgtggagagaatgtatagacggacatcaaacatggttggactgagctatccaccagctgttattgaggcattaaaggatgtggacaagtggtcctttgacgtcttttccctcaatgaggccagtggggatcatgcactgaaatttattttctatgaactactcacacgttatgatctgatcagccgtttcaagatccccatttctgcacttgtctcatttgtggaggccctggaagtgggatacagcaagcacaaaaatccttaccataacttaatgcacgctgccgatgttacacagacagtgcattacctcctctataagacaggagtggcgaactggctgacggagctggagatctttgctataatcttctcagctgccatccatgactacgagcataccggaaccaccaacaatttccacattcagactcggtctgatccagctattctgtataatgacagatctgtactggagaatcaccatttaagtgcagcttatcgccttctgcaagatgacgaggaaatgaatattttgattaacctctcaaaggatgactggagggagtttcgaaccttggtaattgaaatggtgatggccacagatatgtcttgtcacttccaacaaatcaaagcaatgaagactgctctgcagcagccagaagccattgaaaagccaaaagccttatcccttatgctgcatacagcagatattagccatccagcaaaagcatgggacctccatcatcgctggacaatgtcactcctggaggagttcttcagacagggtgacagagaagcagagctggggctgcctttttctcctctgtgtgaccgaaagtccactatggttgctcagtcacaagtaggtttcattgatttcatcgtggaacccaccttcactgtgcttacggacatgaccgagaagattgtgagtccattaatcgatgaaacctctcaaactggtgggacaggacagaggcgttcgagtttgaatagcatcagctcgtcagatgccaagcgatcaggtgtcaagacctctggttcagagggaagtgccccgatcaacaattctgtcatctccgttgactataagagctttaaagctacttggacggaagtggtgcacatcaatcgggagagatggagggccaaggtacccaaagaggagaaggccaagaaggaagcagaggaaaaggctcgcctggccgcagaggagcagcaaaaggaaatggaagccaaaagccaggctgaagaaggcgcatctggcaaagctgagaaaaagacgtctggagaaactaagaatcaagtcaatggaacacgggcaaacaaaagtgacaaccctcgtgggaaaaattccaaagccgagaagtcatcaggagaacagcaacagaatggtgacttcaaagatggtaaaaataagacagacaagaaggatcactctaacatcggaaatgattcaaagaaaacagatggcacaaaacagcgttctcacggctcaccagccccaagcaccagctccacgtgtcgccttacgttgccagtcatcaagcctcctttgcgtcattttaaacgccctgcttacgcatctagctcctatgcaccttcagtctcaaagaaaactgatgagcatcctgcaaggtacaagatgctngatcagaggatcaaaatgaaaaagattcagaacatctcacataactggaacagaaaataggccgaggggaagaagagagggagtgaaggagggtctacctatctgcttctcagcacccactggccacagcaggacacacctccaagacccttggaggctgttggagcaggtactatcctggttgactccaccaaggtgaaatgaaagttgtatgtgattttcctctttgttgttcttgtatagacttttcaattgctgtatgtgggatcagcccagacgccagcaacaaactagcaagaggggtgtttttatggtataagtctctaaaagtctaaattggaccaaaattaaaatgacacaaacttaaaaaaaaataaaattcctctcattgccacttttttcaatctctaaaagttanttgcccccaaaagaatattggtttaataatcatcatatttaagaaatgcactgataaaaacatattttccaattttaaatacacctatttaaaatgtaaatacacttatttaaaattcaagtaaatatgtaactatcaaagtaaatgtattcaaaacagaagttgtgcttctgaatgtaaaaatattaaaaggaagagaagacggatgaattgttgtattcatggacatttcagaattcatgcttataaagcaaatccaagttaaaaaacaaaaaaagatttttgtgcctcatgaagattgtgcctcatgcccaataacctcatgtactttgaaggatgtgaaggtttgcaagagatgcatttggcttcattttcctctaatcttttacttctacccacagtagatgatacaaaaaatcttgccttaaagactgcaggtttaag

SEQ ID NO: 41048 - DNA, 3143 bp, Homo sapiens
  misc_feature (2281)..(2281): n is a, c, g, or t
  misc_feature (2699)..(2699): n is a, c, g, or t
tgctgtgggaaaccctgggctttggagtcacacgcagatttatcatgcccattagctccaagaggcagatcctattgtttccaagtcacacatgggaagactgaggctccaggaggttgcaaatgaagctggagacaagaatgccagaccactggcccgcttctctcggtctaagtcacagaactgtctgtggaactccctcatcgatgggctcacagggaatgtcaaggagaagccaaggccaacaattgtccatgaccctcgacccccagaggagatcctagctgatgaattgccacagctggatagctcagaagtcttggtgaagacatccttcagattacggtctttggtcaaacaattagagagaggggaagcttcagtggtagatcttaagaagaatttggaatatgcagccacagtgcttgaatctgtgtatattgatgaaacaaggagactcctggatacagaggatgagctcagtgacattcagtcagatgctgtgccttctgaggtccgagactggctggcctccaccttcacgcggcagatggggatgatgctcaggaggagcgacgagaagccccggttcaagagcatcgttcacgcagtgcaggctgggatatttgtggagagaatgtatagacggacatcaaacatggttggactgagctatccaccagctgttattgaggcattaaaggatgtggacaagtggtcctttgacgtcttttccctcaatgaggccagtggggatcatgcactgaaatttattttctatgaactactcacacgttatgatctgatcagccgtttcaagatccccatttctgcacttgtctcatttgtggaggccctggaagtgggatacagcaagcacaaaaatccttaccataacttaatgcacgctgccgatgttacacagacagtgcattacctcctctataagacaggagtggcgaactggctgacggagctggagatctttgctataatcttctcagctgccatccatgactacgagcataccggaaccaccaacaatttccacattcagactcggtctgatccagctattctgtataatgacagatctgtactggagaatcaccatttaagtgcagcttatcgccttctgcaagatgacgaggaaatgaatattttgattaacctctcaaaggatgactggagggagtttcgaaccttggtaattgaaatggtgatggccacagatatgtcttgtcacttccaacaaatcaaagcaatgaagactgctctgcagcagccagaagccattgaaaagccaaaagccttatcccttatgctgcatacagcagatattagccatccagcaaaagcatgggacctccatcatcgctggacaatgtcactcctggaggagttcttcagacagggtgacagagaagcagagctggggctgcctttttctcctctgtgtgaccgaaagtccactatggttgctcagtcacaagtaggtttcattgatttcatcgtggaacccaccttcactgtgcttacggacatgaccgagaagattgtgagtccattaatcgatgaaacctctcaaactggtgggacaggacagaggcgttcgagtttgaatagcatcagctcgtcagatgccaagcgatcaggtgtcaagacctctggttcagagggaagtgccccgatcaacaattctgtcatctccgttgactataagagctttaaagctacttggacggaagtggtgcacatcaatcgggagagatggagggccaaggtacccaaagaggagaaggccaagaaggaagcagaggaaaaggctcgcctggccgcagaggagcagcaaaaggaaatggaagccaaaagccaggctgaagaaggcgcatctggcaaagctgagaaaaagacgtctggagaaactaagaatcaagtcaatggaacacgggcaaacaaaagtgacaaccctcgtgggaaaaattccaaagccgagaagtcatcaggagaacagcaacagaatggtgacttcaaagatggtaaaaataagacagacaagaaggatcactctaacatcggaaatgattcaaagaaaacagatggcacaaaacagcgttctcacggctcaccagccccaagcaccagctccacgtgtcgccttacgttgccagtcatcaagcctcctttgcgtcattttaaacgccctgcttacgcatctagctcctatgcaccttcagtctcaaagaaaactgatgagcatcctgcaaggtacaagatgctngatcagaggatcaaaatgaaaaagattcagaacatctcacataactggaacagaaaataggccgaggggaagaagagagggagtgaaggagggtctacctatctgcttctcagcacccactggccacagcaggacacacctccaagacccttggaggctgttggagcaggtactatcctggttgactccaccaaggtgaaatgaaagttgtatgtgattttcctctttgttgttcttgtatagacttttcaattgctgtatgtgggatcagcccagacgccagcaacaaactagcaagaggggtgtttttatggtataagtctctaaaagtctaaattggaccaaaattaaaatgacacaaacttaaaaaaaaataaaattcctctcattgccacttttttcaatctctaaaagttanttgcccccaaaagaatattggtttaataatcatcatatttaagaaatgcactgataaaaacatattttccaattttaaatacacctatttaaaatgtaaatacacttatttaaaattcaagtaaatatgtaactatcaaagtaaatgtattcaaaacagaagttgtgcttctgaatgtaaaaatattaaaaggaagagaagacggatgaattgttgtattcatggacatttcagaattcatgcttataaagcaaatccaagttaaaaaacaaaaaaagatttttgtgcctcatgaagattgtgcctcatgcccaataacctcatgtactttgaaggatgtgaaggtttgcaagagatgcatttggcttcattttcctctaatcttttacttctacccacagtagatgatacaaaaaatcttgccttaaagactgcaggtttaag

SEQ ID NO: 41049 - DNA, 457 bp, Homo sapiens
aaaaaagtggtggtgcgttctagcctgttagaattacccaagtaaatcacaactgtttaacattctgaattttgcttggctttctgttcaggtctgatccagctattctgtataatgacagatctgtactggagaatcaccatttaagtgcagcttatcgccttctgcaagatgacgaggaaatgaatattttgattaacctctcaaaggatgactggaggtaaggatgagaaaagagagagatttgtaggccagggaaggaactttgaagttggatgaagtatgctgtttttgagaaaagaacaccttgcttaaaatgttgattcgtgttgctttctctctctttctttctctcactctcaccctctctttgtgtatgtatgtatgtcttatttctcttttttctttatacagatattcaaatatttataaataaaggctatggaatgttatgatt

SEQ ID NO: 41050 - DNA, 384 bp, Homo sapiens
gccctctgtgaaatgttttggcaggtcgtggtggctctctgtctaccctgtccacagctggaactgtgaccctcaaggagaagagaatgaagctcagagggacagtgcagatgacagcatgtcaccctttgctttttatggtgtcactgatacattgctaatgactgccatggttattttattcttctacaactcgtcctcctttcctgctcctatttcttaccaaaactagaacttggccctccctgaaattactttctgcaaggggcttgcctccaaattgttcatcccagagaaaatgttgactctttaattttgttttaactgattaatacgtgatatccttaagaaaaaaattagaaactgaagttaaggaagaatgaa

SEQ ID NO: 41051 - DNA, 322 bp, Homo sapiens
ccattcataactttcagcatttaactatgagcatttcccttttatagagatttttttctatccattataaggattatagacttttatgatctaataagaattgaactgaaaaagaatgcttaaaaagctacttatagcagccaaatatttattattaaaatgggatattagagcaagatttgaaagaagtaaaattaaaccattacaataagttacactccttaaatgatgctcttgtattagaggacaaagtatctgccttacagtcccaagataaagccacatgccccagactttattatccctgtctttgagctagcct

SEQ ID NO: 41052 - DNA, 562 bp, Homo sapiens
caccttggcctcccaaagtgctgggtttaatgggctaggtgtgagccaccacaccccaccccttttctctattttaatgaaatatagacgcttgttatcctaaagttttctttttctttctttttttttttttttgccatgaagttcatgaacacactaaaatgttctatgcagcatatttttaggagcagattcggttcagataatttattatgtctgtgctgccaacttgaggctgcctgagagtttgttgggagctccaaactctccagtcaccacagaagccaccttttcacccagcgggcgcacactcgggatctgaactctctgatagatgggccatgctggggagacagcagcagcctgaaaagggttcacagccctccaagaaaaaggggagaaaagaccctgcatttggactgcaacactaaaggaaccctttcattgcttcatggaaaagagtttgggaggatattggccaggagcccagagctaggggatccagggctgtgggcaagttattaagggccctggaaaggccccattgggcaatttagggaat

SEQ ID NO: 41053 - DNA, 2507 bp, Homo sapiens
taaaaacaactcttaaggataaaacaaatttcagattaattatgaaaacaagaatgtggcagggcatggtggcctacacaagcaatcctaacactttaggaggccaaggtagaaggattgcttcagcccaggagttcaagaccagcctgggcaacacagtgagatcttgtctctacaaaaacaattttaaaaattagcctacatggcacaaacatcattttgtttgtacactacctatctgagagaaatgacttgaaaatgtgatattatcagctggatcagtcatctgatatgagctataaacgtgcagcacaaatgtcactcagagactgaaaaatgagtaaaaatcaataatttcttagggaaaaaagactgcctagaatcttattaaaaaacattctgggggtctatcagttagaaatattttggttacactgacagataaccaaattcaaatgggcttagagcaaaaaatgggagggcatagaggacacttacttgttcacataactggaaagctccaaggtcagttggtttcaggtaaggcttgatccagcagttcagcagtattactaaggacttgcctttacccatattcttccccatgcctgaatgtccaggtaagagtcattggtcattgtaaagatttgtccagcttccattcttcattcctaatctgagtttgttttccttttagagaataactccctagtgtgtttaatcttagtaagaaggtaattattccaggcaccagtttcatctctactgaaagggaaagaaacagatttcacctctccctttgcccttcccttcccttccccatccctaagtttatgagcagacatatgacttaagcttggtcaggtagatgctgtcttctggactttggatcttgacagagttccacgggatggaaggaacaggggcagccctgcagcatagcctttgctcctccccactgtcaaacctgctgtccatatctaatcaatcctggaagtcctacaagcatttccctttgcttaggttgcctatgtcctgctgtttgattgatagagcaacagagcctttgcaggaaagcccgtgcaaaggagaacctcccaccttgtgtccccagggcactaagtatcatatcttttgatgtgcccatatcgataaacattgtactactgacttagcaatctgtgttccccaccctactgagctctctaaaaacagagtacttagcttatgcttagcccagtgtctggtcaatattagatatttagaaaaatctgtgtgaatgaatgaatgaatgaatcactttagggagaaaggacatgcttgtattaaacagttcttaaatttaagtcatacattatcaagcacaaataataagggctctttacaaagtatcgaactgccataaggaacatttttaggctattttatgaggacttattctttgaggatctatatacctgtcaggatgaatcttggttcatccctgaaatttaatctgaaggcttcttcagtgcagattgctccctatctaataggggataaatatccattatgccaccaggaaatgcctctgacatttaaatgcatgccttatcctaactgaaataaaggatctcaattctccccagtttgcctgcagcaccactcccaggagccaagccctggcctggccaatgacaccacatgtgtagaaagatacactgggttttgcaggtgcgtcgggacgctctgaggaggggagggtaagacggtgacacgcactcctgccactcttacatcgaagcctgacccctgcactgtgtgatcacatacaggctcagcctcctgcaggggcacccgcattccagcctggcacggttgggcacccagcacctcccaggggagcagggcagtgcaccgaggagtcgagatgctccagcaagggtgggcataaaccagggctggtcttcctctacccttctccttcccttcccctccgagtaatgtgtgtctagccattaggtgagacagaggatatgggtgtgtgcccagagcaggacactgccctgagtccagtggggaggtcgggagggagccccctcagggccaagggtggcagaggagcagggaggtcgctgtcatatgggggactgaccaaagaagtcaatctattaagcatcacagaagccaggtttcttgtcagaaaacggagttgaaaatatgaggagggagaaaactagaattatcccttcaggtggagttggaatctgacccacccatctgaactggtggttttctaggtggctggtgtgttcatttcctacagctgctgtaacaaattgccacaaactgcggggctgaagacaaattgattctcccacagttccagagcccagatgtcagaactcaaggtgttggcagggccgtaatccccaaaagctctaggggagatttccttccctgcccctttcagcttctagtggctccacaacactgagtcctcacatggtgacctcgagagaaaggaa

SEQ ID NO: 41054 - DNA, 1514 bp, Homo sapiens
atccaccgcaggcttactgtacacatgctagggtccaggacagcaggaccaagccagcagaaacagcctgagcccaccgcagactggcctggctatactggacaatgccactcctcctgtacacctgtcttctctggctgcccaccagcggcctctggaccgtccaggccatggatcctaacgctgcttatgtgaacatgagtaaccatcaccggggcctggcttcagccaacgttgactttgccttcagcctgtataagcacctagtggccttgagtcccaaaaagaacattttcatctcccctgtgagcatctccatggccttagctatgctgtccctgggcacctgtggccacacacgggcccagcttctccagggcctgggtttcaacctcactgagaggtctgagactgagatccaccagggtttccagcacctgcaccaactctttgcaaagtcagacaccagcttagaaatgaccatgggcaatgccttgtttcttgatggcagcctggagttgctggagtcattctcagcagacatcaagcactactatgagtcagaggtcttggctatgaatttccaggactgggcaacagccagcagacagatcaacagctatgtcaagaataagacacaggggaactatagtcgacttgttttcagggctggatagcccagccatcctcgtcctggtcaactatatcttcttcaaagtcttcttcaaaggcacatggacacagccctttgacctggcaagcaccagggaggagaacttctatgtggacgagacaactgtggtgaaggtgcccatgatgttgcagtcgagcaccatcagttaccttcatgacgcggagctcccctgccagctggtgcagatgaactacgtgggcaatgggactgtcttcttcatccttccggacaaggggaagatgaacacagtcatcgctgcactgagccgggacacgattaacaggtggtccgcaggcctgaccagcagccaggtggacctgtacattccaaaggtcaccatctctggagtctatgacctcggagatgtgctggaggaaatgggcattgcagacttgttcaccaaccaggcaaatttctcacgcatcacccaggacgcccagctgaagtcatcaaaggtggtccataaagctgtgctgcaactcaatgaggagggtgtggacacagctggctccactggggtcaccctaaacctgacgtccaagcctatcatcttgcgtttcaaccagcccttcatcatcatgatcttcgaccacttcacctggagcagccttttcctggcgagggttatgaacccagtgtaagagaccacccacccagagcctcagcactgtctgactttgggaaccagggatcccacagaaatgttttggagagcgggaggtttcccccaatctcctccaagttcttctccctccaaccagagttgtgtctaactttaggcatcttttaataaatgtcattgcgactctgaaaaatgacc

SEQ ID NO: 41055 - DNA, 632 bp, Homo sapiens
gggactctgagtttgagacttgaggtctagcaccacttccagagccctcagaactgggacccactctaggcatggggagccaaggcacagtctgatctacccccaaatccaaggaccagtaccctcttggtctctccctacttccttgtttagaagccagtctcagaaacagagctcatcctcaacccattccaagaagtagaggatgaaacaggattttttctgggaatttttatatcttacctacacttggatagtaggcccgtgaggtcacctggaactgtgttttcctctctgccctacagacctgtctcctcctcttcctcttcttcaaaggcacatggacacagccctttgacctggcaagcaccagggaggagaacttctatgtggacgagacaactgtggtgaaggtgcccatgatgttgcagtcgagcaccatcagttaccttcatgacgcggagctcccctgccagctggtgcagatgaactacgtgggcaatgggactgtcttcttcatccttccggacaaggggaagatgaacacagtcatcgctgcactgagccgggacacgattaacaggtggtccgcaggcctgaccagcagccaagtggacctgccatcatgttga

SEQ ID NO: 41056 - DNA, 663 bp, Homo sapiens
cacagctggagccagggaccactgctcccagctgggcgctccctccagtcctctgcttctagcaggggttctcctgggactaaaaaggcttcattatggactattgtcttagatgctccatggtccagctgcatcccaggtggaatcagctcgaaggaattgcagagaagaaaagaatgtgcaattcagaggccccgtgggaaagctgcctgtgtcatggaggcagagacagatcctgcctcctgctctgtcccttctcctacccacaaagagcaagtcaggctggagggcaggagctggagggagcgcatgaggaaataagagtctggccaggagaagaggtgctgctctcccctctgccaggcccagccctggaatgtctaactctgtctgcttaccccgagcagccaggtggacctgtacattccaaaggtcaccatctctggagtctatgacctcggagatgtgctggaggaaatgggcattgcagacttgttcaccaaccaggcaaatttctcacgcatcacccaggacgcccagctgaagtcatcaaaggtaaatgtcatgggaacccaccttttcttccccctccaaaattcacaatataaatataatactaggaagtggcactgagttcgttcatgaatgagcctctaggtccct

SEQ ID NO: 41057 - DNA, 486 bp, Homo sapiens
gaccttctctgaccctggatttaccttcctaaaaccaaggatgtgaagggtcccagcaatgagtcaggaaagcgagaacgcacagcaggtctcactacccatcttcattctgtacctaacagtggtccataaagctgtgctgcaactcaatgaggagggtgtggacacagctggctccactggggtcaccctaaacctgacgtccaagcctatcatcttgcgtttcaaccagcccttcatcatcatgatcttcgaccacttcacctggagcagccttttcctggcgagggttatgaacccagtgtaagagaccacccacccagagcctcagcactgtctgactttgggaaccagggatcccacagaaatgttttggagagcgggaggtttcccccaatctcctccaagttcttctccctccaaccagagttgtgtctaactttaggcatcttttaataaatgtcattgcgactctgaaaaatgacc

SEQ ID NO: 41058 - DNA, 1447 bp, Homo sapiens
atccaccgcaggcttactgtacacatgctagggtccaggacagcaggaccaagccagcagaaacagcctgagcccaccgcagactggcctggctatactggacaatgccactcctcctgtacacctgtcttctctggctgcccaccagcggcctctggaccgtccaggccatggatcctaacgctgcttatgtgaacatgagtaaccatcaccggggcctggcttcagccaacgttgactttgccttcagcctgtataagcacctagtggccttgagtcccaaaaagaacattttcatctcccctgtgagcatctccatggccttagctatgctgtccctgggcacctgtggccacacacgggcccagcttctccagggcctgggtttcaacctcactgagaggtctgagactgagatccaccagggtttccagcacctgcaccaactctttgcaaagtcagacaccagcttagaaatgaccatgggcaatgccttgtttcttgatggcagcctggagttgctggagtcattctcagcagacatcaagcactactatgagtcagaggtcttggctatgaatttccaggactgggcaacagccagcagacagatcaacagctatgtcaagaataagacacaggggaactatatcttcttcaaaggcacatggacacagccctttgacctggcaagcaccagggaggagaacttctatgtggacgagacaactgtggtgaaggtgcccatgatgttgcagtcgagcaccatcagttaccttcatgacgcggagctcccctgccagctggtgcagatgaactacgtgggcaatgggactgtcttcttcatccttccggacaaggggaagatgaacacagtcatcgctgcactgagccgggacacgattaacaggtggtccgcaggcctgaccagcagccaggtggacctgtacattccaaaggtcaccatctctggagtctatgacctcggagatgtgctggaggaaatgggcattgcagacttgttcaccaaccaggcaaatttctcacgcatcacccaggacgcccagctgaagtcatcaaaggtggtccataaagctgtgctgcaactcaatgaggagggtgtggacacagctggctccactggggtcaccctaaacctgacgtccaagcctatcatcttgcgtttcaaccagcccttcatcatcatgatcttcgaccacttcacctggagcagccttttcctggcgagggttatgaacccagtgtaagagaccacccacccagagcctcagcactgtctgactttgggaaccagggatcccacagaaatgttttggagagcgggaggtttcccccaatctcctccaagttcttctccctccaaccagagttgtgtctaactttaggcatcttttaataaatgtcattgcgactctgaaaaatgacc

SEQ ID NO: 41059 - DNA, 1393 bp, Homo sapiens
atccaccgcaggcttactgtacacatgctagggtccaggacagcaggaccaagccagcagaaacagcctgagcccaccgcagactggcctggctatactggacaatgccactcctcctgtacacctgtcttctctggctgcccaccagcggcctctggaccgtccaggccatggatcctaacgctgcttatgtgaacatgagtaaccatcaccggggcctggcttcagccaacgttgactttgccttcagcctgtataagcacctagtggccttgagtcccaccctgggcacctgtggccacacacgggcccagcttctccagggcctgggtttcaacctcactgagaggtctgagactgagatccaccagggtttccagcacctgcaccaactctttgcaaagtcagacaccagcttagaaatgaccatgggcaatgccttgtttcttgatggcagcctggagttgctggagtcattctcagcagacatcaagcactactatgagtcagaggtcttggctatgaatttccaggactgggcaacagccagcagacagatcaacagctatgtcaagaataagacacaggggaactatatcttcttcaaaggcacatggacacagccctttgacctggcaagcaccagggaggagaacttctatgtggacgagacaactgtggtgaaggtgcccatgatgttgcagtcgagcaccatcagttaccttcatgacgcggagctcccctgccagctggtgcagatgaactacgtgggcaatgggactgtcttcttcatccttccggacaaggggaagatgaacacagtcatcgctgcactgagccgggacacgattaacaggtggtccgcaggcctgaccagcagccaggtggacctgtacattccaaaggtcaccatctctggagtctatgacctcggagatgtgctggaggaaatgggcattgcagacttgttcaccaaccaggcaaatttctcacgcatcacccaggacgcccagctgaagtcatcaaaggtggtccataaagctgtgctgcaactcaatgaggagggtgtggacacagctggctccactggggtcaccctaaacctgacgtccaagcctatcatcttgcgtttcaaccagcccttcatcatcatgatcttcgaccacttcacctggagcagccttttcctggcgagggttatgaacccagtgtaagagaccacccacccagagcctcagcactgtctgactttgggaaccagggatcccacagaaatgttttggagagcgggaggtttcccccaatctcctccaagttcttctccctccaaccagagttgtgtctaactttaggcatcttttaataaatgtcattgcgactctgaaaaatgacc

SEQ ID NO: 41060 - DNA, 1373 bp, Homo sapiens
atccaccgcaggcttactgtacacatgctagggtccaggacagcaggaccaagccagcagaaacagcctgagcccaccgcagactggcctggctatactggacaatgccactcctcctgtacacctgtcttctctggctgcccaccagcggcctctggaccgtccaggccatggatcctaacgctgcttatgtgaacatgagtaaccatcaccggggcctggcttcagccaacgttgactttgccttcagcctcactgagaggtctgagactgagatccaccagggtttccagcacctgcaccaactctttgcaaagtcagacaccagcttagaaatgaccatgggcaatgccttgtttcttgatggcagcctggagttgctggagtcattctcagcagacatcaagcactactatgagtcagaggtcttggctatgaatttccaggactgggcaacagccagcagacagatcaacagctatgtcaagaataagacacaggggaactatagtcgacttgttttcagggctggatagcccagccatcctcgtcctggtcaactatatcttcttcaaagtcttcttcaaaggcacatggacacagccctttgacctggcaagcaccagggaggagaacttctatgtggacgagacaactgtggtgaaggtgcccatgatgttgcagtcgagcaccatcagttaccttcatgacgcggagctcccctgccagctggtgcagatgaactacgtgggcaatgggactgtcttcttcatccttccggacaaggggaagatgaacacagtcatcgctgcactgagccgggacacgattaacaggtggtccgcaggcctgaccagcagccaggtggacctgtacattccaaaggtcaccatctctggagtctatgacctcggagatgtgctggaggaaatgggcattgcagacttgttcaccaaccaggcaaatttctcacgcatcacccaggacgcccagctgaagtcatcaaaggtggtccataaagctgtgctgcaactcaatgaggagggtgtggacacagctggctccactggggtcaccctaaacctgacgtccaagcctatcatcttgcgtttcaaccagcccttcatcatcatgatcttcgaccacttcacctggagcagccttttcctggcgagggttatgaacccagtgtaagagaccacccacccagagcctcagcactgtctgactttgggaaccagggatcccacagaaatgttttggagagcgggaggtttcccccaatctcctccaagttcttctccctccaaccagagttgtgtctaactttaggcatcttttaataaatgtcattgcgactctgaaaaatgacc

SEQ ID NO: 41061 - DNA, 1453 bp, Homo sapiens
atccaccgcaggcttactgtacacatgctagggtccaggacagcaggaccaagccagcagaaacagcctgagcccaccgcagactggcctggctatactggacaatgccactcctcctgtacacctgtcttctctggctgcccaccagcggcctctggaccgtccaggccatggatcctaacgctgcttatgtgaacatgagtaaccatcaccggggcctggcttcagccaacgttgactttgccttcagcctgtataagcacctagtggccttgagtcccaaaaagaacattttcatctcccctgtgagcatctccatggccttagctatgctgtccctgggcacctgtggccacacacgggcccagcttctccagggcctgggtttcaacctcactgagaggtctgagactgagatccaccagggtttccagcacctgcaccaactctttgcaaagtcagacaccagcttagaaatgaccatgggcaatgccttgtttcttgatggcagcctggagttgctggagtcattctcagcagacatcaagcactactatgagtcagaggtcttggctatgaatttccaggactgggcaacagccagcagacagatcaacagctatgtcaagaataagacacaggggaactatagtcgacttgttttcagggctggatagcccagccatcctcgtcctggtcaactatatcttcttcaaagtcttcttcaaaggcacatggacacagccctttgacctggcaagcaccagggaggagaacttctatgtggacgagacaactgtggtgaaggtgcccatgatgttgcagtcgagcaccatcagttaccttcatgacgcggagctcccctgccagctggtgcagatgaactacgtgggcaatgggactgtcttcttcatccttccggacaaggggaagatgaacacagtcatcgctgcactgagccgggacacgattaacaggtggtccgcaggcctgaccagcagccaggtggacctgtacattccaaaggtcaccatctctggagtctatgacctcggagatgtgctggaggaaatgggcattgcagacttgtggtccataaagctgtgctgcaactcaatgaggagggtgtggacacagctggctccactggggtcaccctaaacctgacgtccaagcctatcatcttgcgtttcaaccagcccttcatcatcatgatcttcgaccacttcacctggagcagccttttcctggcgagggttatgaacccagtgtaagagaccacccacccagagcctcagcactgtctgactttgggaaccagggatcccacagaaatgttttggagagcgggaggtttcccccaatctcctccaagttcttctccctccaaccagagttgtgtctaactttaggcatcttttaataaatgtcattgcgactctgaaaaatgacc

SEQ ID NO: 41062 - DNA, 661 bp, Homo sapiens
gggactctgagtttgagacttgaggtctagcaccacttccagagccctcagaactgggacccactctaggcatggggagccaaggcacagtctgatctacccccaaatccaaggaccagtaccctcttggtctctccctacttccttgtttagaagccagtctcagaaacagagctcatcctcaacccattccaagaagtagaggatgaaacaggattttttctgggaatttttatatcttacctaaaaacccttgaggcttgaatggggacattccaagcatgcagaaggccactgtgtcacttggatagtaggcccgtgaggtcacctggaactgtgttttcctctctgccctacagacctgtctcctcctcttcctcttcttcaaaggcacatggacacagccctttgacctggcaagcaccagggaggagaacttctatgtggacgagacaactgtggtgaaggtgcccatgatgttgcagtcgagcaccatcagttaccttcatgacgcggagctcccctgccagctggtgcagatgaactacgtgggcaatgggactgtcttcttcatccttccggacaaggggaagatgaacacagtcatcgctgcactgagccgggacacgattaacaggtggtccgcaggcctgaccagcag

SEQ ID NO: 41063 - DNA, 1400 bp, Homo sapiens
atccaccgcaggcttactgtacacatgctagggtccaggacagcaggaccaagccagcagaaacagcctgagcccaccgcagactggcctggctatactggacaatgccactcctcctgtacacctgtcttctctggctgcccaccagcggcctctggaccgtccaggccatggatcctaacgctgcttatgtgagcatctccatggccttagctatgctgtccctgggcacctgtggccacacacgggcccagcttctccagggcctgggtttcaacctcactgagaggtctgagactgagatccaccagggtttccagcacctgcaccaactctttgcaaagtcagacaccagcttagaaatgaccatgggcaatgccttgtttcttgatggcagcctggagttgctggagtcattctcagcagacatcaagcactactatgagtcagaggtcttggctatgaatttccaggactgggcaacagccagcagacagatcaacagctatgtcaagaataagacacaggggaactatagtcgacttgttttcagggctggatagcccagccatcctcgtcctggtcaactatatcttcttcaaagtcttcttcaaaggcacatggacacagccctttgacctggcaagcaccagggaggagaacttctatgtggacgagacaactgtggtgaaggtgcccatgatgttgcagtcgagcaccatcagttaccttcatgacgcggagctcccctgccagctggtgcagatgaactacgtgggcaatgggactgtcttcttcatccttccggacaaggggaagatgaacacagtcatcgctgcactgagccgggacacgattaacaggtggtccgcaggcctgaccagcagccaggtggacctgtacattccaaaggtcaccatctctggagtctatgacctcggagatgtgctggaggaaatgggcattgcagacttgttcaccaaccaggcaaatttctcacgcatcacccaggacgcccagctgaagtcatcaaaggtggtccataaagctgtgctgcaactcaatgaggagggtgtggacacagctggctccactggggtcaccctaaacctgacgtccaagcctatcatcttgcgtttcaaccagcccttcatcatcatgatcttcgaccacttcacctggagcagccttttcctggcgagggttatgaacccagtgtaagagaccacccacccagagcctcagcactgtctgactttgggaaccagggatcccacagaaatgttttggagagcgggaggtttcccccaatctcctccaagttcttctccctccaaccagagttgtgtctaactttaggcatcttttaataaatgtcattgcgactctgaaaaatgacc

SEQ ID NO: 41064 - DNA, 1120 bp, Homo sapiens
gggactctgagtttgagacttgaggtctagcaccacttccagagccctcagaactgggacccactctaggcatggggagccaaggcacagtctgatctacccccaaatccaaggaccagtaccctcttggtctctccctacttccttgtttagaagccagtctcagaaacagagctcatcctcaacccattccaagaagtagaggatgaaacaggattttttctgggaatttttatatcttacctacacttggatagtaggcccgtgaggtcacctggaactgtgttttcctctctgccctacagacctgtctcctcctcttcctcttcttcaaaggcacatggacacagccctttgacctggcaagcaccagggaggagaacttctatgtggacgagacaactgtggtgaaggtgcccatgatgttgcagtcgagcaccatcagttaccttcatgacgcggagctcccctgccagctggtgcagatgaactacgtgggcaatgggactgtcttcttcatccttccggacaaggggaagatgaacacagtcatcgctgcactgagccgggacacgattaacaggtggtccgcaggcctgaccagcagccaggtggacctgtacattccaaaggtcaccatctctggagtctatgacctcggagatgtgctggaggaaatgggcattgcagacttgttcaccaaccaggcaaatttctcacgcatcacccaggacgcccagctgaagtcatcaaaggtggtccataaagctgtgctgcaactcaatgaggagggtgtggacacagctggctccactggggtcaccctaaacctgacgtccaagcctatcatcttgcgtttcaaccagcccttcatcatcatgatcttcgaccacttcacctggagcagccttttcctggcgagggttatgaacccagtgtaagagaccacccacccagagcctcagcactgtctgactttgggaaccagggatcccacagaaatgttttggagagcgggaggtttcccccaatctcctccaagttcttctccctccaaccagagttgtgtctaactttaggcatcttttaataaatgtcattgcgactctgaaaaatgacc

SEQ ID NO: 41065 - DNA, 920 bp, Homo sapiens
cacagctggagccagggaccactgctcccagctgggcgctccctccagtcctctgcttctagcaggggttctcctgggactaaaaaggcttcattatggactattgtcttagatgctccatggtccagctgcatcccaggtggaatcagctcgaaggaattgcagagaagaaaagaatgtgcaattcagaggccccgtgggaaagctgcctgtgtcatggaggcagagacagatcctgcctcctgctctgtcccttctcctacccacaaagagcaagtcaggctggagggcaggagctggagggagcgcatgaggaaataagagtctggccaggagaagaggtgctgctctcccctctgccaggcccagccctggaatgtctaactctgtctgcttaccccgagcagccaggtggacctgtacattccaaaggtcaccatctctggagtctatgacctcggagatgtgctggaggaaatgggcattgcagacttgttcaccaaccaggcaaatttctcacgcatcacccaggacgcccagctgaagtcatcaaaggtggtccataaagctgtgctgcaactcaatgaggagggtgtggacacagctggctccactggggtcaccctaaacctgacgtccaagcctatcatcttgcgtttcaaccagcccttcatcatcatgatcttcgaccacttcacctggagcagccttttcctggcgagggttatgaacccagtgtaagagaccacccacccagagcctcagcactgtctgactttgggaaccagggatcccacagaaatgttttggagagcgggaggtttcccccaatctcctccaagttcttctccctccaaccagagttgtgtctaactttaggcatcttttaataaatgtcattgcgactctgaaaaatgacc

SEQ ID NO: 41066 - DNA, 1382 bp, Homo sapiens
  misc_feature (1350)..(1350): n is a, c, g, or t
  misc_feature (1373)..(1373): n is a, c, g, or t
cccacgcgtccggttgatcctaagacacgtttacttatgtataaaatggtcaactctggaatgttggagacaatcactggctgtattagtacaggaaaggagtctgttgtctttcatgcatatggagggagcatggaggatgaaaaggaagatagtaaagttatacctacagaatgtgccatcaaggtatttaaaacaacccttaatgaatttaagaatcgtgacaaatatattaaagatgatttcaggtttaaagatcgcttcagtaaactaaatccacgtaagatcatccgcatgtgggcagaaaaagaaatgcacaatctcgcaagaatgcagagagctggaattccttgtccaacagttgtactactgaagaaacacattttagttatgtcttttattggccatgatcaagttccagcccctaaattaaaagaagtaaagctcaatagtgaagaaatgaaagaagcctactatcaaactcttcatttgatgcggcagttatatcatgaatgtacgcttgtccatgctgacctcagtgagtataacatgctgtggcatgctggaaaggtctggttgatcgatgtcagtcagtcagtagaacctacccaccctcacggcctggagttcttgttccgggactgcaggaatgtctcgcagtttttccagaaaggaggagtcaaggaagcccttagtgaacgagaactcttcaatgctgtttcaggcttaaacatcacagcagataatgaagctgattttttagctgagatagaagctttggagaaaatgaatgaagatcacgttcagaagaatggaaggaaagctgcttcatttttgaaagatgatggagacccaccactactatatgatgaatagcactaatacccactgcttcagtgttaacacagcagtgattgtcagctgccaatagcaaatgaagttatgggtgacttgaaataccaaaacctgaggagtgggcaatggtgcttctgtgcttttcccccttgtaacccatgtgccagatgtgtggaatttttagctcagcattgagagaataaaatgtcactacctctcatcttatgaacaggataatataattctttaacagctataggttatctggctgaagtagacctaattttatgtgacttgtggtgtaaaatgtcttgatgataatttttaaaacttgggtaacacttccaaatatgggaggaaaggacagatgtgtttacaagggaggattttacacatacttgctttattcaccttcctggtttgggttgcgtctttccttgaatattttattggcccaaattagcctttctcaattatggttccagactggggccnggaattcttaaaggaaaatgtgngctctttaa

SEQ ID NO: 41067 - DNA, 950 bp, Homo sapiens
  misc_feature (918)..(918): n is a, c, g, or t
  misc_feature (941)..(941): n is a, c, g, or t
gctgttttattttgggggagagaagaaatgaaagaagcctactatcaaactcttcatttgatgcggcagttatatcatgaatgtacgcttgtccatgctgacctcagtgagtataacatgctgtggcatgctggaaaggtctggttgatcgatgtcagtcagtcagtagaacctacccaccctcacggcctggagttcttgttccgggactgcaggaatgtctcgcagtttttccagaaaggaggagtcaaggaagcccttagtgaacgagaactcttcaatgctgtttcaggcttaaacatcacagcagataatgaagctgattttttagctgagatagaagctttggagaaaatgaatgaagatcacgttcagaagaatggaaggaaagctgcttcatttttgaaagatgatggagacccaccactactatatgatgaatagcactaatacccactgcttcagtgttaacacagcagtgattgtcagctgccaatagcaaatgaagttatgggtgacttgaaataccaaaacctgaggagtgggcaatggtgcttctgtgcttttcccccttgtaacccatgtgccagatgtgtggaatttttagctcagcattgagagaataaaatgtcactacctctcatcttatgaacaggataatataattctttaacagctataggttatctggctgaagtagacctaattttatgtgacttgtggtgtaaaatgtcttgatgataatttttaaaacttgggtaacacttccaaatatgggaggaaaggacagatgtgtttacaagggaggattttacacatacttgctttattcaccttcctggtttgggttgcgtctttccttgaatattttattggcccaaattagcctttctcaattatggttccagactggggccnggaattcttaaaggaaaatgtgngctctttaa

SEQ ID NO: 41068 - DNA, 1474 bp, Homo sapiens
  misc_feature (1442)..(1442): n is a, c, g, or t
  misc_feature (1450)..(1450): n is a, c, g, or t
  misc_feature (1460)..(1460): n is a, c, g, or t
cccacgcgtccggttgatcctaagacacgtttacttatgtataaaatggtcaactctggaatgttggagacaatcactggctgtattagtacaggaaaggagtctgttgtctttcatgcatatggagggagcatggaggatgaaaaggaagatagtaaagttatacctacagaatgtgccatcaaggtatttaaaacaacccttaatgaatttaagaatcgtgacaaatatattaaagatgatttcaggtttaaagatcgcttcagtaaactaaatccacgtaagatcatccgcatgtgggcagaaaaagaaatgcacaatctcgcaagaatgcagagagctggaattccttgtccaacagttgtactactgaagaaacacattttagttatgtcttttattggccatgatcaagttccagcccctaaattaaaagaagtaaagctcaatagtgaagaaatgaaagaagcctactatcaaactcttcatttgatgcggcagttatatcatgaatgtacgcttgtccatgctgacctcagtgagtataacatgctgtggcatgctggaaaggtgaggagcacattttgttaacattcagatttaattactgtaagtaaaatttaaaatgtaaatacatcagttcatgttctgtattgaaataggtctggttgatcgatgtcagtcagtcagtagaacctacccaccctcacggcctggagttcttgttccgggactgcaggaatgtctcgcagtttttccagaaaggaggagtcaaggaagcccttagtgaacgagaactcttcaatgctgtttcaggcttaaacatcacagcagataatgaagctgattttttagctgagatagaagctttggagaaaatgaatgaagatcacgttcagaagaatggaaggaaagctgcttcatttttgaaagatgatggagacccaccactactatatgatgaatagcactaatacccactgcttcagtgttaacacagcagtgattgtcagctgccaatagcaaatgaagttatgggtgacttgaaataccaaaacctgaggagtgggcaatggtgcttctgtgcttttcccccttgtaacccatgtgccagatgtgtggaatttttagctcagcattgagagaataaaatgtcactacctctcatcttatgaacaggataatataattctttaacagctataggttatctggctgaagtagacctaattttatgtgacttgtggtgtaaaatgtcttgatgataatttttaaaacttgggtaacacttccaaatatgggaggaaaggacagatgtgtttacaagggaggattttacacatacttgctttattcaccttcctggtttgggttgcgtctttccttgaatattttattggcccaaattagcctttctcaattatggttccagactggggccnggattctnaaggaaaagngggctctttatggg

SEQ ID NO: 41069 - DNA, 338 bp, Homo sapiens
accagctgtgggttggctttactaggtgatgtgtgattgactgactcacctgctggagtagcaatgcattctcaccttttgctgatggggccttgtttctaaacacgtggatgcgcagagagcaaggctcagcctactgcagccatctctggcagcgcttctacccctccccagcccatagatgggattgtttaaatctcccttgttgacctagtggcaattcttcctctacctaaatagtcgatgtgagtgaaatcattctcttttgataggtggttgctagcagttaacaaccatttatttactttaacaattaataataaactttataaactgtc

SEQ ID NO: 41070 - DNA, 479 bp, Homo sapiens
tttgagcacaacttccgtcccatcattggctgactactgtgctacaaagatgcaggtgcaatccgtaaaaagccaggcttaaagataaaaacgaattttttaaaaacccaactgagcagaaccatcaggggctgcacaacaagggaagacagatttttctgaattagcctatgccggttactaaataaagatagaaacaacaaccttcagggggaaaatcagagccagagtagctacaatgtattatctgaatgtccattttcacctaaatttgagacattaaaaaataacaggaaagtattgtctcaccctcaagaaaagaggcagtcagtaggaactatctctgatccagctgttggattcatttagcagacaaaggcttcaaagcagcaattacgttcaaagaactgaagaactaaaggaaaacgtggaaatgaatcaacagacagacactctccaaaaaacaatagaaattacaa

SEQ ID NO: 41071 - DNA, 842 bp, Homo sapiens
gcagaggtaatcaccatccaaaagttggtatttctcactcgtggtcatttcacacatccctttttaaaatagaatggaatataggaaatgtggaggaagctaaaggaatgggggcttttaaggcttccagtggagcagatcctaacccttggtcagtataatttggctctaggttcaggactgctggcagggtgagaaacatgttggatatagagttttcattttctgaagacaagtcagaaacagcacattcttcctgggattaaattcaaggacaaatttgttgtttggcttttctctaaaagatagtgacacagtgattcaattcttcaggcagtgtattacccaaagattcttgaatccttttcaatttgatggctcttttgttgattctctataaagatggagcatacagtgttaacttttagttggtaaaagtgcttctgtgaagaactatataatgtggcctactttgtttttctgatgagttgccagtgcaaaggtaatatttggagaatcaagacgagtaggcagtttacatgtctgtcaaactctgtctcaaatacctggttatgaaatggctttcagatgggtgctgggtgttgtgccatctaagagctgggtgtggaacaagtgcagcagtactcgggtttcctcatctctattggtggctgtcattggatctgtaagccttggatactaccaggaagggaggcagagtttacctttcagtgtgagcatttcaaagccagacctatattctttttcagagggaaggccagtccacttaattacaagcacagccaaaaaggattcctgtagtattttttccttgaagaaaa

SEQ ID NO: 41072 - DNA, 340 bp, Homo sapiens
aattcacaggagggtagcagtcattcaactgtagtataatttggaattgcagctcacttcactttaagcagttcatctcagttctaatcattatgttcaaagcttcactctatccagatgccaagtttccccaactgtacaaaagcacaggagaaatatttctgtttggcaaggcctggcaaatttttggaggcgttgtcatgcctcaacagggcaccagtcaggttataatttgccttaattgcttgtgccacaaacagcaacaatgattacctctaggtcattgggcactcaaaggaaagatttcttcccagctactgtaaataacaaaatactttct

SEQ ID NO: 41073 - DNA, 404 bp, Homo sapiens
gcgtcgacaaaaatacaaaaattagccgggcatggtgtgcgtgcgtctgtagtcccagcctcccagatagctgggactataggtgtgcaccactgtgcccaaccactttttaaaaaatttctgtcacgcctgtaatcccaaagtgctgggattacaggcgtgagcactgcgcttggcacgatagttttatttctttcagtgcttgaagaatgccatcccactgcactccagcctgggtgacaaaatgagactccgtctgaaaaaaaaaaaaattgtaatggggccgggcacggtgctgcgtcgcctgtaatcccaacactttgggaggctcaggtaggaggatcacttaatcccagaagtttttgagaccagcctgggcaatatagtgagtccccatctctacc

SEQ ID NO: 41074 - DNA, 626 bp, Homo sapiens
tctctgggtcatgcaaagttatgttattcaggaaaaaggctgaagcttgttgagtcattaccaattgtaagaatttggggatatctgaagatcttaggatatatatgccttgagaatgtcaaatatctgctgtatttgtagggcagcaaaaatgtgtacaatattgatcttgatctgctgggcgcggtggctcacacctgtaatcccagcactttgggaggccgaggcgggcggatcacgaggtcaggagatcgagaccatcctggctaacacggtgaaaccccgtacctactaaaaatacaaaaaattagctgggcatggtggcgggtgcctgtagtcccagctactccagaggcttaggcaggagaatggcgtgaatccaggaggcagagcttgcagtgagccgagatcgcaccgttgcactccagcctgggcgacagaaccagactctgtctcaaaaaaaaaaaaaattgatcttgattatttatgatgttattttgtttgcttaaatttatgtacacatctataagcgttttaaaaacattaaaaatactagtatggtatatggtttggtgttgggaagtagagaaacttaaggaaggtaaaggaatatctaacaagtttcc

SEQ ID NO: 41075 - DNA, 205 bp, Homo sapiens
ctaaagaggtaactaaagacgctaaatccagtcactgaggtgggagaacgcagcccaagtaacccacagagatgcctgcggggccaggcaggcctgggggggggcttgtagtctttggacacagacatacttgattacatgtttaacacacacgaacactctacttccaaaaagaaataggctcttgcctagtttaagcacaagc

SEQ ID NO: 41076 - DNA, 483 bp, Homo sapiens
gtcaaagctggaaggtggaggagagatcaatgattttagcaacactcacccactgttgctgacaagtcaaaagctcataagccacagaagatggtgttgctttgttttcatggtggaaaacacagctcgaagcttgaatttggtaatgcatactacagaaaagcagtgaatgtatggactgcagaagctacatagctcctcattcttcactctattttcataagcaagatgcaaatgataaagcagcaagctgacattcaagaaagcatgtttcagggcatatcttcctgaggttggtatgctttcatgctggcagctcataatttctagaaacacagcaaatcaccatgatttgtgatcattaagcaacagttagatcgtgttccaattcctccatttgtggggcagaaaaatcgtgtcatatttcagaaaaaaagatgcccaaataaaaggtcaaaataaaattgggtgcttaaaaataaa

SEQ ID NO: 41077 - DNA, 439 bp, Homo sapiens
cacaataaaagatattccacatcattagccatcagagaaatgcaaatataaaccataatgagatatcattacccatctattaaaatggctaaataaaaaaaattgataaggaggggattctgggaagatcaaaaagtagaaagcaccaggaatgtatctcctcacctagagaacaactgcatggcataatctgtctgatgtaactattttagaactctagagtctattgaaggcttttaatttccaagagaaggcttgggcagtaaattgcccttaactgtggttgactttagctcttagaataatatcagctactcataccccactcgcaggcatccttgcacagattccaggagtagcctggcacacagtttatgggagccagggtgttgcaaaaagggccactgtccattccaaaaatcaggaatctgttctctga

SEQ ID NO: 41078 - DNA, 397 bp, Homo sapiens
gggttttgccttgttgcccaggctggtcttgaattcttggctcaggtgatccgccctcgtaggccccccaaaatgctgggattgtaagtgtgagccactgggcctggcttagttctatttttagttctttgagaaatctccaaactgtttttcacaatggctaaactaattacattcccaccagcagtgtataagtgttccctttttggggcagcctcgccagcatctgttagtttttatctttttagtaatagccattctgactggtgtgagatggtatctcgtggttttgatttgcatttttctgtttagttatgtggagcattttttcatgtttgttggctgcttgtatgtcttgttttttgagacagggtctcactcttgcccacgctggagt

SEQ ID NO: 41079 - DNA, 426 bp, Homo sapiens
attttctgctaggcgtctgtgatattagtaatttaaacaaactgatgggcttatataagaccatttggagaggactgaactccaatattttatggcagtgaagaatatatgtgtacccccaaggggcatcctgaatctcctgccacctgcctgaaattgctttgaaatctcaatttttatttcaaaaactcaagggaagtttgcattaatgataggaacacagagtgcaaagaaccagggccagttccttatgtgatcccagttcccagatctacaaataagtaatactgtaatatgtaatagggccaggcgcagtggctcacgcctattaatcctaggcactttggggaggccaaggcgggtggatcatttggggccaggggtttcgagaccagattggggcaacatgacgaaaccctgtctcta

SEQ ID NO: 41080 - DNA, 451 bp, Homo sapiens
gctcattgcaacctctgcttctcgggttcaagtgattctcctgcctcagcttcccgagtagctgagattacaggtacaccgtcacgcctggctaattttgtatttttagtagagacagggtttcaccatgttggccagggtggtctcgaattcctgagctcaagtgatttgcccaccttggcctcccaaagtgctgggattacaggcgtgagccactgcgcccggcctatctttctattaagatgttctccactgggcatggtggcttttctatttcctaagaggactcagaataagtcatagggcctgtctgagttgttctccagagacaagggaagaagtattttcctcccttgagcatgtttaaaaagactgggccggacacagtggctcatgcttgtcatcccagcactttaggaagccaaggcgggcagatcacttgaggtcagga

SEQ ID NO: 41081 - DNA, 414 bp, Homo sapiens
tatcaaggttctatcctgggctcttttctcactctaggtattttcccattcagactctatgattttgatggccacaatttaccatcaattatgtggataactcccaatatgtatcttactcagttcacttttccaagtttcaaaatcatttatctaattgccttatggaatcccaacctgaatgttctataaattcttcaaacattcaaaaccaaactagttattttcatttaacattttattgtacccttgttcgcaagggtacaataaaatggacattctggccaggcacagtggctcactcacgcctgtaatcctcacactttgggaggctgaggtgggaagatctcttgagcccaggagtttgagactagcctgggcaacatagttagaccctatctctatttttattaa

SEQ ID NO: 41082 - DNA, 1319 bp, Homo sapiens
  misc_feature (453)..(453): n is a, c, g, or t
tgctgacaatgcaaatttggatccagtggacaaattttccaaattgcgacctctcataagcaaacttaatgagagatgcatgaaatttgttccaaatgaaacatatttcagctttgatgaattcatggttccttattttggtcgtcacgggtgcaaacaatttattcggggaaagcccattcggtttggctataagttttggtgtggtgccacctgtctgggctacatttgctggtttcagccgtatcagggtaaaaacccaaatactaaacatgaggaatatggtgtcggtgcgtcacttgtccttcagtttagtgaggcacttacagaggcacaccctggacaataccattttgtattcaataactttttcaccagtattgcacttcttgataagctcagttcaatgggacatcaggcaacaggtacagtgagaaaggatcacattgacanagttccactggaatcagatgtagctttaaagaaaaaagaaagaggcacatttgattatcgaattgatggcaaaggcaatattgtctgcagatggaatgataacagtgttgtcactgttgcctcatctggtgctggtatccatcccctgtgtcttgtcagtcgttactcccagaaactgaaaaagaagatacaagttcagcagccaaacatgatcaaagtgtataaccagttcatgggaggcgtagacagagctgatgaaaacattgataagtatcgggcatcaatccgtggaaagaaatggtattcaagccctcttttgttctgtttcgaattggtcttacaaaatgcttggcaattgcataaaacatatgatgagaaaccagtggattttctggagtttcgtcgacgtgtggtatgccattatctggagacccatggtcatcctccagaacctggccaaaaaggaagacctcagaagcgtaacattgactcacgttatgatggcataaatcatgtgatagtcaaacagggaaagcaaacgcgatgcgctgaatgtcataagaacacaacttttcgatgtgaaaaatgtgatgttgccttacatgtgaagtgttccgttgaatatcacactgaatagcaggtgtcaccacctcctgagataagaaacatagttttatacattatgtacagtgtagcagtggttttgcctagtgttccaattttggaacgtcacataacaatggaacataataaatttttttttctcttcaaatttttgttccttgaatttttctaggtaacatatatgaatttcatgcaaaaattcaaaaaattgtaacctcagacataaatgggttaaagatgtt

SEQ ID NO: 41083 - DNA, 1223 bp, Homo sapiens
  misc_feature (453)..(453): n is a, c, g, or t
tgctgacaatgcaaatttggatccagtggacaaattttccaaattgcgacctctcataagcaaacttaatgagagatgcatgaaatttgttccaaatgaaacatatttcagctttgatgaattcatggttccttattttggtcgtcacgggtgcaaacaatttattcggggaaagcccattcggtttggctataagttttggtgtggtgccacctgtctgggctacatttgctggtttcagccgtatcagggtaaaaacccaaatactaaacatgaggaatatggtgtcggtgcgtcacttgtccttcagtttagtgaggcacttacagaggcacaccctggacaataccattttgtattcaataactttttcaccagtattgcacttcttgataagctcagttcaatgggacatcaggcaacaggtacagtgagaaaggatcacattgacanagttccactggaatcagatgtagctttaaagaaaaaagaaagaggcacatttgattatcgaattgatggcaaaggcaatattgtctgcagatggaatgataacagtgttgtcactgttgcctcatctggtgctggtatccatcccctgtgtcttgtcagtcgttactcccagaaactgaaaaagaagatacaagttcagcagccaaacatgatcaaagtgtataaccagttcatgggaggcgtagacagagctgatgaaaacattgataagtatcgggcatcaatccgtggaaagaaatggtattcaagccctcttttgttctgtttcgaattggtcttacaaaatgcttggcaattgcataaaacatatgatgagaaaccagtggattttctggagtttcgtcgacgtgtggtatgccattatctggagacccatggtcatcctccagaacctggccaaaaaggaagacctcagaagcgtaacattgactcacgttatgatggcataaatcatgtgatagtcaaacagggaaagcaaacgcgatgcgctgaatgtcataagaacacaacttttcgatgtgaaaaatgtgatgttgccttacatgtgaagtgttccgttgaatatcacactgaatagcaggtgtcaccacctcctgagataagaaacatagttttatacattatgtacagtgtagcagtggttttgcctagtgttccaattttggaacgtcacataacaatggaacataataaatttttttttctcttca

SEQ ID NO: 41084 - DNA, 421 bp, Homo sapiens
agatgtttactaagccaagaatcctatatccaaggaacacagaaaggagagccagttcccagtttagtaataagaacacagctacttggtagaagtgaaaaaccaccaagaggatgccttaaggattaaatatgtcaagtagttccatttgggctcatttcatccattttctgaatctcaagctccttgtctataataagcaactctaactataattgcaaacacacaggcgcacgtgcacacacacatccccatacatgcacacccatccagttagcatagagaggttgcacactggtcatttgggaaatgcaaactaaaaccacaatgagacaccacttcaccctcagtaggagggcctcgtgtctagcttccatggagagaagggggtcggaataagtaactccactgtgtaggttgg

SEQ ID NO: 41085 - DNA, 710 bp, Homo sapiens
aagctctcaggtgagtgcctggcacatggcaggtgcctggtctgcccctattctcgaatctgttccgtgtctctctcccctggcaaactgcaggagtgtctgctatgctcacccccagcccattcttcttaatccccagcatggccatgtggcccatgtggtgtcggcagtaaatcaatatttgttgaatgaattaataaatgaataaatgagtaagtcttcttccaacagaaatgacctcagacttgatttcaactagaagcccagatgaacacacctgctcagatcgtgcatttgccccagcgtgtggactccttattaagggccttaagattccatgggaatccgcagagcacagatgtgtgtatgtggggtgcggggggtgaggtgtgggttgggggatgctgggcgggagcagcggttgcccagcctttgccagggaagggccggttgtgtgggtggagcccatctgcaaggcaatcacacttcaaaagcagaggctgaaggcaagtggagactcgctcctgcttgctcctgagcctccagggcttcccagcttccacctctgatctcggaagtcttacctgttcaagtgggggagggcaaggggcagctggagctcccaaggttctccgcaccccaccctcacttcagaccaacacacaataagttattgtaccaggacacttaccagcaataaaatgagtaaa

SEQ ID NO: 41086 - DNA, 439 bp, Homo sapiens
ccccactgcccagagattctgtcttagtccattcaggttgctgtagcaaaatgccttagactgggccatttataaacaaaagaaatgtattgctcacagttctggaggctgtgaagtccaagatcaaggtgttggcagattcaaggtctattcctcacagacagtgccttctatgcatcctcacaggaaaaagaggccaacaactccctcaggcctctttttttttttttttttcagacagagtctcacccaggctggagtgcagtggcacatctcagctcactacaccttcacctcccgggttcaaacattctcatgcctcagcctcctgaatagctgggattacaggggcatgccaccacagctggctaatttgtttttgtatttttaatgcagacggggtttccccatgttgcccaggctggtcttgaagtcctgg

SEQ ID NO: 41087 - DNA, 890 bp, Homo sapiens
cttcacaataaaactacaaacagacactgtcgaataaattgagtgataagtatgtctatttactaacatgagccaatttgaactttagttttgagatctaaaaatattttaatccacatgcatttagtgactataaattgaaggcagtgttcttttgacaaccaagcttattgaaaactttggcattaatgttcacaaacatgagcactattttgaaattaaaaatagactatggtttgctctacatgcttgtgaccctgcaaaaaataaaggaaaaatattcatgcgatttttctcctcttacattcttatggcttaaaaaatataaccagggttttatctaattttaatcaatctcttggcaaaggatcatataaggttttacctgctaacaagaatacctcatttgaaagagcattaccacaagcattggagggaggtacagttgacatggtgaatttgattttacaaaaactaacaaagctggggggtggcaaagcattgacttaactataatcactagtcacaccaatgtgagattccgaatcattggtcagccacagtgatgccaccttggcatcaaacttgcctgttccatctttatcaatgtatctggaagtctgacttgagtaccagaagccaaaacgctcagaatgctaatttgtgccaccttaatggcccatgtgttcggtaaataaatttgctttttacatctcgtcaaatcttactgaataaacctttcatcagagttctacatatccccaggtgggcttggaaacgtgagataggattttattgtgttttatattatgatagttgaatgatgattctatatgttattgttatatttgttttcattaaaaacccaaagaactaccctttgtatacca

SEQ ID NO: 41088 - DNA, 493 bp, Homo sapiens
agcatgcatgctagaggttctgcaaacactgtcattcggcagtgtacacgatgattagttgtctcatcaaggagagcttagaagaggtccctgcagagaaccacccactctggctgaaggaccagcctttgtgatccaaccagcacacctcctattatgaggtcatgtcttgcttatcctgagaccgctggttggcagaggtcttgaactattaagagtacatgaagttaatctatttatttgctcatcgatctctttttatgaaacactgtagaaccctgaggtgcaagcagcatcatttgagatgcctctgaggcaggataatgcgtgggagagacgcgttcttcccgacaccatcctggtcatttggggctggcaccatgatggctctggaatgttggtggctgtgcccagtgacaggcaggagagaagtgatggttccccgtggggcctgcgattcttggtgaagcagcagttgtttccaggaggagac

SEQ ID NO: 41089 - DNA, 1361 bp, Homo sapiens
tagccggggcgtcaggctctgtgttggttggagcgagcatgtgggtctgcagtaccctgtggcgggtgcgaacccccgcccggcagtggcgggggctgctcccagcttctggctgtcacggacctgccgcctcctcctactccgcatccgccgagcctgcccgggtccgggcgcttgtctatgggcaccacggggatccagccaaggtcgtcgaactcaagaacctggagctagctgctgtgagaggatcagatgtccgtgtgaagatgctggcggcccctatcaatccatctgacataaatatgatccaaggaaactacggactccttcctgaactgcctgctgttggagggaacgaaggtgttgcacaggtggtagcggtgggcagcaatgtgaccgggctgaagccaggagactgggtgattccagcaaatgctggtttaggaacctggcggaccgaggctgtgttcagcgaggaagcactgatccaagttccgagtgacatccctcttcagagcgctgccaccctgggtgtcaatccctgcacagcctacaggatgttgatggacttcgagcaactgcagccaggggattctgtcatccagaatgcatccaacagcggagtggggcaagcggtcatccagatcgccgcagccctgggcctaagaaccatcaatgtggtccgagacagacctgatatccagaagctgagtgacagactgaagagtctgggggctgagcatgtcatcacagaagaggagctaagaaggcccgaaatgaaaaacttctttaaggacatgccccagccacggcttgctctcaactgtgttggtgggaaaagctccacagagctgctgcggcagttagcgcgtggaggaaccatggtaacctatggggggatggccaagcagcccgtcgtagcctctgtgagcctgctcatttttaaggatctcaaacttcgaggcttttggttgtcccagtggaagaaggatcacagtccagaccagttcaaggagctgatcctcacactgtgcgatctcatccgccgaggccagctcacagcccctgcctgctcccaggtcccgctgcaggactaccagtctgccttggaagcctccatgaagcccttcatatcttcaaagcagattctcaccatgtgatcatcccaaaagagctggagtgacatgggaggggaggcggatctgaggggctgggtgcaggcccctcagttggggctcccaccttccccagactactgttctcctcactgcctcttcctattaggaggatggtgaagccagccacggttttccccagggccagccttaaggtatctaataaagtctgaactctcccttcca

SEQ ID NO: 41090 - DNA, 324 bp, Homo sapiens
tagccggggcgtcaggctctgtgttggttggagcgagcatgtgggtctgcagtaccctgtggcgggtgcgaacccccgcccggcagtggcgggggctgctcccagcttctggctgtcacggacctgccgcctcctcctactccgcatccgccgagcctgcccgggtccgggcgcttgtctatgggcaccacggggatccagccaaggtcgtcgaactactgttctcctcactgcctcttcctattaggaggatggtgaagccagccacggttttccccagggccagccttaaggtatctaataaagtctgaactctcccttcca

SEQ ID NO: 41091 - DNA, 2900 bp, Homo sapiens
tagccggggcgtcaggctctgtgttggttggagcgagcatgtgggtctgcagtaccctgtggcgggtgcgaacccccgcccggcagtggcgggggctgctcccagcttctggctgtcacggacctgccgcctcctcctactccgcatccgccgagcctgcccgggtccgggcgcttgtctatgggcaccacggggatccagccaaggtcgtcgaaggtataaccagggaattgttccagaggtttccttggatattcctacaactgataacagctgtcatttcttcagcatctactgtaaccgtaattcctgggcacacatggcagctcagaaatgttgcctgacctactttgaggagatgatttgagcgaaacacccattctagcctggatgacatgaacatctccgtttggctttgtgcttagactcaagaacctggagctagctgctgtgagaggatcagatgtccgtgtgaagatgctggcggcccctatcaatccatctgacataaatatgatccaaggaaactacggactccttcctgaactgcctgctgttggagggaacgaaggtgttgcacaggtggtagcggtgggcagcaatgtgaccgggctgaagccaggagactgggtgattccagcaaatgctggtttaggaacctggcggaccgaggctgtgttcagcgaggaagcactgatccaagttccgagtgacatccctcttcagagcgctgccaccctgggtgtcaatccctgcacagcctacaggatgttgatggacttcgagcaactgcagccaggggattctgtcatccagaatgcatccaacagcggagtggggcaagcggtcatccagatcgccgcagccctgggcctaagaaccatcaatgtggtccgagacagacctgatatccagaagctgagtgacagactgaagagtctgggggctgagcatgtcatcacagaagaggagctaagaaggcccgaaatgaaaaacttctttaaggacatgccccagccacggcttgctctcaactgtgttggtgggaaaagctccacagagctgctgcggcagttagcgcgtggaggaaccatggtaacctatggggggatggccaagcagcccgtcgtagcctctgtgagcctgctcatttttaaggatctcaaacttcgaggcttttggttgtcccagtggaagaaggatcacagtccagaccagttcaaggagctgatcctcacactgtgcgatctcatccgccgaggccagctcacagcccctgcctgctcccaggtcccgctgcaggactaccagtctgccttggaagcctccatgaagcccttcatatcttcaaagcagattctcaccatgtgatcatcccaaaagagctggagtgacatgggaggggaggcggatctgaggggctgggtgcaggcccctcagttggggctcccaccttccccagactactgttctcctcactgcctcttcctattaggaggatggtgaagccagccacggttttccccagggccagccttaaggtatctaataaagtctgaactctcccttccaaaaagtagaagtcatccctgtcgagaaggaccaacactgtgcactggtcagctcacagcaccaagaggcccccttcctgcttttctgtcatgtgttcccccagtaatcattttctgaccaccctgaaagcaaagcctgggtgggtactggcagtgcaaaggccagtaggccaccatccctggccccaagctgcacaagcccacagacgagggtcctgtagaacaaacgctttgatgtgcttctcaggtagcctgcggcccagtccagggcttggggaggatcagctgcatggaagagtgaatgccaggctgaggtcatcagggccctgaggaacttggacgtggggtcttcactctcatggaactgcccttctaactggagacatagacaatataccagtggttctcaaccagaggcaattttacccccaggagacatttgacaatgtctggggatatttctggctatcacagcttatgaaggaggttgctactggcatctagcaggcagagtgagtgctgctgttaaacccaccacaggacacagaacagtctcctgcaacaaagaattacccaaggcctggcgcggtggctcacacctgtaatcccagcactttgggaagccaaggcaagcggatcacttgagcccaggagttcaaggtcaacctaggtaacgtggtgaaacaccatctctacaaaaaatacaaacattagccaggtatggtgctgtgcacctgtagtcccagctactcgggaggttgaggtgggaggatcacctgagcctgggaggtctagactgcagtgagccatgatcatgccactgcattccagcctaggcaacagagcaagaccctatatcaaaaaaaaaaaaaaaatctagccccaaatgttcaatgttcatgaggtcgttgataaaccgtgcattaaacaatctcacagtaattaccatagtgactaatgctgtaaagaagatatgtggggtgctgtaagagcagaataaagatcttgccctaggccccagggacaggggtatgcttccttgaggtgaagtttgaaggtgggctctcacaaatgagtgagctttattcaggccgagagaagagcttgacgtgactttttggtatttgcttcacgattcatttgctcaaagcaaagaacagaggcttcagggtgtctcccttatcacctggccctctgtaccctgcactcaggagcctcattcaggacgtatttattgagtgcctagtgtgtgcccaaagctaaggataccaatgaaagaagtgctgctggccctcaggttgcttagcctagtgcaagattgaccagtat

SEQ ID NO: 41092 - DNA, 2894 bp, Homo sapiens
tagccggggcgtcaggctctgtgttggttggagcgagcatgtgggtctgcagtaccctgtggcgggtgcgaacccccgcccggcagtggcgggggctgctcccagcttctggctgtcacggacctgccgcctcctcctactccgcatccgccgagcctgcccgggtccgggcgcttgtctatgggcaccacggggatccagccaaggtcgtcgagtgtacagccttggcctcaaaggagccattgtgaccttatccaggctgggatctgttgattgaggacagtggcatcccctcgagttgcatggcgccattacattcacggaggacgtgaacgaggtataaccagggaattgttccagaggtttccttggatattcctacaactgataacagctgtcatttcttcagcatctactgtactcaagaacctggagctagctgctgtgagaggatcagatgtccgtgtgaagatgctggcggcccctatcaatccatctgacataaatatgatccaaggaaactacggactccttcctgaactgcctgctgttggagggaacgaaggtgttgcacaggtggtagcggtgggcagcaatgtgaccgggctgaagccaggagactgggtgattccagcaaatgctggtttaggaacctggcggaccgaggctgtgttcagcgaggaagcactgatccaagttccgagtgacatccctcttcagagcgctgccaccctgggtgtcaatccctgcacagcctacaggatgttgatggacttcgagcaactgcagccaggggattctgtcatccagaatgcatccaacagcggagtggggcaagcggtcatccagatcgccgcagccctgggcctaagaaccatcaatgtggtccgagacagacctgatatccagaagctgagtgacagactgaagagtctgggggctgagcatgtcatcacagaagaggagctaagaaggcccgaaatgaaaaacttctttaaggacatgccccagccacggcttgctctcaactgtgttggtgggaaaagctccacagagctgctgcggcagttagcgcgtggaggaaccatggtaacctatggggggatggccaagcagcccgtcgtagcctctgtgagcctgctcatttttaaggatctcaaacttcgaggcttttggttgtcccagtggaagaaggatcacagtccagaccagttcaaggagctgatcctcacactgtgcgatctcatccgccgaggccagctcacagcccctgcctgctcccaggtcccgctgcaggactaccagtctgccttggaagcctccatgaagcccttcatatcttcaaagcagattctcaccatgtgatcatcccaaaagagctggagtgacatgggaggggaggcggatctgaggggctgggtgcaggcccctcagttggggctcccaccttccccagactactgttctcctcactgcctcttcctattaggaggatggtgaagccagccacggttttccccagggccagccttaaggtatctaataaagtctgaactctcccttccaaaaagtagaagtcatccctgtcgagaaggaccaacactgtgcactggtcagctcacagcaccaagaggcccccttcctgcttttctgtcatgtgttcccccagtaatcattttctgaccaccctgaaagcaaagcctgggtgggtactggcagtgcaaaggccagtaggccaccatccctggccccaagctgcacaagcccacagacgagggtcctgtagaacaaacgctttgatgtgcttctcaggtagcctgcggcccagtccagggcttggggaggatcagctgcatggaagagtgaatgccaggctgaggtcatcagggccctgaggaacttggacgtggggtcttcactctcatggaactgcccttctaactggagacatagacaatataccagtggttctcaaccagaggcaattttacccccaggagacatttgacaatgtctggggatatttctggctatcacagcttatgaaggaggttgctactggcatctagcaggcagagtgagtgctgctgttaaacccaccacaggacacagaacagtctcctgcaacaaagaattacccaaggcctggcgcggtggctcacacctgtaatcccagcactttgggaagccaaggcaagcggatcacttgagcccaggagttcaaggtcaacctaggtaacgtggtgaaacaccatctctacaaaaaatacaaacattagccaggtatggtgctgtgcacctgtagtcccagctactcgggaggttgaggtgggaggatcacctgagcctgggaggtctagactgcagtgagccatgatcatgccactgcattccagcctaggcaacagagcaagaccctatatcaaaaaaaaaaaaaaaatctagccccaaatgttcaatgttcatgaggtcgttgataaaccgtgcattaaacaatctcacagtaattaccatagtgactaatgctgtaaagaagatatgtggggtgctgtaagagcagaataaagatcttgccctaggccccagggacaggggtatgcttccttgaggtgaagtttgaaggtgggctctcacaaatgagtgagctttattcaggccgagagaagagcttgacgtgactttttggtatttgcttcacgattcatttgctcaaagcaaagaacagaggcttcagggtgtctcccttatcacctggccctctgtaccctgcactcaggagcctcattcaggacgtatttattgagtgcctagtgtgtgcccaaagctaaggataccaatgaaagaagtgctgctggccctcaggttgcttagcctagtgcaagattgaccagtat

SEQ ID NO: 41093 - DNA, 2462 bp, Homo sapiens
gcggccgctcccacttcagattggtatgtccgtgtgaagatgctggcggcccctatcaatccatctgacataaatatgatccaaggaaactacggactccttcctgaactgcctgctgttggagggaacgaaggtgttgcacaggtggtagcggtgggcagcaatgtgaccgggctgaagccaggagactgggtgattccagcaaatgctggtttaggaacctggcggaccgaggctgtgttcagcgaggaagcactgatccaagttccgagtgacatccctcttcagagcgctgccaccctgggtgtcaatccctgcacagcctacaggatgttgatggacttcgagcaactgcagccaggggattctgtcatccagaatgcatccaacagcggagtggggcaagcggtcatccagatcgccgcagccctgggcctaagaaccatcaatgtggtccgagacagacctgatatccagaagctgagtgacagactgaagagtctgggggctgagcatgtcatcacagaagaggagctaagaaggcccgaaatgaaaaacttctttaaggacatgccccagccacggcttgctctcaactgtgttggtgggaaaagctccacagagctgctgcggcagttagcgcgtggaggaaccatggtaacctatggggggatggccaagcagcccgtcgtagcctctgtgagcctgctcatttttaaggatctcaaacttcgaggcttttggttgtcccagtggaagaaggatcacagtccagaccagttcaaggagctgatcctcacactgtgcgatctcatccgccgaggccagctcacagcccctgcctgctcccaggtcccgctgcaggactaccagtctgccttggaagcctccatgaagcccttcatatcttcaaagcagattctcaccatgtgatcatcccaaaagagctggagtgacatgggaggggaggcggatctgaggggctgggtgcaggcccctcagttggggctcccaccttccccagactactgttctcctcactgcctcttcctattaggaggatggtgaagccagccacggttttccccagggccagccttaaggtatctaataaagtctgaactctcccttccaaaaagtagaagtcatccctgtcgagaaggaccaacactgtgcactggtcagctcacagcaccaagaggcccccttcctgcttttctgtcatgtgttcccccagtaatcattttctgaccaccctgaaagcaaagcctgggtgggtactggcagtgcaaaggccagtaggccaccatccctggccccaagctgcacaagcccacagacgagggtcctgtagaacaaacgctttgatgtgcttctcaggtagcctgcggcccagtccagggcttggggaggatcagctgcatggaagagtgaatgccaggctgaggtcatcagggccctgaggaacttggacgtggggtcttcactctcatggaactgcccttctaactggagacatagacaatataccagtggttctcaaccagaggcaattttacccccaggagacatttgacaatgtctggggatatttctggctatcacagcttatgaaggaggttgctactggcatctagcaggcagagtgagtgctgctgttaaacccaccacaggacacagaacagtctcctgcaacaaagaattacccaaggcctggcgcggtggctcacacctgtaatcccagcactttgggaagccaaggcaagcggatcacttgagcccaggagttcaaggtcaacctaggtaacgtggtgaaacaccatctctacaaaaaatacaaacattagccaggtatggtgctgtgcacctgtagtcccagctactcgggaggttgaggtgggaggatcacctgagcctgggaggtctagactgcagtgagccatgatcatgccactgcattccagcctaggcaacagagcaagaccctatatcaaaaaaaaaaaaaaaatctagccccaaatgttcaatgttcatgaggtcgttgataaaccgtgcattaaacaatctcacagtaattaccatagtgactaatgctgtaaagaagatatgtggggtgctgtaagagcagaataaagatcttgccctaggccccagggacaggggtatgcttccttgaggtgaagtttgaaggtgggctctcacaaatgagtgagctttattcaggccgagagaagagcttgacgtgactttttggtatttgcttcacgattcatttgctcaaagcaaagaacagaggcttcagggtgtctcccttatcacctggccctctgtaccctgcactcaggagcctcattcaggacgtatttattgagtgcctagtgtgtgcccaaagctaaggataccaatgaaagaagtgctgctggccctcaggttgcttagcctagtgcaagattgaccagtat

SEQ ID NO: 41094 - DNA, 993 bp, Homo sapiens
tagccggggcgtcaggctctgtgttggttggagcgagcatgtgggtctgcagtaccctgtggcgggtgcgaacccccgcccggcagtggcgggggctgctcccagcttctggctgtcacggacctgccgcctcctcctactccgcatccgccgagcctgcccgggtccgggcgcttgtctatgggcaccacggggatccagccaaggtcgtcgaactcaagaacctggagctagctgctgtgagaggatcagatgtccgtgtgaagatgctggcggcccctatcaatccatctgacataaatatgatccaaggaaactacggactccttcctgaactgcctgctgttggagggaacgaaggtgttgcacaggtggtagcggtgggcagcaatgtgaccgggctgaagccaggagactgggtgattccagcaaatgctggtttaggaacctggcggaccgaggctgtgttcagcgaggaagcactgatccaagttccgagtgacatccctcttcagagcgctgccaccctgggtgtcaatccctgcacagcctacaggatgttgatggacttcgagcaactgcagccaggggattctgtcatccagaatgcatccaacagcggagtggggcaagcggtcatccagatcgccgcagccctgggcctaagaaccatcaatgtggtccgagacagacctgatatccagaagctgagtgacagactgaagagtctgggggctgagcatgtcatcacagaagaggagctaagaaggcccgaaatgaaaaacttctttaaggacatgccccagccacggcttgctctcaactgtgttggtgggaaaagctccacagagctgctgcggcagttagccttctaggccgggcgcagtggctcaagcctataatcccagcactttgggaggctgaggcgggcagatcacgagatcaggagatcgagaccatcctggctaacacggtgaaaccccgtgtctacta

SEQ ID NO: 41095 - DNA, 1393 bp, Homo sapiens
  misc_feature (1167)..(1167): n is a, c, g, or t
  misc_feature (1170)..(1170): n is a, c, g, or t
  misc_feature (1172)..(1173): n is a, c, g, or t
  misc_feature (1195)..(1195): n is a, c, g, or t
  misc_feature (1199)..(1199): n is a, c, g, or t
tagccggggcgtcaggctctgtgttggttggagcgagcatgtgggtctgcagtaccctgtggcgggtgcgaacccccgcccggcagtggcgggggctgctcccagcttctggctgtcacggacctgccgcctcctcctactccgcatccgccgagcctgcccgggtccgggcgcttgtctatgggcaccacggggatccagccaaggtcgtcgaactcaagaacctggagctagctgctgtgagaggatcagatgtccgtgtgaagatgctggcggcccctatcaatccatctgacataaatatgatccaaggaaactacggactccttcctgaactgcctgctgttggagggaacgaaggtgttgcacaggtggtagcggtgggcagcaatgtgaccgggctgaagccaggagactgggtgattccagcaaatgctggtttaggaacctggcggaccgaggctgtgttcagcgaggaagcactgatccaagttccgagtgacatccctcttcagagcgctgccaccctgggtgtcaatccctgcacagcctacaggatgttgatggacttcgagcaactgcagccaggggattctgtcatccagaatgcatccaacagcggagtggggcaagcggtcatccagatcgccgcagccctgggcctaagaaccatcaatgtggtccgagacagacctgatatccagaagctgagtgacagactgaagagtctgggggctgagcatgtcatcacagaagaggagctaagaaggcccgaaatgaaaaacttctttaagattaggaaactaagactcagaaaagaggaaatgcttaaccaaaatcatatagtttataagggctccagagagtcagagctggcctcagtctctccgaactcaaagcctcttaaccttccagaacctccacccaaaatgcctagacatgccccagccacggcttgctctcaactgtgttggtgggaaaagctccacagagctgctgcggcagttagcgcgtggaggaaccatggtaacctatggggggatggccaagcagcccgtcgtagcctctgtgagcctgctcatttttaaggatctcaaacttcgaggcttttggttgtcccagtggaagaaggatcacagtccagaccagttcaggagctgatctcanaangnngaccatcggcgaggcagtcaangccngcgtccagtgccggcggaacaggctggcttggagctcataagcctaaattcaaggatctcccaggaatccaaactggtcgaggaggggggctggggggaacgcccggggcacgccaaaggccagccccacgagaggaacagggccgggaaggaacgagccaacaaaaacgcggcgcacggcgaaacgacctcac

SEQ ID NO: 41096 - DNA, 682 bp, Homo sapiens
tagccggggcgtcaggctctgtgttggttggagcgagcatgtgggtctgcagtaccctgtggcgggtgcgaacccccgcccggcagtggcgggggctgctcccagcttctggctgtcacggacctgccgcctcctcctactccgcatccgccgagcctgcccgggtccgggcgcttgtctatgggcaccacggggatccagccaaggtcgtcgaactcaagaacctggagctagctgctgtgagaggatcagatgtccgtgtgaagatgctggcggcccctatcaatccatctgacataaatatgatccaaggaaactacggactccttcctgaactgcctgctgttggagggaacgaaggtgttgcacaggtggtagcggtgggcagcaatgtgaccgggctgaagccaggagactgggtgattccagcaaatgctggtttaggaacctggcggaccgaggctgtgttcagcgaggaagcactgatccaagttccgagtgacatccctcttcagagcgctgccaccctgggtgtcaatccctgcacagcctacaggatgttgatggacttcgagcaactgcagccaggggattctgtcatccagaatgcatccaacagcggagtggggcaagcggtcatccagccttaaggtatctaataaagtctgaactctcccttcca

SEQ ID NO: 41097 - DNA, 470 bp, Homo sapiens
gagacagggtctcctgttgcccaggctagagtgcagtggtcattcacaggtgtgatgatggtacacaatagccttgaactcctgagcacaagcaactctccttcctcagcctcccaagtagctgggactacaggtgcgtgctaccatgcccacctttattcatcatgaaaccccttggcacagtatctgatacttcgactgtccataaatatttgttgaattacgtttacttgaattttccaaaacgttgctgtcttcctttcagtgactcagtgattcttttcagaggtataaccagggaattgttccagaggtttccttggatattcctacaactgataacagctgtcatttcttcagcatctactgttaggtactaccataaatgctttacatacattaactcatttaatcccgtgaactgagttctcgtgttatcccattttacggaggaatattctgaggtttat

SEQ ID NO: 41098 - DNA, 509 bp, Homo sapiens
cagtccacgcacatctccctgaagaaagttgacatgcattagagaaactggggactggccccattgttcctctctggaaacctccctttgcctcttggttggttaaagcccattccccctagccaggcggcaggcagcacgcattaagtgcccagatgctgggagggaggcatgagaaacagagtttaggaaacccagtatgacttgcagtttaaacgtttgtggtgggccgcatcagcccacatgtgtgactcttagaactggcaggagaggacctgaggaaacagagacacagaaagagaaagaaaagaagtaacctttcccaaccacctgccttacattttatctgatgatttccacaaaagcttttcaaaggaactgttatctgttttacagattaggaaactaagactcagaaaagaggaaatgcttaaccaaaatcatatagtttataagggctccagagagtcagagctggcctcagtctctccgaactcaaagcctcttaa

SEQ ID NO: 41099 - DNA, 2689 bp, Homo sapiens
tagccggggcgtcaggctctgtgttggttggagcgagcatgtgggtctgcagtaccctgtggcgggtgcgaacccccgcccggcagtggcgggggctgctcccagcttctggctgtcacggacctgccgcctcctcctactccgcatccgccgagcctgcccgggtccgggcgcttgtctatgggcaccacggggatccagccaaggtcgtcgaactcaagaacctggagctagctgctgtgagaggatcagatgtccgtgtgaagatgctggcggcccctatcaatccatctgacataaatatgatccaaggaaactacggactccttcctgaactgcctgctgttggagggaacgaaggtgttgcacaggtggtagcggtgggcagcaatgtgaccgggctgaagccaggagactgggtgattccagcaaatgctggtttaggaacctggcggaccgaggctgtgttcagcgaggaagcactgatccaagttccgagtgacatccctcttcagagcgctgccaccctgggtgtcaatccctgcacagcctacaggatgttgatggacttcgagcaactgcagccaggggattctgtcatccagaatgcatccaacagcggagtggggcaagcggtcatccagatcgccgcagccctgggcctaagaaccatcaatgtggtccgagacagacctgatatccagaagctgagtgacagactgaagagtctgggggctgagcatgtcatcacagaagaggagctaagaaggcccgaaatgaaaaacttctttaaggacatgccccagccacggcttgctctcaactgtgttggtgggaaaagctccacagagctgctgcggcagttagcgcgtggaggaaccatggtaacctatggggggatggccaagcagcccgtcgtagcctctgtgagcctgctcatttttaaggatctcaaacttcgaggcttttggttgtcccagtggaagaaggatcacagtccagaccagttcaaggagctgatcctcacactgtgcgatctcatccgccgaggccagctcacagcccctgcctgctcccaggtcccgctgcaggactaccagtctgccttggaagcctccatgaagcccttcatatcttcaaagcagattctcaccatgtgatcatcccaaaagagctggagtgacatgggaggggaggcggatctgaggggctgggtgcaggcccctcagttggggctcccaccttccccagactactgttctcctcactgcctcttcctattaggaggatggtgaagccagccacggttttccccagggccagccttaaggtatctaataaagtctgaactctcccttccaaaaagtagaagtcatccctgtcgagaaggaccaacactgtgcactggtcagctcacagcaccaagaggcccccttcctgcttttctgtcatgtgttcccccagtaatcattttctgaccaccctgaaagcaaagcctgggtgggtactggcagtgcaaaggccagtaggccaccatccctggccccaagctgcacaagcccacagacgagggtcctgtagaacaaacgctttgatgtgcttctcaggtagcctgcggcccagtccagggcttggggaggatcagctgcatggaagagtgaatgccaggctgaggtcatcagggccctgaggaacttggacgtggggtcttcactctcatggaactgcccttctaactggagacatagacaatataccagtggttctcaaccagaggcaattttacccccaggagacatttgacaatgtctggggatatttctggctatcacagcttatgaaggaggttgctactggcatctagcaggcagagtgagtgctgctgttaaacccaccacaggacacagaacagtctcctgcaacaaagaattacccaaggcctggcgcggtggctcacacctgtaatcccagcactttgggaagccaaggcaagcggatcacttgagcccaggagttcaaggtcaacctaggtaacgtggtgaaacaccatctctacaaaaaatacaaacattagccaggtatggtgctgtgcacctgtagtcccagctactcgggaggttgaggtgggaggatcacctgagcctgggaggtctagactgcagtgagccatgatcatgccactgcattccagcctaggcaacagagcaagaccctatatcaaaaaaaaaaaaaaaatctagccccaaatgttcaatgttcatgaggtcgttgataaaccgtgcattaaacaatctcacagtaattaccatagtgactaatgctgtaaagaagatatgtggggtgctgtaagagcagaataaagatcttgccctaggccccagggacaggggtatgcttccttgaggtgaagtttgaaggtgggctctcacaaatgagtgagctttattcaggccgagagaagagcttgacgtgactttttggtatttgcttcacgattcatttgctcaaagcaaagaacagaggcttcagggtgtctcccttatcacctggccctctgtaccctgcactcaggagcctcattcaggacgtatttattgagtgcctagtgtgtgcccaaagctaaggataccaatgaaagaagtgctgctggccctcaggttgcttagcctagtgcaagattgaccagtat

SEQ ID NO: 41100 - DNA, 852 bp, Homo sapiens
tagccggggcgtcaggctctgtgttggttggagcgagcatgtgggtctgcagtaccctgtggcgggtgcgaacccccgcccggcagtggcgggggctgctcccagcttctggctgtcacggacctgccgcctcctcctactccgcatccgccgagcctgcccgggtccgggcgcttgtctatgggcaccacggggatccagccaaggtcgtcgaactcaagaacctggagctagctgctgtgagaggatcagatgtccgtgtgaagatgctggcggcccctatcaatccatctgacataaatatgatccaaggaaactacggactccttcctgaactgcctgctgttggagggaacgaaggtgttgcacaggtggtagcggtgggcagcataaaaaatgtgaggggaccgggtgaagccaggagactggtgacttcccaagggcaaaaaatttgggccttttgggggattttctaaagggggggaaacaaccccctttgtgtgggggcggggggtgaaaaccctcctgtgaacggcgcgcttgggtcggtttctccaccaacagcgggtccgcaggggacacaaatgggcggcgggaaaaaagggcccacaccttgtgggtaatttctcccccagaaaaggggttttttcccccccgggaaagcggcgttgtggaagcaaattttttccgccaccgtttttcctttttctcgcaccagcacaccgccacaatactagcggggcgtcgcaactcacacaccaaatcctcgcatccggtgcggtccaagtacacaccatcgcagtcgacgcagtagcgcctgcgtccaacactcacatcaatcaagtagttatg

SEQ ID NO: 41101 - DNA, 2816 bp, Homo sapiens
tagccggggcgtcaggctctgtgttggttggagcgagcatgtgggtctgcagtaccctgtggcgggtgcgaacccccgcccggcagtggcgggggctgctcccagcttctggctgtcacggacctgccgcctcctcctactccgcatccgccgagcctgcccgggtccgggcgcttgtctatgggcaccacggggatccagccaaggtcgtcgaaaccgtaattcctgggcacacatggcagctcagaaatgttgcctgacctactttgaggagatgatttgagcgaaacacccattctagcctggatgacatgaacatctccgtttggctttgtgcttagactcaagaacctggagctagctgctgtgagaggatcagatgtccgtgtgaagatgctggcggcccctatcaatccatctgacataaatatgatccaaggaaactacggactccttcctgaactgcctgctgttggagggaacgaaggtgttgcacaggtggtagcggtgggcagcaatgtgaccgggctgaagccaggagactgggtgattccagcaaatgctggtttaggaacctggcggaccgaggctgtgttcagcgaggaagcactgatccaagttccgagtgacatccctcttcagagcgctgccaccctgggtgtcaatccctgcacagcctacaggatgttgatggacttcgagcaactgcagccaggggattctgtcatccagaatgcatccaacagcggagtggggcaagcggtcatccagatcgccgcagccctgggcctaagaaccatcaatgtggtccgagacagacctgatatccagaagctgagtgacagactgaagagtctgggggctgagcatgtcatcacagaagaggagctaagaaggcccgaaatgaaaaacttctttaaggacatgccccagccacggcttgctctcaactgtgttggtgggaaaagctccacagagctgctgcggcagttagcgcgtggaggaaccatggtaacctatggggggatggccaagcagcccgtcgtagcctctgtgagcctgctcatttttaaggatctcaaacttcgaggcttttggttgtcccagtggaagaaggatcacagtccagaccagttcaaggagctgatcctcacactgtgcgatctcatccgccgaggccagctcacagcccctgcctgctcccaggtcccgctgcaggactaccagtctgccttggaagcctccatgaagcccttcatatcttcaaagcagattctcaccatgtgatcatcccaaaagagctggagtgacatgggaggggaggcggatctgaggggctgggtgcaggcccctcagttggggctcccaccttccccagactactgttctcctcactgcctcttcctattaggaggatggtgaagccagccacggttttccccagggccagccttaaggtatctaataaagtctgaactctcccttccaaaaagtagaagtcatccctgtcgagaaggaccaacactgtgcactggtcagctcacagcaccaagaggcccccttcctgcttttctgtcatgtgttcccccagtaatcattttctgaccaccctgaaagcaaagcctgggtgggtactggcagtgcaaaggccagtaggccaccatccctggccccaagctgcacaagcccacagacgagggtcctgtagaacaaacgctttgatgtgcttctcaggtagcctgcggcccagtccagggcttggggaggatcagctgcatggaagagtgaatgccaggctgaggtcatcagggccctgaggaacttggacgtggggtcttcactctcatggaactgcccttctaactggagacatagacaatataccagtggttctcaaccagaggcaattttacccccaggagacatttgacaatgtctggggatatttctggctatcacagcttatgaaggaggttgctactggcatctagcaggcagagtgagtgctgctgttaaacccaccacaggacacagaacagtctcctgcaacaaagaattacccaaggcctggcgcggtggctcacacctgtaatcccagcactttgggaagccaaggcaagcggatcacttgagcccaggagttcaaggtcaacctaggtaacgtggtgaaacaccatctctacaaaaaatacaaacattagccaggtatggtgctgtgcacctgtagtcccagctactcgggaggttgaggtgggaggatcacctgagcctgggaggtctagactgcagtgagccatgatcatgccactgcattccagcctaggcaacagagcaagaccctatatcaaaaaaaaaaaaaaaatctagccccaaatgttcaatgttcatgaggtcgttgataaaccgtgcattaaacaatctcacagtaattaccatagtgactaatgctgtaaagaagatatgtggggtgctgtaagagcagaataaagatcttgccctaggccccagggacaggggtatgcttccttgaggtgaagtttgaaggtgggctctcacaaatgagtgagctttattcaggccgagagaagagcttgacgtgactttttggtatttgcttcacgattcatttgctcaaagcaaagaacagaggcttcagggtgtctcccttatcacctggccctctgtaccctgcactcaggagcctcattcaggacgtatttattgagtgcctagtgtgtgcccaaagctaaggataccaatgaaagaagtgctgctggccctcaggttgcttagcctagtgcaagattgaccagtat

SEQ ID NO: 41102 - DNA, 2969 bp, Homo sapiens
gtagacgagaaagtctctggccagtgacaatttctccctacctcttcttcctgctcaaaatgatattgaccgtttgatgtgattgagtaaaagatgaaagataagtacaaatgattgctaattaaatgtggaacgcaggaaagatatctcagcagagctagctaatgcccaccttacacagcaagtataactgtgccagtccccagggtactggcctcttttcccccctctcaaaaggctctttcttctgcctgcttttgtctcccttgtacttcatatggcatcacaggtgtacagccttggcctcaaaggagccattgtgaccttatccaggctgggatctgttgattgaggacagtggcatcccctcgagttgcatggcgccattacattcacggaggacgtgaacgaggtataaccagggaattgttccagaggtttccttggatattcctacaactgataacagctgtcatttcttcagcatctactgtactcaagaacctggagctagctgctgtgagaggatcagatgtccgtgtgaagatgctggcggcccctatcaatccatctgacataaatatgatccaaggaaactacggactccttcctgaactgcctgctgttggagggaacgaaggtgttgcacaggtggtagcggtgggcagcaatgtgaccgggctgaagccaggagactgggtgattccagcaaatgctggtttaggaacctggcggaccgaggctgtgttcagcgaggaagcactgatccaagttccgagtgacatccctcttcagagcgctgccaccctgggtgtcaatccctgcacagcctacaggatgttgatggacttcgagcaactgcagccaggggattctgtcatccagaatgcatccaacagcggagtggggcaagcggtcatccagatcgccgcagccctgggcctaagaaccatcaatgtggtccgagacagacctgatatccagaagctgagtgacagactgaagagtctgggggctgagcatgtcatcacagaagaggagctaagaaggcccgaaatgaaaaacttctttaaggacatgccccagccacggcttgctctcaactgtgttggtgggaaaagctccacagagctgctgcggcagttagcgcgtggaggaaccatggtaacctatggggggatggccaagcagcccgtcgtagcctctgtgagcctgctcatttttaaggatctcaaacttcgaggcttttggttgtcccagtggaagaaggatcacagtccagaccagttcaaggagctgatcctcacactgtgcgatctcatccgccgaggccagctcacagcccctgcctgctcccaggtcccgctgcaggactaccagtctgccttggaagcctccatgaagcccttcatatcttcaaagcagattctcaccatgtgatcatcccaaaagagctggagtgacatgggaggggaggcggatctgaggggctgggtgcaggcccctcagttggggctcccaccttccccagactactgttctcctcactgcctcttcctattaggaggatggtgaagccagccacggttttccccagggccagccttaaggtatctaataaagtctgaactctcccttccaaaaagtagaagtcatccctgtcgagaaggaccaacactgtgcactggtcagctcacagcaccaagaggcccccttcctgcttttctgtcatgtgttcccccagtaatcattttctgaccaccctgaaagcaaagcctgggtgggtactggcagtgcaaaggccagtaggccaccatccctggccccaagctgcacaagcccacagacgagggtcctgtagaacaaacgctttgatgtgcttctcaggtagcctgcggcccagtccagggcttggggaggatcagctgcatggaagagtgaatgccaggctgaggtcatcagggccctgaggaacttggacgtggggtcttcactctcatggaactgcccttctaactggagacatagacaatataccagtggttctcaaccagaggcaattttacccccaggagacatttgacaatgtctggggatatttctggctatcacagcttatgaaggaggttgctactggcatctagcaggcagagtgagtgctgctgttaaacccaccacaggacacagaacagtctcctgcaacaaagaattacccaaggcctggcgcggtggctcacacctgtaatcccagcactttgggaagccaaggcaagcggatcacttgagcccaggagttcaaggtcaacctaggtaacgtggtgaaacaccatctctacaaaaaatacaaacattagccaggtatggtgctgtgcacctgtagtcccagctactcgggaggttgaggtgggaggatcacctgagcctgggaggtctagactgcagtgagccatgatcatgccactgcattccagcctaggcaacagagcaagaccctatatcaaaaaaaaaaaaaaaatctagccccaaatgttcaatgttcatgaggtcgttgataaaccgtgcattaaacaatctcacagtaattaccatagtgactaatgctgtaaagaagatatgtggggtgctgtaagagcagaataaagatcttgccctaggccccagggacaggggtatgcttccttgaggtgaagtttgaaggtgggctctcacaaatgagtgagctttattcaggccgagagaagagcttgacgtgactttttggtatttgcttcacgattcatttgctcaaagcaaagaacagaggcttcagggtgtctcccttatcacctggccctctgtaccctgcactcaggagcctcattcaggacgtatttattgagtgcctagtgtgtgcccaaagctaaggataccaatgaaagaagtgctgctggccctcaggttgcttagcctagtgcaagattgaccagtat

SEQ ID NO: 41103 - DNA, 1383 bp, Homo sapiens
tagccggggcgtcaggctctgtgttggttggagcgagcatgtgggtctgcagtaccctgtggcgggtgcgaacccccgcccggcagtggcgggggctgctcccagcttctggctgtcacggacctgccgcctcctcctactccgcatccgccgagcctgcccgggtccgggcgcttgtctatgggcaccacggggatccagccaaggtcgtcgaactcaagaacctggagctagctgctgtgagaggatcagatgtccgtgtgaagatgctggcggcccctatcaatccatctgacataaatatgatccaaggaaactacggactccttcctgaactgcctgctgttggagggaacgaaggtgttgcacaggtggtagcggtgggcagcaatgtgaccgggctgaagccaggagactgggtgattccagcaaatgctggtttaggaacctggcggaccgaggctgtgttcagcgaggaagcactgatccaagttccgagtgacatccctcttcagagcgctgccaccctgggtgtcaatccctgcacagcctacaggatgttgatggacttcgagcaactgcagccaggggattctgtcatccagaatgcatccaacagcggagtggggcaagcggtcatccagatcgccgcagccctgggcctaagaaccatcaatgtggtccgagacagacctgatatccagaagctgagtgacagactgaagagtctgggggctgagcatgtcatcacagaagaggagctaagaaggcccgaaatgaaaaacttctttaaggacatgccccagccacggcttgctctcaactgtgttggtgggaaaagctccacagagctgctgcggcagttagcgtaagtcccttgggcctgcaggtccagctcgccagagctctccaggtctttagctgggaggaccatcaagtgactgagtcccatcgccagttcgagccaagtccaggtcagcacaatgttgagtggaaactaggaccaaagtcatccagctatttgggcactggtttctcagccttcccctttgcagatgaccaaaattttggcctatccagctttatttttccaagggaccccagaagtagactgctaagctgcctgccatagaggaatagtcaaggatttataacctagggatgtctgaaaaagtcacttagtcctaacttatttaacctttcaaaatttgtattagcttttaaaatagattctaattttaaaggtaacattatgcttattacaaaccattttgaaaacatgtaaaagtgcaaaggaaaacttaagcataaaagtttcctgttgctgggcactgtggctcatgcctataatcccagtaatttgggaggccaaggaggaagcat

SEQ ID NO: 41104 - DNA, 1181 bp, Homo sapiens
tagccggggcgtcaggctctgtgttggttggagcgagcatgtgggtctgcagtaccctgtggcgggtgcgaacccccgcccggcagtggcgggggctgctcccagcttctggctgtcacggacctgccgcctcctcctactccgcatccgccgagcctgcccgggtccgggcgcttgtctatgggcaccacggggatccagccaaggtcgtcgaaggtataaccagggaattgttccagaggtttccttggatattcctacaactgataacagctgtcatttcttcagcatctactgtaaccgtaattcctgggcacacatggcagctcagaaatgttgcctgacctactttgaggagatgatttgagcgaaacacccattctagcctggatgacatgaacatctccgtttggctttgtgcttagactcaagaacctggagctagctgctgtgagaggatcagatgtccgtgtgaagatgctggcggcccctatcaatccatctgacataaatatgatccaaggaaactacggactccttcctgaactgcctgctgttggagggaacgaaggtgttgcacaggtggtagcggtgggcagcaatgtgaccgggctgaagccaggagactgggtgattccagcaaatgctggtttaggaacctggcggaccgaggctgtgttcagcgaggaagcactgatccaagttccgagtgacatccctcttcagagcgctgccaccctgggtgtcaatccctgcacagcctacaggatgttgatggacttcgagcaactgcagccaggggattctgtcatccagaatgcatccaacagcggagtggggcaagcggtcatccagatcgccgcagccctgggcctaagaaccatcaatgtggtccgagacagacctgatatccagaagctgagtgacagactgaagagtctgggggctgagcatgtcatcacagaagaggagctaagaaggcccgaaatgaaaaacttctttaaggacatgccccagccacggcttgctctcaactgtgttggtgggaaaagctccacagagctgctgcggcagttagcgcgtggaggaaccatggtaacctatggggggatggccaagcagcccgtcgtagcctctgtggtaagctgggtgcagagggaggcatgcctggagccgggcca

SEQ ID NO: 41105 - DNA, 416 bp, Homo sapiens
atgttgcccaggctgctctgaaactcctgggttcaagccatcatcctgccttagcctcttaaggagctgggattaacaggtggcatgccccccaggccccagttccatatgattttcctgaaaatacaaaagaaagagggagatacaaaatacttttttaatcatgttcttataattatcttaataaaaatcaatttgctctgaatgccatgacctgctgagtgtcccaacctaagggttgtcagaccattttctcatatatgcatgtatagaagtagggaactaatatatttttgtctaaaatgtttaagatgaagatgagaatgaattccacaatatataattttgcctgaactatataagacagttaaaattatagagacattgcaggagagactctggattagatagaaaaa

SEQ ID NO: 41106 - DNA, 744 bp, Homo sapiens
ggattaatgaggaaatcattctgtggctctagtcataatttatgcttaataacattgatagtagccctttgcgctataactctacctaaagactcacatcatttggcagagagagagtcgttgaagtcccaggaattcaggactgggcaggttaagacctcagacaaggtagtagaggtagacttgtggacaaggctcgggtcccagcccaccgcaccccaactttaatcagagtggttcactattgatctatttttgtgtgatagctgtgtggcgtgggccaaacatttaatgagaagttactgtgcaccaaactgccgaacaccattctaaactattcatatatattagtcatttaattcttacataacttgagaggtagacagatatccttattttagagatgaggaaaccaagagaacttaggtcattagcgcaaggttgtagagtaagcggcaaagccaagacacaaagctgggtggtttggtttcagagccagtgcttttcccctctactgtactgcctctcaaccaacacagggttgcacaggcccattctctgatttttttcctcttgtcctctgcctctccctctagctcccacttcctctctgctctagttcattttctttagagcagcccgagtgatcatgaagtgcaaatcttgccatgtcagtcccctggttaggaaccctccaatggctcactttctctttaggcaaaagtctttaccccatgccttctc

SEQ ID NO: 41107 - DNA, 429 bp, Homo sapiens
aagaaggcataaaggtgagagattgttcgtaaagtactttgaggttgttggatgaaaggtgataggtaaacacaaattattataatcatggggaaggttaatgaaaaaaactctggtccctgggaacaaactgtagaactctcctgcggtaagcaggattcatgaaaaatgagctattttctgtcctagccttctgatttaaaatttggtgtacatgttaacaatacaataaacctaatatttggaaaatgcctggaaatcgttgctttggacaggaaatctggatttcaggaggtcatattaatagcatgtttatcttttcctccttgaagaaaaataaaatccactccaaaacactaatcatactaatttttagcagtatacttgggccttcttaagatttaagttttttctagggggaattaattt

SEQ ID NO: 41108 - DNA, 303 bp, Homo sapiens
agtttgccattaccacacaatttaaaattaaagcctgatcctggtctctacaagaaatatacgtaggttacaattactcttccggcctgggcgaggtggctcacgtgcctgcaatcccagcactttggaaggctggtgggaggatcgcttgagcccaggagtttaacaccagcctgggcaatatagggagactgtgtctctacaaaaaatgactattctgtgtccgtttacccttttctgatagactaatattgtaccatatacaagttatttaataaattttagtaaatactgtttaattga

SEQ ID NO: 41109 - DNA, 447 bp, Homo sapiens
tgataatttcaattaatgctgaaaaatcatttaataaaattcaatattgttcatggctaaaaaaaaaaaaaaaaaactcaaaaagctggtaatggaagaaacataccacaacataataaaagccacatacaacagacccacagctagtatcatactgaatggggaaaaactgaaagccttttctccaagatctgaaacaaagcaagcatgcctactttaaccactgttgtttcacatattactggaaatcctagctagagcaactagacaatagaaagaaataaatggcctccaaattggaaaggaagtcaaattatctgtgtttgcagatcatatgattttatcggtggaaaaccctaaagactccaccagaaactactagaactaataaatttactaacgttgaaggatacaaaatcaacataccaaaatcaataacactttcat

SEQ ID NO: 41110 - DNA, 355 bp, Homo sapiens
gttttgttttgagatggagtctcgctctgtcgcccaggctggggtgcagtggcgcaatctcggctcactgcaagctccgccttccgggttcacgccactctgcctcagcctcctgagtagctgggactacaggcgcccgccacctcgcccagctaattttttgtatttttagtagagacggggtttcaccgcattagccagggtggtctcaatctcctgacctcgtgatccgcccgcctcggcctcctaaagtgctgggattacaggcgtgagccaccgcgcccagctggcactgacttttgaatgctggtattaaataaatataaataatggtattatgtttatgtttaaatat

SEQ ID NO: 41111 - DNA, 391 bp, Homo sapiens
tttaaataaaggaaaacagaactatagcaaagcctaacaatgtctgttaaatgaatagaaaatagaatgagaacaattaataagaaataaatttaaagagctatgagatttctgaggagagaatggttacttctggtgtgaagggttagaaagatttcacagaaattgcatttgtgctagattttgatggatggtaaagagcaacaggcaacagagatgaaaggagggaatgaaaccttaaattatgtccaggaaactaggagtggcccagttagacatgaacacaggagatgtgttggttgggggaagaagttacagataaagtctggaaatgcagtttgagagcagacttggagaactctgaaaccctcaagtcaactggctcagggga

SEQ ID NO: 41112 - DNA, 561 bp, Homo sapiens
catttcctttaatcgtgaagcatatcatacatacaaaagaagataggtagtgtacatgtacattttaaagcataataaataaaatgaacacctgtatactctccacccagtgtgaggaacagaatgttactagaaccgtcaaagccttcccagaggcatccacttcttccctgtcaaccatatccacagcttcttgctgtcctgaatttcttgttaattgtcgccttgtttttctttagtgttttaccatgtacacgtccttatacaatgcactgtttgatttttaaacaatacctgaatggcttcacatacagtcttaagcactagcttaagccaacctgttcttcttttataactgccctttctcagaattaagaaaagaagttgtagctaaaataataataaaagaatggttaactacaaaagtaatagacaggctaagaatacccttcttttttgaaaaatacaagtaagaatattgtcattaagaattatctggttgcagggagctgagatcacaccactgcaccacagcctgggcaacagagtgagactgtctca

SEQ ID NO: 41113 - DNA, 698 bp, Homo sapiens
ggtagacctgggttggatcccagctctgccttgtactagctcttgaccaccagcattgttacttaacctatgtctcagtttcttcatttaatttttttaaaaggtggggggaggggcggtgtggcagggataaacttttggtgtaaggtttaattgcagtagtgtacatgaaatgactagtgcagtgactagtgcactctttgtctgactggtgataccaaggtattaatatactgaaacttgagctgaaagggaaaaaatctgaggaataaggagaaaaataccaatattgaccttatttacacttctatatattatggaaaaacctggcttgcttggtagatggcagtggaatatttaatgctcttttctgtgtgtttaagtattgcaaatgatcatgaacttaatagaaagttaaagctcttttttgagcagctgaatgacagggtattttggcaacagagcatgtttccatgagcatgtttaccagtgtgctgaaggaaatagattttggacaacaggtccttctttaaattaaaaaaaaaaaaattctttatgacagaggtgtcattatgcttctaatagatgcaaggagagttacttgcctttttgaaacaataagaaaggaagaaatagttaatgtttgcagttgcacgaaagagtaaatgtggtaaatttcatgaagttaacacaaaaat

SEQ ID NO: 41114 - DNA, 940 bp, Homo sapiens
gaagtcattctgcactaatagcggcaaaaagccttctggttcctggggcgacgcgcccggcggccgtactattcacttccccagaacgccacagcccaggctttcttcttagtgggcttcccagaccaagaagggaaacctttcatccgaaggtactgaggggaggaaggtggcctgaagttatctcagtgccgctttgtttcccaccccagtcggtcagcccttcctcagcgccctttaacccttgcagatcggatggagaaagctgccagcacgttctagggatgggggcagattgaggagcgggagggagtagtctttgtctaactttataccagtaccaaactatgttaatttaatgtagttttataataaatctttaagtcctgtaacttattctcccaagattgtttggcttattctacggcctttgtatttctaggtgaattttggaattagcttgttaaaaaggggggggattttttattgggctcgcattgaatctatagatctgtttgggaaaactagtatcttaacaacaagtccttcaatccatgaatatcattcttcccccaccatttatttaagcggtctttaatttctcctggcaatattttgtagattgcacatatatctatattttaatgcagctgtgcttggatagattgcagtatagagatcatatatatctttcattagatttattcttgagtatttagtgttttgtatacaatgttaaatggcattttgacttttttatattctactcgtaagaataaacaatattgattttaacatactgaccttatatgcaagcatcttgctaagttcccttgttatttgtaatactctgtagattctttcggaatttctgtgatcaaaatcttgcaatccacgaataaagatggtttaacttctctgtaacctttataccttttat

SEQ ID NO: 41115 - DNA, 1584 bp, Homo sapiens
gcggaactgggcgaacccgggggttcgtttctgctgactccagtgtcccgagaggcgccgcttcttccgctttctcgtcaggctcctgcaaccccaggcatgaaccaaggtttctgaactactgggcgggagccaacgtctcttctttctcccgctctggcggaggctttgtcgctgcgggctgggccccagggtgtcccccatggcggggccgcgggtggaggtcgatggcagcatcatggaagggggcggccagatcctgagagtctctacggccttgagctgtctcctaggcctccccttgcgggtgcagaagatccgagccggccggagcacgccaggcctgaggcctcaacatttatctggactggaaatgattcgagatttgtgtgatgggcaactggagggggcagaaattggctcaacagaaataacctttacaccagagaagatcaaaggtggaatccacacagcagataccaagacagcagggagtgtgtgcctcttgatgcaggtctcaatgccgtgtgttctctttgctgcttctccatcagaacttcatttgaaaggtggaactaatgctgaaatggcaccacagatcgattatacagtgatggtcttcaagccaattgttgaaaaatttggtttcatatttaattgtgacattaaaacaaggggatattacccaaaagggggtggtgaagtgattgttcgaatgtcaccagttaaacaattgaaccctataaatttaactgagcgtggctgtgtgactaagatatatggaagagctttcgttgctggtgttttgccatttaaagtagcaaaagatatggcagcggcagcagttagatgcatcagaaaggagatccgggatttgtatgttaacatccagcctgttcaagaacctaaagaccaagcatttggcaatggaaatggaataataattattgctgagacctccactggctgtttgtttgctggatcatcgcttggtaaacgaggtgtaaatgcagacaaagttggaattgaagctgccgaaatgctattagcaaatcttagacatggtggtactgtggatgagtatctgcaagaccagctgattgttttcatggcattagccaatggagtttccagaataaaaacaggaccagttacactccatacgcaaaccgcgatacattttgctgaacaaatagcaaaggctaaatttattgtgaagaaatcagaagatgaagaagacgccgctaaagatacttatattattgaatgccaaggaattgggatgacaaatccaaatctatagagtatttgcctcttaaatgatacctcattgatatattgcactatttcataaatactataaaataatgactaggaagtaacttattaaaggctatgacttaaatttgaagatgaagtacagtgttctaggtttgctgagaaggcttcattaaattaatctcactttgaatatctcctgagagatggacaatgaaatatcagttggtggatatgtgtgatagctgatttcaatattgaagtattgaaataaaatattctttacacctgcaaacaaaaaaaaaa

SEQ ID NO: 41116 - DNA, 1584 bp, Homo sapiens
gcggaactgggcgaacccgggggttcgtttctgctgactccagtgtcccgagaggcgccgcttcttccgctttctcgtcaggctcctgcaaccccaggcatgaaccaaggtttctgaactactgggcgggagccaacgtctcttctttctcccgctctggcggaggctttgtcgctgcgggctgggccccagggtgtcccccatggcggggccgcgggtggaggtcgatggcagcatcatggaagggggcggccagatcctgagagtctctacggccttgagctgtctcctaggcctccccttgcgggtgcagaagatccgagccggccggagcacgccaggcctgaggcctcaacatttatctggactggaaatgattcgagatttgtgtgatgggcaactggagggggcagaaattggctcaacagaaataacctttacaccagagaagatcaaaggtggaatccacacagcagataccaagacagcagggagtgtgtgcctcttgatgcaggtctcaatgccgtgtgttctctttgctgcttctccatcagaacttcatttgaaaggtggaactaatgctgaaatggcaccacagatcgattatacagtgatggtcttcaagccaattgttgaaaaatttggtttcatatttaattgtgacattaaaacaaggggatattacccaaaagggggtggtgaagtgattgttcgaatgtcaccagttaaacaattgaaccctataaatttaactgagcgtggctgtgtgactaagatatatggaagagctttcgttgctggtgttttgccatttaaagtagcaaaagatatggcagcggcagcagttagatgcatcagaaaggagatccgggatttgtatgttaacatccagcctgttcaagaacctaaagaccaagcatttggcaatggaaatggaataataattatggctgagacctccatgggctggtggtaggctggatcatcgctgggaaaacgaggtgtaaatgcagacaaagttggaattgaagctgccgaaatgctattagcaaatcttagacatggtggtactgtggatgagtatctgcaagaccagctgattgttttcatggcattagccaatggagtttccagaataaaaacaggaccagttacactccatacgcaaaccgcgatacattttgctgaacaaatagcaaaggctaaatttattgtgaagaaatcagaagatgaagaagacgccgctaaagatacttatattattgaatgccaaggaattgggatgacaaatccaaatctatagagtatttgcctcttaaatgatacctcattgatatattgcactatttcataaatactataaaataatgactaggaagtaacttattaaaggctatgacttaaatttgaagatgaagtacagtgttctaggtttgctgagaaggcttcattaaattaatctcactttgaatatctcctgagagatggacaatgaaatatcagttggtggatatgtgtgatagctgatttcaatattgaagtattgaaataaaatattctttacacctgcaaacaaaaaaaaaa

SEQ ID NO: 41117 - DNA, 1662 bp, Homo sapiens
gcggaactgggcgaacccgggggttcgtttctgctgactccagtgtcccgagaggcgccgcttcttccgctttctcgtcaggctcctgcaaccccaggcatgaaccaaggtttctgaactactgggcgggagccaacgtctcttctttctcccgctctggcggaggctttgtcgctgcgggctgggccccagggtgtcccccatggcggggccgcgggtggaggtcgatggcagcatcatggaagggggcggccagatcctgagagtctctacggccttgagctgtctcctaggcctccccttgcgggtgcagaagatccgagccggccggagcacgccaggcctgagttttataaatttgtcataaaatgtggggatgtaggcagtctgaatgcacacgttttgatgcagtattatgacctgaaggcctcaacatttatctggactggaaatgattcgagatttgtgtgatgggcaactggagggggcagaaattggctcaacagaaataacctttacaccagagaagatcaaaggtggaatccacacagcagataccaagacagcagggagtgtgtgcctcttgatgcaggtctcaatgccgtgtgttctctttgctgcttctccatcagaacttcatttgaaaggtggaactaatgctgaaatggcaccacagatcgattatacagtgatggtcttcaagccaattgttgaaaaatttggtttcatatttaattgtgacattaaaacaaggggatattacccaaaagggggtggtgaagtgattgttcgaatgtcaccagttaaacaattgaaccctataaatttaactgagcgtggctgtgtgactaagatatatggaagagctttcgttgctggtgttttgccatttaaagtagcaaaagatatggcagcggcagcagttagatgcatcagaaaggagatccgggatttgtatgttaacatccagcctgttcaagaacctaaagaccaagcatttggcaatggaaatggaataataattattgctgagacctccactggctgtttgtttgctggatcatcgcttggtaaacgaggtgtaaatgcagacaaagttggaattgaagctgccgaaatgctattagcaaatcttagacatggtggtactgtggatgagtatctgcaagaccagctgattgttttcatggcattagccaatggagtttccagaataaaaacaggaccagttacactccatacgcaaaccgcgatacattttgctgaacaaatagcaaaggctaaatttattgtgaagaaatcagaagatgaagaagacgccgctaaagatacttatattattgaatgccaaggaattgggatgacaaatccaaatctatagagtatttgcctcttaaatgatacctcattgatatattgcactatttcataaatactataaaataatgactaggaagtaacttattaaaggctatgacttaaatttgaagatgaagtacagtgttctaggtttgctgagaaggcttcattaaattaatctcactttgaatatctcctgagagatggacaatgaaatatcagttggtggatatgtgtgatagctgatttcaatattgaagtattgaaataaaatattctttacacctgcaaacaaaaaaaaaa

SEQ ID NO: 41118 - DNA, 1623 bp, Homo sapiens
gcggaactgggcgaacccgggggttcgtttctgctgactccagtgtcccgagaggcgccgcttcttccgctttctcgtcaggctcctgcaaccccaggcatgaaccaaggtttctgaactactgggcgggagccaacgtctcttctttctcccgctctggcggaggctttgtcgctgcgggctgggccccagggtgtcccccatggcggggccgcgggtggaggtcgatggcagcatcatggaagggggcggccagatcctgagagtctctacggccttgagctgtctcctaggcctccccttgcgggtgcagaagatccgagccggccggagcacgccaggcctgagttctggaggctggaagtccaagatcaaggtcctgacaaggcctcaacatttatctggactggaaatgattcgagatttgtgtgatgggcaactggagggggcagaaattggctcaacagaaataacctttacaccagagaagatcaaaggtggaatccacacagcagataccaagacagcagggagtgtgtgcctcttgatgcaggtctcaatgccgtgtgttctctttgctgcttctccatcagaacttcatttgaaaggtggaactaatgctgaaatggcaccacagatcgattatacagtgatggtcttcaagccaattgttgaaaaatttggtttcatatttaattgtgacattaaaacaaggggatattacccaaaagggggtggtgaagtgattgttcgaatgtcaccagttaaacaattgaaccctataaatttaactgagcgtggctgtgtgactaagatatatggaagagctttcgttgctggtgttttgccatttaaagtagcaaaagatatggcagcggcagcagttagatgcatcagaaaggagatccgggatttgtatgttaacatccagcctgttcaagaacctaaagaccaagcatttggcaatggaaatggaataataattattgctgagacctccactggctgtttgtttgctggatcatcgcttggtaaacgaggtgtaaatgcagacaaagttggaattgaagctgccgaaatgctattagcaaatcttagacatggtggtactgtggatgagtatctgcaagaccagctgattgttttcatggcattagccaatggagtttccagaataaaaacaggaccagttacactccatacgcaaaccgcgatacattttgctgaacaaatagcaaaggctaaatttattgtgaagaaatcagaagatgaagaagacgccgctaaagatacttatattattgaatgccaaggaattgggatgacaaatccaaatctatagagtatttgcctcttaaatgatacctcattgatatattgcactatttcataaatactataaaataatgactaggaagtaacttattaaaggctatgacttaaatttgaagatgaagtacagtgttctaggtttgctgagaaggcttcattaaattaatctcactttgaatatctcctgagagatggacaatgaaatatcagttggtggatatgtgtgatagctgatttcaatattgaagtattgaaataaaatattctttacacctgcaaacaaaaaaaaaa

SEQ ID NO: 41119 - DNA, 1612 bp, Homo sapiens
  misc_feature (52)..(52): n is a, c, g, or t
  misc_feature (97)..(97): n is a, c, g, or t
ccgggggtacccccccggggtccgtttttttttccattttattttccgcccngggacatttacttttaccgttccccggataccccaaaagggcggnccaatacccccaattgggccaaccccaggcatgaaccaaggtttctgaactactgggcgggagccaacgtctcttctttctcccgctctggcggaggctttgtcgctgcgggctgggccccagggtgtcccccatggcggggccgcgggtggaggtcgatggcagcatcatggaagggggcggccagatcctgagagtctctacggccttgagctgtctcctaggcctccccttgcgggtgcagaagatccgagccggccggagcacgccaggcctgaggcctcaacatttatctggactggaaatgattcgagatttgtgtgatgggcaactggagggggcagaaattggctcaacagaaataacctttacaccagagaagatcaaaggtggaatccacacagcagataccaagacagcagggagtgtgtgcctcttgatgcaggtctcaatgccgtgtgttctctttgctgcttctccatcagaacttcatttgaaaggtggaactaatgctgaaatggcaccacagatcgattatacagtgatggtcttcaagccaattgttgaaaaatttggtttcatatttaattgtgacattaaaacaaggggatattacccaaaagggggtggtgaagtgattgttcgaatgtcaccagttaaacaattgaaccctataaatttaactgagcgtggctgtgtgactaagatatatggaagagctttcgttgctggtgttttgccatttaaagtagcaaaagatatggcagcggcagcagttagatgcatcagaaaggagatccgggatttgtatgttaacatccagcctgttcaagaacctaaagaccaagcatttggcaatggaaatggaataataattattgctgagacctccactggctgtttgtttgctggatcatcgcttggtaaacgaggtgtaaatgcagacaaagttggaattgaagctgccgaaatgctattagcaaatcttagacatggtggtactgtggatgagtatctgcaagaccagctgattgttttcatggcattagccaatggagtttccagaataaaaacaggaccagttacactccatacgcaaaccgcgatacattttgctgaacaaatagcaaaggctaaatttattgtgaagaaatcagaagatgaagaagacgccgctaaagatacttatattattgaatgccaaggaattgggatgacaaatccaaatctatagagtatttgcctcttaaatgatacctcattgatatattgcactatttcataaatactataaaataatgactaggaagtaacttattaaaggctatgacttaaatttgaagatgaagtacagtgttctaggtttgctgagaaggcttcattaaattaatctcactttgaatatctcctgagagatggacaatgaaatatcagttggtggatatgtgtgatagctgatttcaatattgaagtattgaaataaaatattctttacacctgcaaacaaaaaaaaaa

SEQ ID NO: 41120 - DNA, 1470 bp, Homo sapiens
  misc_feature (52)..(52): n is a, c, g, or t
  misc_feature (97)..(97): n is a, c, g, or t
ccgggggtacccccccggggtccgtttttttttccattttattttccgcccngggacatttacttttaccgttccccggataccccaaaagggcggnccaatacccccaattgggccaaccccaggcatgaaccaaggtttctgaactactgggcgggagccaacgtctcttctttctcccgctctggcggaggctttgtcgctgcgggctgggccccagggtgtcccccatggcggggccgcgggtggaggtcgatggcagcatcatggaagggggcggccagatcctgagagtctctacggccttgagctgtctcctaggcctccccttgcgggtgcagaagatccgagccggccggagcacgccaggcctgaggcctcaacatttatctggactggaaatgattcgagatttgtgtgatgggcaactggagggggcagaaattggctcaacagaaataacctttacaccagagaagatcaaaggtggaatccacacagcagataccaagacagcagggagtgtgtgcctcttgatgcaggtctcaatgccgtgtgttctctttgctgcttctccatcagaacttcatttgaaaggtggaactaatgctgaaatggcaccacagatcgattatacagtgatggtcttcaagccaattgttgaaaaatttggtttcatatttaattgtgacattaaaacaaggtagcaaaagatatggcagcggcagcagttagatgcatcagaaaggagatccgggatttgtatgttaacatccagcctgttcaagaacctaaagaccaagcatttggcaatggaaatggaataataattattgctgagacctccactggctgtttgtttgctggatcatcgcttggtaaacgaggtgtaaatgcagacaaagttggaattgaagctgccgaaatgctattagcaaatcttagacatggtggtactgtggatgagtatctgcaagaccagctgattgttttcatggcattagccaatggagtttccagaataaaaacaggaccagttacactccatacgcaaaccgcgatacattttgctgaacaaatagcaaaggctaaatttattgtgaagaaatcagaagatgaagaagacgccgctaaagatacttatattattgaatgccaaggaattgggatgacaaatccaaatctatagagtatttgcctcttaaatgatacctcattgatatattgcactatttcataaatactataaaataatgactaggaagtaacttattaaaggctatgacttaaatttgaagatgaagtacagtgttctaggtttgctgagaaggcttcattaaattaatctcactttgaatatctcctgagagatggacaatgaaatatcagttggtggatatgtgtgatagctgatttcaatattgaagtattgaaataaaatattctttacacctgcaaacaaaaaaaaaa

SEQ ID NO: 41121 - DNA, 2045 bp, Homo sapiens
gggtgtaatggacgaggctgccgtgctgctcggcggcgctgaggccaaatagttgcatcacatgtatctaatccgagagtctcatgcttctgctcctcagtgaccagctcctgctcactgccctcagaaagcccaaccctcaggcaatggcggccttgttcctgtctgccccaccccaggccgaggtgaccttcgaggacgtggctgtgtacctctcccgggaggaatggggccgcctgggccctgctcagaggggcctctacagggacgtgatgctggagacctacgggaacctagtctcactgggagtaggacctgcaggccccaagcctggagtgatctcgcagttggagcgaggggatgagccctgggtcctggatgttcagggcacctctgggaaagagcacctgagagtcaacagcccagctcttgggaccagaactgagtacaaggagttgacttcacaggagacatttggtgaggaagatccccagggatctgagccagtagaagcctgtgaccacatcagtaagtcagaggggagcctggaaaagctagtggagcagagaggccccagggcagtcacactgaccaacggggagagcagcagggagtctgggggaaacctcaggttgctgtcaagacctgttcctgatcagagacctcacaaatgtgatatatgtgagcaaagttttgaacagagatcatatctcaacaaccataagcgtgtacacaggtcaaaaaaaacaaatacagttcgtaactctggggaaatcttcagtgcaaacttagttgttaaagaagatcagaaaattcctactgggaaaaaattgcattattgcagttactgtgggaaaacattcaggtacagtgccaaccttgtcaagcatcagcggcttcacactgaagagaagccctacaaatgtgatgagtgtgggaaagccttcagccagagctgcgagttcatcaatcaccgaaggatgcactcaggagagattccctaccggtgtgacgagtgtgggaagacattcacccggaggcccaacctcatgaagcaccagaggattcacactggggagaaaccctacaagtgtggggagtgtgggaagcactttagcgcctactcttccctgatttatcaccagagaatccacaccggagagaaaccctataaatgtaatgactgcgggaaagccttcagtgatggctcaatccttatccgacatcgtcggactcacaccggagagaagccatttgagtgcaaggaatgtggcaaaggctttacacaaagttctaaccttatccaacatcagagaattcacactggagagaaaccctataaatgtaatgaatgtgagaaagctttcattcaaaaaaccaaactcgtggaacatcagagaagccacactggagagaagccctatgaatgcaatgactgtggcaaagttttcagccaaagcacacacctcatccagcaccagagaatccacacaggagagaagccctacaagtgcagcgagtgtgggaaggccttccacaacagttccagactcatccaccaccagaggctgcaccacggagagaaaccctacagatgcagcgattgcaagaaagccttcagccagagcacagttccaacatgtgtcagcatcagcggattcacctccgggaggacttctccatgtaacagtggcgcggtgtccgagggcagagtccagctgagcacttcctgcatgcgcccccggcacctgactctgccctttatgtattatccacacgatgttttcacagagtgaaaggacgtttctcattaaacaaacctcttttcttaaatcaaaagcagtgcatgttcattttagagaaattgagacagaaaagtgggcaaaaaagaagcttctgtgatctctcccacttagaaaaaaaattcattgctgctgatttacgaatattttcgagacatactggagaggctaggaccactggcgagctaggaccactggcgaggctaggacactggcgaggctaggacactggcgaggctagga

SEQ ID NO: 41122 - DNA, 1925 bp, Homo sapiens
gggtgtaatggacgaggctgccgtgctgctcggcggcgctgaggccaaatagttgcatcacatgtatctaatccgagagtctcatgcttctgctcctcagtgaccagctcctgctcactgccctcagaaagcccaaccctcaggcaatggcggccttgttcctgtctgccccaccccaggccgaggtgaccttcgaggacgtggctgtgtacctctcccgggaggaatggggccgcctgggccctgctcagaggggcctctacagggacgtgatgctggagacctacgggaacctagtctcactggctcttgggaccagaactgagtacaaggagttgacttcacaggagacatttggtgaggaagatccccagggatctgagccagtagaagcctgtgaccacatcagtaagtcagaggggagcctggaaaagctagtggagcagagaggccccagggcagtcacactgaccaacggggagagcagcagggagtctgggggaaacctcaggttgctgtcaagacctgttcctgatcagagacctcacaaatgtgatatatgtgagcaaagttttgaacagagatcatatctcaacaaccataagcgtgtacacaggtcaaaaaaaacaaatacagttcgtaactctggggaaatcttcagtgcaaacttagttgttaaagaagatcagaaaattcctactgggaaaaaattgcattattgcagttactgtgggaaaacattcaggtacagtgccaaccttgtcaagcatcagcggcttcacactgaagagaagccctacaaatgtgatgagtgtgggaaagccttcagccagagctgcgagttcatcaatcaccgaaggatgcactcaggagagattccctaccggtgtgacgagtgtgggaagacattcacccggaggcccaacctcatgaagcaccagaggattcacactggggagaaaccctacaagtgtggggagtgtgggaagcactttagcgcctactcttccctgatttatcaccagagaatccacaccggagagaaaccctataaatgtaatgactgcgggaaagccttcagtgatggctcaatccttatccgacatcgtcggactcacaccggagagaagccatttgagtgcaaggaatgtggcaaaggctttacacaaagttctaaccttatccaacatcagagaattcacactggagagaaaccctataaatgtaatgaatgtgagaaagctttcattcaaaaaaccaaactcgtggaacatcagagaagccacactggagagaagccctatgaatgcaatgactgtggcaaagttttcagccaaagcacacacctcatccagcaccagagaatccacacaggagagaagccctacaagtgcagcgagtgtgggaaggccttccacaacagttccagactcatccaccaccagaggctgcaccacggagagaaaccctacagatgcagcgattgcaagaaagccttcagccagagcacagttccaacatgtgtcagcatcagcggattcacctccgggaggacttctccatgtaacagtggcgcggtgtccgagggcagagtccagctgagcacttcctgcatgcgcccccggcacctgactctgccctttatgtattatccacacgatgttttcacagagtgaaaggacgtttctcattaaacaaacctcttttcttaaatcaaaagcagtgcatgttcattttagagaaattgagacagaaaagtgggcaaaaaagaagcttctgtgatctctcccacttagaaaaaaaattcattgctgctgatttacgaatattttcgagacatactggagaggctaggaccactggcgagctaggaccactggcgaggctaggacactggcgaggctaggacactggcgaggctagga

SEQ ID NO: 41123 - DNA, 2124 bp, Homo sapiens
gggtgtaatggacgaggctgccgtgctgctcggcggcgctgaggccaaatagttgcatcacatgtatctaatccgagagtctcatgcttctgctcctcagtgaccagctcctgctcactgccctcagaaagcccaaccctcaggcaatggcggccttgttcctgtctgccccaccccaggccgaggtgaccttcgaggacgtggctgtgtacctctcccgggaggaatggggccgcctgggccctgctcagaggggcctctacagggacgtgatgctggagacctacgggaacctagtctcactgggagtaggacctgcaggccccaagcctggagtgatctcgcagttggagcgaggggatgagccctgggtcctggatgttcagggcacctctgggaaagagcacctgagagtcaacagcccagctcttgggaccagaactgagtacaaggagttgacttcacaggagacatttggtgaggaagatccccagggatctgagccagtagaagcctgtgaccacatcagtaagtcagaggggagcctggaaaagctagtggagcagagaggccccagggcagtcacactgaccaacggggagagcagcagggagtctgggggaaacctcaggttgctgtcaagacctgttcctgatcagagacctcacaaatgtgatatatgtgagcaaagttttgaacagagatcatatctcaacaaccataagcgtgtacacaggtcaaaaaaaacaaatacagttcgtaactctggggaaatcttcagtgcaaacttagttgttaaagaagatcagaaaattcctactgggaaaaaattgcattattgcagttactgtgggaaaacattcaggtacagtgccaaccttgtcaagcatcagcggcttcacactgaagagaagccctacaaatgtgatgagtgtgggaaagccttcagccagagctgcgagttcatcaatcaccgaaggatgcactcaggagagattccctaccggtgtgacgagtgtgggaagacattcacccggaggcccaacctcatgaagcaccagaggattcacactggggagaaaccctacaagtgtggggagtgtgggaagcactttagcgcctactcttccctgatttatcaccagagaatccacaccggagagaaaccctataaatgtaatgactgcgggaaagccttcagtgatggctcaatccttatccgacatcgtcggactcacaccggagagaagccatttgagtgcaaggaatgtggcaaaggctttacacaaagttctaaccttatccaacatcagagaattcacactggagagaaaccctataaatgtaatgaatgtgagaaagctttcattcaaaaaaccaaactcgtggaacatcagagaagccacactggagagaagccctatgaatgcaatgactgtggcaaagttttcagccaaagcacacacctcatccagcaccagagaatccacacaggagagaagccctacaagtgcagcgagtgtgggaaggccttccacaacagttccagactcatccaccaccagaggctgcaccacggagagaaaccctacagatgcagcgattgcaagaaagccttcagccagagcacgtacttgattcagcaccggaggatccacaccggggagaagccctacaagtgcagcgagtgtgggaaggccttccggcacagttccaacatgtgtcagcatcagcggattcacctccgggaggacttctccatgtaacagtggcgcggtgtccgagggcagagtccagctgagcacttcctgcatgcgcccccggcacctgactctgccctttatgtattatccacacgatgttttcacagagtgaaaggacgtttctcattaaacaaacctcttttcttaaatcaaaagcagtgcatgttcattttagagaaattgagacagaaaagtgggcaaaaaagaagcttctgtgatctctcccacttagaaaaaaaattcattgctgctgatttacgaatattttcgagacatactggagaggctaggaccactggcgagctaggaccactggcgaggctaggacactggcgaggctaggacactggcgaggctagga

SEQ ID NO: 41124 - DNA, 1909 bp, Homo sapiens
gggtgtaatggacgaggctgccgtgctgctcggcggcgctgaggccaaatagttgcatcacatgtatctaatccgagagtctcatgcttctgctcctcagtgaccagctcctgctcactgccctcagaaagcccaaccctcaggcaatggcggccttgttcctgtctgccccaccccaggccgaggtgaccttcgaggacgtggctgtgtacctctcccgggaggaatggggccgcctgggccctgctcagaggggcctctacagggacgtgatgctggagacctacgggaacctagtctcactgggagtaggacctgcaggccccaagcctggagtgatctcgcagttggagcgaggggatgagccctgggtcctggatgttcagggcacctctgggaaagagcacctgagagtcaacagcccagctcttgggaccagaactgagtacaaggagttgacttcacaggagacatttggtgaggaagatccccagggatctgagccagtagaagcctgtgaccacatcagtaagtcagaggggagcctggaaaagctagtggagcagagaggccccagggcagtcacactgaccaacggggagagcagcagggagtctgggggaaacctcaggttgctgtcaagacctgttcctgatcagagacctcacaaatgtgatatatgtgagcaaagttttgaacagagatcatatctcaacaaccataagcgtgtacacaggtcaaaaaaaacaaatacagttcgtaactctggggaaatcttcagtgcaaacttagttgttaaagaagatcagaaaattcctactgggaaaaaattgcattattgcagttactgtgggaaaacattcaggtacagtgccaaccttgtcaagcatcagcggcttcacactgaagagaagccctacaaatgtgatgagtgtgggaaagccttcagccagagctgcgagttcatcaatcaccgaaggatgcactcaggagagattccctaccggtgtgacgagtgtgggaagacattcacccggaggcccaacctcatgaagcaccagaggattcacactggggagaaaccctacaagtgtggggagtgtgggaagcactttagcgcctactcttccctgatttatcaccagagaatccacaccggagagaaaccctataaatgtaatgactgcgggaaagccttcagtgatggctcaatccttatccgacatcgtcggactcacaccggagagaagccatttgagtgcaaggaatgtggcaaaggctttacacaaagttctaaccttatccaacatcagagaattcacactggagagaaaccctataaatgtaatgaatgtgagaaagctttcattcaaaaaaccaaactcgtggaacatcagagaagccacactggagagaagccctatgaatgcaatgactgtggcaaagttttcagccaaagcacacacctcatccagcaccagagaatccacacaggagagaagccctacaagtgcagcgagtgtgggaaggccttccacaacagttccagactcatccaccaccagaggctgcaccacggagagaaaccctacagatgcagcgattgcaagaaagccttcagccagagcacgtacttgattcagcaccggaggatccacaccggggagaagccctacaagtgcagcgagtgtgggaaggccttccggcacagttccaacatgtgtcagcatcagcggattcacctccgggaggacttctccatgtaacagtggcgcggtgtccgagggcagagtccagctgagcacttcctgcatgcgcccccggcacctgactctgccctttatgtattatccacacgatgttttcacagagtgaaaggacgtttctcattaaacaaacctcttttctt

SEQ ID NO: 41125 - DNA, 2139 bp, Homo sapiens
gccgaacgggcgaggttgggctgccgtgctgctcggcggcgctgagagacagggtttcaccgtcagccaggatggtctcgatctcctgacctcgccatccacccgcctcagccacccgaagtgttgggatttcaggggccaaatagttgcatcacatgtatctaatccgagagtctcatgcttctgctcctcagtgaccagctcctgctcactgccctcagaaagcccaaccctcaggcaatggcggccttgttcctgtctgccccaccccaggccgaggtgaccttcgaggacgtggctgtgtacctctcccgggaggaatggggccgcctgggccctgctcagaggggcctctacagggacgtgatgctggagacctacgggaacctagtctcactgggagtaggacctgcaggccccaagcctggagtgatctcgcagttggagcgaggggatgagccctgggtcctggatgttcagggcacctctgggaaagagcacctgagagtcaacagcccagctcttgggaccagaactgagtacaaggagttgacttcacaggagacatttggtgaggaagatccccagggatctgagccagtagaagcctgtgaccacatcagtaagtcagaggggagcctggaaaagctagtggagcagagaggccccagggcagtcacactgaccaacggggagagcagcagggagtctgggggaaacctcaggttgctgtcaagacctgttcctgatcagagacctcacaaatgtgatatatgtgagcaaagttttgaacagagatcatatctcaacaaccataagcgtgtacacaggtcaaaaaaaacaaatacagttcgtaactctggggaaatcttcagtgcaaacttagttgttaaagaagatcagaaaattcctactgggaaaaaattgcattattgcagttactgtgggaaaacattcaggtacagtgccaaccttgtcaagcatcagcggcttcacactgaagagaagccctacaaatgtgatgagtgtgggaaagccttcagccagagctgcgagttcatcaatcaccgaaggatgcactcaggagagattccctaccggtgtgacgagtgtgggaagacattcacccggaggcccaacctcatgaagcaccagaggattcacactggggagaaaccctacaagtgtggggagtgtgggaagcactttagcgcctactcttccctgatttatcaccagagaatccacaccggagagaaaccctataaatgtaatgactgcgggaaagccttcagtgatggctcaatccttatccgacatcgtcggactcacaccggagagaagccatttgagtgcaaggaatgtggcaaaggctttacacaaagttctaaccttatccaacatcagagaattcacactggagagaaaccctataaatgtaatgaatgtgagaaagctttcattcaaaaaaccaaactcgtggaacatcagagaagccacactggagagaagccctatgaatgcaatgactgtggcaaagttttcagccaaagcacacacctcatccagcaccagagaatccacacaggagagaagccctacaagtgcagcgagtgtgggaaggccttccacaacagttccagactcatccaccaccagaggctgcaccacggagagaaaccctacagatgcagcgattgcaagaaagccttcagccagagcacagttccaacatgtgtcagcatcagcggattcacctccgggaggacttctccatgtaacagtggcgcggtgtccgagggcagagtccagctgagcacttcctgcatgcgcccccggcacctgactctgccctttatgtattatccacacgatgttttcacagagtgaaaggacgtttctcattaaacaaacctcttttcttaaatcaaaagcagtgcatgttcattttagagaaattgagacagaaaagtgggcaaaaaagaagcttctgtgatctctcccacttagaaaaaaaattcattgctgctgatttacgaatattttcgagacatactggagaggctaggaccactggcgagctaggaccactggcgaggctaggacactggcgaggctaggacactggcgaggctagga

SEQ ID NO: 41126 - DNA, 496 bp, Homo sapiens
ggctactgtggcactacactttactgattctccacatacctttcttacttctcttttgtttttttcctgagtccctccagatgtggcctaggaatccttttaaacacagtgttccaggcagaaattagttggagttagttcacaagatgcaatttatttgccatccacccttgcatttcagctccattatttgtccttgacatgcttgtctataaaaacactttctccttcccagagatggcagctaacaatacctagcaaagagaaatgggaatttcattcacaatgtcatagggaaagcaattggtaaaattattttactgccaaggataataagattagagagttgaagaaagaggcatgaattctgaaattgtatagaaccatctaaaaggtaaagctgaggagttttatccatacttaacaggctgtgactgttttcatagaagtactctctgatttatgggcatgtcattgattacaactagaattgcag

SEQ ID NO: 41127 - DNA, 218 bp, Homo sapiens
cacagcaccctgagcatggtaaactttacttgctgaagaaaggcacaggtgaaactggctgtcttttcttttttgtttgctctgttttaataacacgatttttaaaaacataaattagaaaggacatacatggaaaatgtttgccttttcttactgctcagtctcactgggatccaggtaagggtatgtgtggtcagtgcaatttatccttactactg

SEQ ID NO: 41128 - DNA, 232 bp, Homo sapiens
ccttagctaggtcaccagcccagacagaagaagctgcttgtgcagaacttcctactgctcaggacaccagccacttcagcactctgccaacacttgtgtctggtcatactactaaacgaagtaagtcactcaattgttacctatctcagttgtaaaagagaaacagccctcagcttagtatcagacattgtttgattacagtgacttatgtgtaacagttccctgaaaaata

SEQ ID NO: 41129 - DNA, 345 bp, Homo sapiens
gagtagctggagtagcagggacggtagccaaatgccagcacacctggctgatttcttaaaaatatttttgtaggtcgggcgtggtggctcacgcctgtaatcccagcactttgggaggctggggcaggtggatcacctgaggtcaggagttcgagaccagcctgtccaacatggtgaaaccctgcctctactaaaaatacaagcaatcatcctgccttgacctccctaagtgctggagtgctgaaattacaggccttagctgggcatggtggcgcatgcctgtaatcccagctcttgggaggctgaggcaggagaattgcttgaacctgggaggtggaggttgca

SEQ ID NO: 41130 - DNA, 1056 bp, Homo sapiens
acaaagactagttagtctattaaaactgtgaatgtgtgtagcaattctgcttgtgaagggaaatacactatttaacatgaaattatactcctgacacaatatgctatatatacaaagacctcataactagtaaattttcaacatgtgagttcagtgactagtaagaatgaataaaaatgaagctcctttagttaatctacgcaagggaacatctatttatagttactaattaaaggactctgtaaagcaggaaaaccatgcagggtaagtgggtagggcagcaaactgttctgtggatttgggcctcatgacggtttaaaattgccttgcaatttgatctcaccagtggctgacatttgactatagtccatttgccagccaaggtaagtccctacccattgctctctgcagctggccccaagctcctgctggacaggaatgccttaaaggggacccacactgggaggcagttcagaaagagggaaaggcggaggaggtgtaagtaggacaaagaaaagtcaaactacagaggaatcataaagaaaataatagaataaattgagaacccaaggggatgggaaaaaatagcaagcaaggagagtgagaaagaagaaaaggtaatagtgtaagtagaaaaaactgttagtggaaggcaggttaaatttggaaggaaaaatagaacaaaaaagcaaagtaggagtgttggaatttacagcaatagagcaccacatcatctcttctgctcgataattttggaattgttggctgatgcattagcccagtggttttcaactgggggtagctcaccctcccactcaagagacagttagcaatgtctgcaaacattagggtatgctaggggtgctgctaaatatctgaaaatacacaagacagctccccacctccacgcggaattctctggtccaaaatgtcaagagcaaagagggtgacaaacttcattggcccattgtcagcaccgattccagactcccagtgactgtgcttcaattcgcccactgttttctgacctatatcatgttatactgcatatagatc

SEQ ID NO: 41131 - DNA, 371 bp, Homo sapiens
ccgcccagccagccctagaggaagtggccactgaggcaaagctgtgacctcaaaaatgtacttgtagagaggcacgtgtgcatgtgtgtgcatggatatgcatgttcccaggactttgcagtctgttagggcatctgtgaggtgagcggctatgtcagagcctgcctggaggaggaagccttctgtgggctgaaggctgcctgtgatcactgttattttccatggcagagaatgacgggtcattttcagaaaagtcgtcaaaggtcatcacaagagatcctacaagtatttcctttttgaagctcactgtttcctaaggtgcctctgcagctgttaactgtccttgcttgattaaagtttccaacaaccta

SEQ ID NO: 41132 - DNA, 448 bp, Homo sapiens
ttctctgttcagaatttagatctggtaacttacatgaaacacagcccctaaaccggaaagcatacaaacaagaaaacacaatcaaacatcccacacactaacacatattcattcaaagataaactcctcaatgtatcaatcactaaagaatcatgagacataattctgacaagtgttattctgatatccaatttcagagaaaactaaaagcagtcaattagaaggaaagtcttagttactaaaggaaggtgactcatgaaagccaacaaaaatgaagaaaacaataaaaagtcacagaacttagaaaagaacatagaaaagaaacagattataagaacataaaaaaccaagtagcccaaaataatttatcacaggaaaaaaacagacctattctggcaatgatgccagaaaagtattacttcataacctctgtcaaaaagatgaacct

SEQ ID NO: 41133 - DNA, 890 bp, Homo sapiens
agaaccatgggtgtgagtgggagggggccacggtgacagagtgacctgtgccccaggaggcctttgcatgaagtctttgtcagcagtccccagtgacccagctcggcaaacgctcaggaaggcaactggcaactgtgacctctaagtggggcaatgaaagaaaggaacccacatttccatgctcaggaaaacctcctgtagaagctcaatcatcataacctctggtggaccttcttgttcaaagtcacaatggattccttgccacgccctaaggtgatgaagagagactgtgcctgtaggtcacgtgctcatcggcaagccttcccttcttccttcacctatgccctgccacccattctcaaagagttgaagattatgcttgtccataaaactcagcttgtagagccagtctttcctaccaagataatatgttcattagctcctgacatcccctattcacagaaataaaaagatctttgccactctatactgactgctttgtgtgtggccttccaaaactggatgtcgttcatgggctagggcatgcaggcaatgtcaagctatcctcatctttgcccttggtgccagtgacttgcctgcataagctaaggcaaggggaccccagggagaaggtccaggacatgtcactatttgtggtttgtcatgccagcaagagaagagaagggctatgggcccatgctgagccacctgaaattctcagcagctgactaccaccgcttcttaactcacccccagatacaatcttagaataaatctgaagtccaataaggttttccagtcatcgatagatttaatggtcttgactttgtattttctggaagttggctccaaggtgttcagctacgttgatctcctggaggaaagttaaa

SEQ ID NO: 41134 - DNA, 401 bp, Homo sapiens
ataaaataattgatttttggccaggcgtggtggctcacacctgtaatcccagcactttgggaggccgagggggatggatcacttgaggacaggagtttgagaccagcctagccaatatggccaaaccccatctctactaaaaatacaaaaaaattagccaggcatggtggctggcacctatagtcccagctacttagaggctgaggtgggggaatcgcttgaacctgggaggtggaggctgcagtgagctgagattgtgtcactgcactccagtctgggcagtagagtgagactctgtcttaaaaataaataaataattgactttcatgagcatgaaggattctccagaaattgagttaggtgcagccgcatgctggtcagaacagtctagcaaagatggc

SEQ ID NO: 41135 - DNA, 1065 bp, Homo sapiens
aacggcccggaagtgcggccttgtagtcggtcaggaggaagcggccacggcagagcctggtgcctgaagaggagtcggagatggcggctgcagaggctgtgcatcacatacacctgcagaacttctcacgctctctgcttgagaccctcaatgggcagaggcttgggggacacttctgtgacgtgactgtgcgcattcgtgaagcttcgctgcgtgcccaccgctgcgtgctggcggccggctcacccttcttccaagacaagctgctgctcggccactctgagatccgtgtgcctccggtggtgcccgcgcagacagtgcgacagctggtagagttcctgtacagcggttcgctcgttgtggcgcagggtgaagccctgcaggtgctcacggccgcgtcagtgcttcgcatacagacagttatcgacgaatgcacgcagattatcgcccgcgctcgagccccgggcacctctgcgccccagtgcccgtggcctatcgcctgttgcacgcgccgtcctacttccggcagccttgtggacgatcttgttgttcaatgcgggcatggaggccacacatgcttggtgttgagcgtcccccggggtcacccgggggtgactttgctggagcgcggggcgctatacgcatgcgccgaagccctgggcgttttgctagatggcactggggccctcctttagcgtgccaatggggtgaggggccttgctgctaggcctgtccattggtccgcgggaccttgactgacagacggtgaagggaggattgatcggaggaggatgtggacggattgagaccagattgtgggaacgatccggcgaaggtagggggcccagggcgagggcccgagtatcctacattgccttccagattgtggcatgctggctactacagtgagaggtcgtgacatggcctcagaggaagggcctgacccactggctggggcgctaacgttggtggccgagagagttgcaccggagggctggtaatgaggaggactcccgaagaggtatggttcccttggggggaaaggatggggcccaaggtgccatg

SEQ ID NO: 41136 - DNA, 1526 bp, Homo sapiens
aacggcccggaagtgcggccttgtagtcggtcaggaggaagcggccacggcagagcctggtgcctgaagaggagtcggagatggcggctgcagaggctgtgcatcacatacacctgcagaacttctcacgctctctgcttgagaccctcaatgggcagaggcttgggggacacttctgtgacgtgactgtgcgcattcgtgaagcttcgctgcgtgcccaccgctgcgtgctggcggccggctcacccttcttccaagacaagctgctgctcggccactctgagatccgtgtgcctccggtggtgcccgcgcagacagtgcgacagctggtagagttcctgtacagcggttcgctcgttgtggcgcagggtgaagccctgcaggtgctcacggccgcgtcagtgcttcgcatacagacagttatcgacgaatgcacgcagattatcgcccgcgctcgagccccgggcacctctgcgcccacgcccctgcccacccctgtgcccccgccactcgcacctgcgcagctgcgtcaccgcctgcgccacctgctggctgcacgtcccccggggcaccccggtgctgcacacagccgtaagcagcgccagcccgcgcgtttgcagctgccagcgcccccaacacctgccaaggctgaggggcctgatgctgacccctcactgtccgcggcccctgatgaccgaggtgacgaggatgacgaggaaagtgacgatgagaccgatggcgaggatggcgaaggtggcggcccaggcgagggccaggcacctccttccttcccagactgtgctgctggcttcctcactgctgctgctgacagcgcgtgcgaggagccccctgcacccactggcctcgctgactacagtggtgccgggagagattttcttcggggagctgggtcagctgaggacgtatttccagacagctatgtatccacttggcacgacgaggatggcgctgtccccgaaggctgtcccactgagacccctgtccagcccgactgcatactgtctggatcccgcccgcctggtgtgaagaccccagggccgcccgttgcactcttcccctttcacttgggtgcccctgggccacccgcaccacccccttcagcaccatcggggccagcccctgcgcccccacccgccttctaccccacactccagcccgaggcagcccccagtactcagctgggggaggtcccggctccctctgtggttagaccacttctgagaactggactatttcctgcgtaaaccgggcgctcaggcgcttggacccggcccaagatttgactccggttctcaccccgccctctcctggggtggtggtgggggctggggggccgcttgcctgccccagggtcaggctgggcaaggtccctagctctctacccaagctgttactccctcatggggcgcctaaggagactcaagtggacccatcatatatgggggctgggcctcgggactctcgctctaataaaggactgtaggccatggggcctaaaccacgaa

SEQ ID NO: 41137 - DNA, 1922 bp, Homo sapiens
aacggcccggaagtgcggccttgtagtcggtcaggaggaagcggccacggcagagcctggtgcctgaagaggagtcggagatggcggctgcagaggctgtgcatcacatacacctgcagaacttctcacgctctctgcttgagaccctcaatgggcagaggcttgggggacacttctgtgacgtgactgtgcgcattcgtgaagcttcgctgcgtgcccaccgctgcgtgctggcggccggctcacccttcttccaagacaagctgctgctcggccactctgagatccgtgtgcctccggtggtgcccgcgcagacagtgcgacagctggtagagttcctgtacagcggttcgctcgttgtggcgcagggtgaagccctgcaggtgctcacggccgcgtcagtgcttcgcatacagacagttatcgacgaatgcacgcagattatcgcccgcgctcgagccccgggcacctctgcgcccacgcccctgcccacccctgtgcccccgccactcgcacctgcgcagctgcgtcaccgcctgcgccacctgctggctgcacgtcccccggggcaccccggtgctgcacacagccgtaagcagcgccagcccgcgcgtttgcagctgccagcgcccccaacacctgccaaggctgaggggcctgatgctgacccctcactgtccgcggcccctgatgaccgaggtgacgaggatgacgaggaaagtgacgatgagaccgatggcgaggatggcgaaggtggcggcccaggcgagggccaggcacctccttccttcccagactgtgctgctggcttcctcactgctgctgctgacagcgcgtgcgaggagccccctgcacccactggcctcgctgactacagtggtgccgggagagattttcttcggggagctgggtcagctgaggacgtatttccagacagctatgtatccacttggcacgacgaggatggcgctgtccccgaaggctgtcccactgagacccctgtccagcccgactgcatactgtctggatcccgcccgcctggtgtgaagaccccagggccgcccgttgcactcttcccctttcacttgggtgcccctgggccacccgcaccacccccttcagcaccatcggggccagcccctgcgcccccacccgccttctaccccacactccagcccgaggcagcccccagtactcagctgggggaggtcccggctccctctgtggttagaccacttctgagaactggactatttcctgcgtaaaccgggcgctcaggcgcttggacccggcccaagatttgactccggttctcaccccgccctctcctggggtggtggtgggggctggggggccgcttgcctgccccagggtcaggctgggcaaggtccctagctctctacccaagctgttactccctcatggggcgcctaaggagactcaagtggacccatcatatatgggggctgggcctcgggactctcgctctaataaaggactgtaggccatggggcctaaaccacgaaaaaaaaaaaaaaaaaaaaaaaaaaaaaaaaaacaaaaaaaaaaaaaaaaaaaaaaacaaaaaaaaagaagggagggggcgcgcgcgcgccgccaagagagaaattctcctcgctgccggggggggcgcccccactcttgcgaggccgctcccccgccttttttgtggggagagggggggggccccccaccaatgtggggcggggggcgggccgtctatatattattataatacgccggcgggcgaggcggaggcggcgccgcggggggccgcggccgccgggcggccgcgtattatttatcatacaccgaaaccgaaaacaccgagcgccggcaaaaaagagagaaggagaaagaagggaggaaaaaggggggaagggcaggggcggggggggaaa

SEQ ID NO: 41138 - DNA, 2536 bp, Homo sapiens
aacggcccggaagtgcggccttgtagtcggtcaggaggaagcggccacggcagagcctggtgcctgaagaggagtcggagatggcggctgcagaggctgtgcatcacatacacctgcagaacttctcacgctctctgcttgagaccctcaatgggcagaggcttgggggacacttctgtgacgtgactgtgcgcattcgtgaagcttcgctgcgtgcccaccgctgcgtgctggcggccggctcacccttcttccaagacaagctgctgctcggccactctgagatccgtgtgcctccggtggtgcccgcgcagacagtgcgacagctggtagagttcctgtacagcggttcgctcgttgtggcgcagggtgaagccctgcaggtgctcacggccgcgtcagtgcttcgcatacagacagttatcgacgaatgcacgcagattatcgcccgcgctcgagccccgggcacctctgcgcccacgcccctgcccacccctgtgcccccgccactcgcacctgcgcagctgcgtcaccgcctgcgccacctgctggctgcacgtcccccggggcaccccggtgctgcacacagccgtaagcagcgccagcccgcgcgtttgcagctgccagcgcccccaacacctgccaaggctgaggggcctgatgctgacccctcactgtccgcggcccctgatgaccgaggtgacgaggatgacgaggaaagtgacgatgagaccgatggcgaggatggcgaaggtggcggcccaggcgagggccaggcacctccttccttcccagactgtgctgctggcttcctcactgctgctgctgacagcgcgtgcgaggagccccctgcacccactggcctcgctgactacagtggtgccgggagagattttcttcggggagctgggtcagctgaggacgtatttccagacagctatgtatccacttggcacgacgaggatggcgctgtccccgaaggctgtcccactgagacccctgtccagcccgactgcatactgtctggatcccgcccgcctggtgtgaagaccccagggccgcccgttgcactcttcccctttcacttgggtgcccctgggccacccgcaccacccccttcagcaccatcggggccagcccctgcgcccccacccgccttctaccccacactccagcccgaggcagcccccagtactcagctgggggaggtcccggctccctctgctgctcccaccacggccccctcaggcacccctgctcgcaccccaggtgctgagccacctacgtatgagtgcagccactgtcgcaagacgttcagctcccggaaaaactacaccaagcacatgttcatccactcgggggagaagccgcaccagtgcgccgtgtgctggcgatccttctctctacgcgactacctgctcaaacacatggtcacgcacaccggcgtgcgcgccttccagtgcgccgtctgcgccaagcgcttcacgcagaagagctcgctcaacgtgcacatgcgcactcaccggcccgagcgcgcgccctgccccgcctgcggcaaggtcttctcgcaccgcgcgctgctggagcgccacctggcggcgcaccctgcgccctgatggcgctggggcctggcctcgcccacggtggatccggggcctcccgcacagtcggccacgcccgctgcgggacccgtggttcccgccactagaccacgctccctcctgagcgcaggtcctctctctcccttcaccctttctccataccagggcctaagtccgccttactcctctcctccatgtacttgaaccctccaggtggtgccgggctggggctggggctggttagaccacttctgagaactggactatttcctgcgtaaaccgggcgctcaggcgcttggacccggcccaagatttgactccggttctcaccccgccctctcctggggtggtggtgggggctggggggccgcttgcctgccccagggtcaggctgggcaaggtccctagctctctacccaagctgttactccctcatggggcgcctaaggagactcaagtggacccatcatatatgggggctgggcctcgggactctcgctctaataaaggactgtaggccatggggcctaaaccacgaaaaaaaaaaaaaaaaaaaaaaaaaaaaaaaaaacaaaaaaaaaaaaaaaaaaaaaaacaaaaaaaaagaagggagggggcgcgcgcgcgccgccaagagagaaattctcctcgctgccggggggggcgcccccactcttgcgaggccgctcccccgccttttttgtggggagagggggggggccccccaccaatgtggggcggggggcgggccgtctatatattattataatacgccggcgggcgaggcggaggcggcgccgcggggggccgcggccgccgggcggccgcgtattatttatcatacaccgaaaccgaaaacaccgagcgccggcaaaaaagagagaaggagaaagaagggaggaaaaaggggggaagggcaggggcggggggggaaa

SEQ ID NO: 41139 - DNA, 573 bp, Homo sapiens
aacggcccggaagtgcggccttgtagtcggtcaggaggaagcggccacggcagagcctggtgcctgaagaggagtcggagatggcggctgcagaggctgtgcatcacatacacctgcagaacttctcacgctctctgcttgagaccctcaatgggcagaggcttgggggacacttctgtgacgtgactgtgcgcattcgtgaagcttcgctgcgtgcccaccgctgcgtgctggcggccggctcacccttcttccaagacaagctgctgctcggccactctgagatccgtgtgcctccggtggtgcccgcgcagacagtgcgacagctggtagagttcctgtacagcggttcgctcgttgtggcgcagggtgaagccctgcaggtgctcacggccgcgtcagtgcttcgcatacagacagttatcgacgaatgcacgcagattatcgcccgcgctcgagccccgggcacctctgcgcctaaggagactcaagtggacccatcatatatgggggctgggcctcgggactctcgctctaataaaggactgtaggccatggggcctaaaccacgaa

SEQ ID NO: 41140 - DNA, 2140 bp, Homo sapiens
aacggcccggaagtgcggccttgtagtcggtcaggaggaagcggccacggcagagcctggtgcctgaagaggagtcggagatggcggctgcagaggctgtgcatcacatacacctgcagaacttctcacgctctctgcttgagaccctcaatgggcagaggcttgggggacacttctgtgacgtgactgtgcgcattcgtgaagcttcgctgcgtgcccaccgctgcgtgctggcggccggctcacccttcttccaagacaagctgctgctcggccactctgagatccgtgtgcctccggtggtgcccgcgcagacagtgcgacagctggtagagttcctgtacagcggttcgctcgttgtggcgcagggtgaagccctgcaggtgctcacggccgcgtcagtgcttcgcatacagacagttatcgacgaatgcacgcagattatcgcccgcgctcgagccccgggcacctctgcgcccacgcccctgcccacccctgtgcccccgccactcgcacctgcgcagctgcgtcaccgcctgcgccacctgctggctgcacgtcccccggggcaccccggtgctgcacacagccgtaagcagcgccagcccgcgcgtttgcagctgccagcgcccccaacacctgccaaggctgaggggcctgatgctgacccctcactgtccgcggcccctgatgaccgaggtgacgaggatgacgaggaaagtgacgatgagaccgatggcgaggatggcgaaggtggcggcccaggcgagggccaggcacctccttccttcccagactgtgctgctggcttcctcactgctgctgctgacagcgcgtgcgaggagccccctgcacccactggcctcgctgactacagtggtgccgggagagattttcttcggggagctgggtcagctgaggacgtatttccagacagctatgtatccacttggcacgacgaggatggcgctgtccccgaaggctgtcccactgagacccctgtccagcccgactgcatactgtctggatcccgcccgcctggtgtgaagaccccagggccgcccgttgcactcttcccctttcacttgggtgcccctgggccacccgcaccacccccttcagcaccatcggggccagcccctgcgcccccacccgccttctaccccacactccagcccgaggcagcccccagtactcagctgggggaggtcccggctccctctgctgctcccaccacggccccctcaggcacccctgctcgcaccccaggtgctgagccacctacgtatgagtgcagccactgtcgcaagacgttcagctcccggaaaaactacaccaagcacatgttcatccactcgggggagaagccgcaccagtgcgccgtgtgctggcgatccttctctctacgcgactacctgctcaaacacatggtcacgcacaccggcgtgcgcgccttccagtgcgccgtctgcgccaagcgcttcacgcagaagagctcgctcaacgtgcacatgcgcactcaccggcccgagcgcgcgccctgccccgcctgcggcaaggtcttctcgcaccgcgcgctgctggagcgccacctggcggcgcaccctgcgccctgatggcgctggggcctggcctcgcccacggtggatccggggcctcccgcacagtcggccacgcccgctgcgggacccgtggttcccgccactagaccacgctccctcctgagcgcaggtcctctctctcccttcaccctttctccataccagggcctaagtccgccttactcctctcctccatgtacttgaaccctccaggtggtgccgggctggggctggggctggttagaccacttctgagaactggactatttcctgcgtaaaccgggcgctcaggcgcttggacccggcccaagatttgactccggttctcaccccgccctctcctggggtggtggtgggggctggggggccgcttgcctgccccagggtcaggctgggcaaggtccctagctctctacccaagctgttactccctcatggggcgcctaaggagactcaagtggacccatcatatatgggggctgggcctcgggactctcgctctaataaaggactgtaggccatggggcctaaaccacgaa

SEQ ID NO: 41141 - DNA, 2352 bp, Homo sapiens
gtggggcgcgggcaatggagcagagtatgggagaacgcgctcggagtaaagcacacggcgcggcgaaggcgtggcgggagtgtgcggcgccggacccgggaagctggcctgggcgccgggtctcgagtgcaggcctttgttctgaagtgtccaggccggccttgcggcgtcgggactgaggaatggagcccgtcgcggggcggggcgggaaaggaaggttcaagtctctcgggttgatgcgcaagtttccgtccccatcggccggacagattagaatcctttcaggtgctagatggcggctgcagaggctgtgcatcacatacacctgcagaacttctcacgctctctgcttgagaccctcaatgggcagaggcttgggggacacttctgtgacgtgactgtgcgcattcgtgaagcttcgctgcgtgcccaccgctgcgtgctggcggccggctcacccttcttccaagacaagctgctgctcggccactctgagatccgtgtgcctccggtggtgcccgcgcagacagtgcgacagctggtagagttcctgtacagcggttcgctcgttgtggcgcagggtgaagccctgcaggtgctcacggccgcgtcagtgcttcgcatacagacagttatcgacgaatgcacgcagattatcgcccgcgctcgagccccgggcacctctgcgcccacgcccctgcccacccctgtgcccccgccactcgcacctgcgcagctgcgtcaccgcctgcgccacctgctggctgcacgtcccccggggcaccccggtgctgcacacagccgtaagcagcgccagcccgcgcgtttgcagctgccagcgcccccaacacctgccaaggctgaggggcctgatgctgacccctcactgtccgcggcccctgatgaccgaggtgacgaggatgacgaggaaagtgacgatgagaccgatggcgaggatggcgaaggtggcggcccaggcgagggccaggcacctccttccttcccagactgtgctgctggcttcctcactgctgctgctgacagcgcgtgcgaggagccccctgcacccactggcctcgctgactacagtggtgccgggagagattttcttcggggagctgggtcagctgaggacgtatttccagacagctatgtatccacttggcacgacgaggatggcgctgtccccgaaggctgtcccactgagacccctgtccagcccgactgcatactgtctggatcccgcccgcctggtgtgaagaccccagggccgcccgttgcactcttcccctttcacttgggtgcccctgggccacccgcaccacccccttcagcaccatcggggccagcccctgcgcccccacccgccttctaccccacactccagcccgaggcagcccccagtactcagctgggggaggtcccggctccctctgctgctcccaccacggccccctcaggcacccctgctcgcaccccaggtgctgagccacctacgtatgagtgcagccactgtcgcaagacgttcagctcccggaaaaactacaccaagcacatgttcatccactcgggggagaagccgcaccagtgcgccgtgtgctggcgatccttctctctacgcgactacctgctcaaacacatggtcacgcacaccggcgtgcgcgccttccagtgcgccgtctgcgccaagcgcttcacgcagaagagctcgctcaacgtgcacatgcgcactcaccggcccgagcgcgcgccctgccccgcctgcggcaaggtcttctcgcaccgcgcgctgctggagcgccacctggcggcgcaccctgcgccctgatggcgctggggcctggcctcgcccacggtggatccggggcctcccgcacagtcggccacgcccgctgcgggacccgtggttcccgccactagaccacgctccctcctgagcgcaggtcctctctctcccttcaccctttctccataccagggcctaagtccgccttactcctctcctccatgtacttgaaccctccaggtggtgccgggctggggctggggctggttagaccacttctgagaactggactatttcctgcgtaaaccgggcgctcaggcgcttggacccggcccaagatttgactccggttctcaccccgccctctcctggggtggtggtgggggctggggggccgcttgcctgccccagggtcaggctgggcaaggtccctagctctctacccaagctgttactccctcatggggcgcctaaggagactcaagtggacccatcatatatgggggctgggcctcgggactctcgctctaataaaggactgtaggccatggggcctaaaccacgaa

SEQ ID NO: 41142 - DNA, 1566 bp, Homo sapiens
aacggcccggaagtgcggccttgtagtcggtcaggaggaagcggccacggcagagcctggtgcctgaagaggagtcggagatggcggctgcagaggctgtgcatcacatacacctgcagaacttctcacgctctctgcttgagaccctcaatgggcagaggcttgggggacacttctgtgacgtgactgtgcgcattcgtgaagcttcgctgcgtgcccaccgctgcgtgctggcggccggctcacccttcttccaagacaagctgctgctcggccactctgagatccgtgtgcctccggtggtgcccgcgcagacagtgcgacagctggtagagttcctgtacagcggttcgctcgttgtggcgcagggtgaagccctgcaggtgctcacggccgcgtcagtgcttcgcatacagacagttatcgacgaatgcacgcagattatcgcccgcgctcgagccccgggcacctctgcgcccacgcccctgcccacccctgtgcccccgccactcgcacctgcgcagctgcgtcaccgcctgcgccacctgctggctgcacgtcccccggggcaccccggtgctgcacacagccgtaagcagcgccagcccgcgcgtttgcagctgccagcgcccccaacacctgccaaggctgaggggcctgatgctgacccctcactgtccgcggcccctgatgaccgaggtgacgaggatgacgaggaaagtgacgatgagaccgatggcgaggatggcgaaggtggcggcccaggcgagggccaggcacctccttccttcccagactgtgctgctggcttcctcactgctgctgctgacagcgcgtgcgaggagccccctgcacccactggcctcgctgactacagtggtgccgggagagattttcttcggggagctgggtcagctgaggacgtatttccagacagctatgtatccacttggcacgacgaggatggcgctgtccccgaaggctgtcccactgagacccctgtccagcccgactgcatactgtctggatcccgcccgcctggtgtgaagaccccagggccgcccgttgcactcttcccctttcacttgggtgcccctgggccacccgcaccacccccttcagcaccatcggggccagcccctgcgcccccacccgccttctaccccacactccagcccgaggcagcccccagtactcagctgggggaggtcccggctccctctgctgctcccaccacggccccctcaggcacccctgctcgcaccccaggtgctgagccacctacgtatgagtgcagccactgtcgcaagacgttcagctcccggaaaaactacaccaagcacatgttcatccactcgggggagaagccgcaccagtgcgccgtgtgctggcgatccttctctctacgcgactacctgctcaaacacatggtcacgcacaccggcgtgcgcgccttccagtgcgccgtctgcgccaagcgcttcacgcagaagtgcgcctgggtgcgcacccaggcgcacttctggggagtagtgtgattgaggtggagtagataaggcgtaggta

SEQ ID NO: 41143 - DNA, 183 bp, Homo sapiens
ggggtggggtgggggcggggagctgtagagtctgacttgcgttcgcggcccgccctgtcttccgcaggggagaagccgcaccagtgcgccgtgtgctggcgatccttctctctacgcgactacctgctcaaacacatggtcacgcacaccggcgtgcgcgccttccagtgcgccgtctgcgcc

SEQ ID NO: 41144 - DNA, 294 bp, Homo sapiens
ttgctagagatcaccatatcacatttagtcaaactaacataactatatgaatttaatattttagaataagtattataactaattctgtttcattggtaccacaactactactaatacttacattcattgaacagttactactaataattaacatttttaaacacctatgttgttctaagcactgtgctaaatgtattattttatttaatatctgcaacagactctaacaaacagatagtgattattctcattttacatgtttgtaaacagacatacatggaagttaggtaactt

SEQ ID NO: 41145 - DNA, 214 bp, Homo sapiens
aatgagtgaatccatgcaagccccataaaacagttcctagcatgcagaaaatgcccacgtaaatagctgtcatcatcattatcttttaacattttgggggactttccagttgaaaagaaaacatgctatgtcatttttatccattatccctggaacttattgtgaaagttgtgctgttttctaagtaaaataaaaaataaaaaattagcaattt

SEQ ID NO: 41146 - DNA, 356 bp, Homo sapiens
cttttggtactgatgtccaccaggctgtttcagaaagaagccagtgagcacccttccatcggccaccgtgcctagagctgttctccacattctctttttgcttatcctctcagcactcagtgggctgccagcctcaggatggtgttagattaaagaaatggcctatcagagcttagtaattcaccagttctctttaagaattcacatgaccttaaataaaatgttcgatttaacttaaaacaaatcatgtcaagcatgtaagcaaacaaattccgaaatggtgaactgtttctcttattttagattattttcttaaaatacccatctgtatttgtaatgaaggtctattctccttt

SEQ ID NO: 41147 - DNA, 469 bp, Homo sapiens
gacatgcaagtgcaggaccacatttttaaaaagtaaaaagaaacaggtaaaattagttttaatatctattaattagccccatgtatccatttcaatctgtgttactagccacatgttgagtggttacatacaggacattacaaggttaaggagtgaggcctgatcaggattttaaaatctccccttatgattatagtgtttaagaaccactggactagaatgaggagaggctagttggtgagagagagtttagaaagctgttttctgttgtctaagtgggagatgataatggcctggattaaagcatcagtgaaagggttggagagcaaatagatttgagagagatgtaaggaaaattgtcagggtttgatgaataaagtgtagatacaagggttgaagaaggaaaaagagttaagaattaaggttcctgctttagatattttgactgggttctatggtaccagagaca

SEQ ID NO: 41148 - DNA, 4717 bp, Homo sapiens
tgggttccaaggcggctggcggcggtagcgtctctgtttccttgtgggcgctcgcgcggccctgggtagtctgtagagaatgccaaatgagggaatcccccactcaagtcaaactcaggagcaagactgtttacagagtcaacctgtcagtaataatgaagaaatggcaatcaagcaagaaagtggtggtgatggggaggtggaggagtacctgtcctttcgttctgtgggtgacgggctgtccacctctgctgtggggtgcgcatcagcagctccgaggagagggccagccctgctgcacatcgaccgacatcagatccaggcagtagagcctagcgcccaggcccttgagctgcagggtttgggtgtggacgtctatgaccaggacgtgctggaacagggagtgcttcagcaggtggacaatgccatccatgaggccagccgtgcctcccagctcgttgacgtggagaaggagtatcggtcggtcctggatgacctcacgtcatgtacgacatccctaaggcaaatcaataaaattattgaacagcttagccctcaagctgccaccagcagagacatcaacaggaaactagattctgtaaaacgacagaagtataataaggaacaacagctaaaaaagatcactgcaaaacaaaagcatctccaggccatccttggaggagcagaggtgaaaattgaactagatcacgccagtctggaggaggatgcagagccggggccatccagtcttggcagcatgctcatgcctgtccaggagactgcctgggaagagctcatccgcactggccagatgacaccttttggtacccagatccctcagaaacaggagaaaaagcccagaaaaatcatgcttaatgaagcatcaggcttcgaaaagtatttggcagatcaagcaaaactgtcttttgaaaggaagaagcaaggttgtaataaaagagcagctagaaaagctccagccccagtcacgcctccagccccagtgcaaaataaaaacaaaccaaacaagaaagccagagttctgtccaaaaaagaggagcgtttgaaaaagcacatcaagaaactccagaagagggctttgcagttccaggggaaagtgggattgccaaaggcaaggagaccttgggagtcagacatgaggccagaggcagagggagactctgagggtgaagagtctgagtatttccccacagaggaggaggaagaggaggaagatgacgaggtggagggggcagaggcggacctgtctggagatggtactgactatgagctgaagcctctgcccaagggcgggaaacggcagaagaaagtgccagtgcaggagattgatgatgactttttcccaagttctggggaagaagctgaagctgcttctgtaggagaaggaggaggaggaggtcggaaagtgggaagataccgagatgatggagatgaagattattataagcagcggttaaggagatggaataaactgagactgcaggacaaagagaaacgtctgaagctggaggacgattctgaggaaagtgatgctgaatttgacgaaggttttaaagtgccaggttttctgttcaaaaagctttttaagtaccagcagacaggtgttaggtggctgtgggaattgcactgccagcaggcaggaggaattctgggagatgaaatgggattgggcaagaccatccagataattgccttcttggcaggtctgagctacagcaagatcaggactcgtggttcaaattacaggtttgaggggttgggtccaactgtaattgtctgtccaacaacagtgatgcatcagtgggtgaaggaatttcacacgtggtggcctccgttcagagtggcaattctacatgaaaccggttcctatacccacaaaaaggagaaactaattcgagatgttgctcattgtcatggaattttgatcacatcttactcctacattcgattgatgcaggatgacattagcaggtatgactggcactatgtgatcttggacgaaggacacaaaattcgaaatccaaatgctgctgtcacccttgcttgcaaacagtttcgcacccctcatcggatcattctgtctggctcaccgatgcaaaataacctccgagagctgtggtcgctctttgacttcatcttcccgggaaagttaggcacgttgcctgtgtttatggagcagttctccgtccccatcaccatggggggatattcaaatgcttccccagtacaggtcaaaactgcttacaagtgtgcatgtgtcttacgagataccataaatccatacctactgcggagaatgaagtcagatgtcaagatgagcctttctttgccagataaaaatgaacaggtcttattttgccgtcttacagatgagcagcataaagtctaccaaaatttcgttgattccaaagaagtttacaggattctcaatggagagatgcagattttctccggacttatagccctaagaaaaatttgcaaccaccctgatctcttttctggaggtcccaagaatctcaaaggtcttcctgatgatgaactagaagaagatcagtttgggtactggaaacgttctgggaaaatgattgttgttgagtctttgttgaaaatatggcacaagcagggtcagcgagtattgctgttttctcagtcaaggcagatgctggacatacttgaagtattccttagagcccaaaagtatacctatctcaagatggatggtaccactacaatagcttcaagacagccactgattacgagatacaatgaggacacatccatatttgtgtttcttctgaccacgcgggtgggcggcttaggtgtcaacctgacgggggcaaacagagttgtcatctatgacccagactggaacccaagcacggacacgcaggcccgggagcgagcatggagaataggccagaagaagcaagtgactgtgtacaggctcctgactgcgggcaccattgaagaaaagatctaccaccgacaaatcttcaagcagtttttgacaaatagagtgctaaaagacccaaaacaaaggcggtttttcaaatccaatgatctctatgagctatttactctgactagtcctgatgcatcccagagcactgaaacaagtgcaatttttgcaggaactggatcagatgttcagacacccaaatgccatctaaaaagaaggattcaaccagcctttggagcagaccatgatgttccaaaacgcaagaagttccctgcttctaacatatctgtaaatgatgccacatcatctgaagagaaatctgaggctaaaggagctgaagtaaatgcagtaacttctaatcgaagtgatcctttgaaagatgaccctcacatgagtagtaatgtaactagcaatgataggcttggagaagagacaaatgcagtatctggaccagaagagttgtcagtgattagtggaaatggggaatgttcaaattcttcaggaacaggcaaaacttctatgccatctggtgatgaaagcattgatgaaaagttaggtctttcttacaaaagagaaagacccagccaggctcaaacagaagctttttgggagaataaacaaatggaaaataatttttataagcacaagtcaaaaacaaaacatcatagtgtggcagaagaagagaccctggagaaacatctgagaccaaagcaaaagcctaagaactctaagcattgcagagacgccaagtttgaaggaactcgaattccacacctggtgaagaaaaggcgttaccagaagcaagacagtgaaaacaagagtgaggccaaggaacagagcaatgacgattatgttttggaaaagcttttcaaaaaatcagttggcgtgcacagtgtcatgaagcacgatgccatcatggatggagccagcccagattatgtactggtggaggcagaagccaaccgagtggcccaggatgccctgaaagcactgaggctctctcgtcagcggtgtctgggagcagtgtctggtgttcccacctggactggccacagggggatttctggtgcaccagcaggaaaaaagagtagatttggtaagaaaaggaattctaacttctctgtgcagcatccttcatcaacatctccaacagagaagtgccaggatggcatcatgaaaaaggagggaaaagataatgtccctgagcattttagtggaagagcagaagatgcagactcttcatccgggcccctcgcttcctcctcactcttggctaaaatgagagctagaaaccacctgattctgccagagcgtttagaaagtgaaagcgggcacctgcaggaagcttctgccctgctgcccaccacagaacacgatgaccttctggtggagatgagaaacttcatcgctttccaggcccacactgatggccaggccagcaccagggagatactgcaggagtttgaatccaagttatctgcatcacagtcttgtgtcttccgagaactattgagaaatctgtgcactttccatagaacttctggtggtgaaggaatttggaaactcaagccagaatactgctaaacaacattgcttcctaaactttcaagtccctttttctaacgggcatttctgattattaatttattattaataatcatgtttgtcaatggaagttggctgcacttgatgtttgtttgcatgatgtctacctcagaattaaaactttaaggaagaaga

SEQ ID NO: 41149 - DNA, 4574 bp, Homo sapiens
cgcccaggtgcgcgcgtggcggagggggaacagagaagcaggacagctctccatccttcccgtgttcagtcgtgggagacaacaagagaggtcacagcctggcgaccaaaaagtagtctgtagagaatgccaaatgagggaatcccccactcaagtcaaactcaggagcaagactgtttacagagtcaacctgtcagtaataatgaagaaatggcaatcaagcaagaaagtggtggtgatggggaggtggaggagtacctgtcctttcgttctgtgggtgacgggctgtccacctctgctgtggggtgcgcatcagcagctccgaggagagggccagccctgctgcacatcgaccgacatcagatccaggcagtagagcctagcgcccaggcccttgagctgcagggtttgggtgtggacgtctatgaccaggacgtgctggaacagggagtgcttcagcaggtggacaatgccatccatgaggccagccgtgcctcccagctcgttgacgtggagaaggagtatcggtcggtcctggatgacctcacgtcatgtacgacatccctaaggcaaatcaataaaattattgaacagcttagccctcaagctgccaccagcagagacatcaacaggaaactagattctgtaaaacgacagaagtataataaggaacaacagctaaaaaagatcactgcaaaacaaaagcatctccaggccatccttggaggagcagaggtgaaaattgaactagatcacgccagtctggaggaggatgcagagccggggccatccagtcttggcagcatgctcatgcctgtccaggagactgcctgggaagagctcatccgcactggccagatgacaccttttggtacccagatccctcagaaacaggagaaaaagcccagaaaaatcatgcttaatgaagcatcaggcttcgaaaagtatttggcagatcaagcaaaactgtcttttgaaaggaagaagcaaggttgtaataaaagagcagctagaaaagctccagccccagtcacgcctccagccccagtgcaaaataaaaacaaaccaaacaagaaagccagagttctgtccaaaaaagaggagcgtttgaaaaagcacatcaagaaactccagaagagggctttgcagttccaggggaaagtgggattgccaaaggcaaggagaccttgggagtcagacatgaggccagaggcagagggagactctgagggtgaagagtctgagtatttccccacagaggaggaggaagaggaggaagatgacgaggtggagggggcagaggcggacctgtctggagatggtactgactatgagctgaagcctctgcccaagggcgggaaacggcagaagaaagtgccagtgcaggagattgatgatgactttttcccaagttctggggaagaagctgaagctgcttctgtaggagaaggaggaggaggaggtcggaaagtgggaagataccgagatgatggagatgaagattattataagcagcggttaaggagatggaataaactgagactgcaggacaaagagaaacgtctgaagctggaggacgattctgaggaaagtgatgctgaatttgacgaaggttttaaagtgccaggttttctgttcaaaaagctttttaagtaccagcagacaggtgttaggtggctgtgggaattgcactgccagcaggcaggaggaattctgggagatgaaatgggattgggcaagaccatccagataattgccttcttggcaggtctgagctacagcaagatcaggactcgtggttcaaattacaggagaaactaattcgagatgttgctcattgtcatggaattttgatcacatcttactcctacattcgattgatgcaggatgacattagcaggtatgactggcactatgtgatcttggacgaaggacacaaaattcgaaatccaaatgctgctgtcacccttgcttgcaaacagtttcgcacccctcatcggatcattctgtctggctcaccgatgcaaaataacctccgagagctgtggtcgctctttgacttcatcttcccgggaaagttaggcacgttgcctgtgtttatggagcagttctccgtccccatcaccatggggggatattcaaatgcttccccagtacaggtcaaaactgcttacaagtgtgcatgtgtcttacgagataccataaatccatacctactgcggagaatgaagtcagatgtcaagatgagcctttctttgccagataaaaatgaacaggtcttattttgccgtcttacagatgagcagcataaagtctaccaaaatttcgttgattccaaagaagtttacaggattctcaatggagagatgcagattttctccggacttatagccctaagaaaaatttgcaaccaccctgatctcttttctggaggtcccaagaatctcaaaggtcttcctgatgatgaactagaagaagatcagtttgggtactggaaacgttctgggaaaatgattgttgttgagtctttgttgaaaatatggcacaagcagggtcagcgagtattgctgttttctcagtcaaggcagatgctggacatacttgaagtattccttagagcccaaaagtatacctatctcaagatggatggtaccactacaatagcttcaagacagccactgattacgagatacaatgaggacacatccatatttgtgtttcttctgaccacgcgggtgggcggcttaggtgtcaacctgacgggggcaaacagagttgtcatctatgacccagactggaacccaagcacggacacgcaggcccgggagcgagcatggagaataggccagaagaagcaagtgactgtgtacaggctcctgactgcgggcaccattgaagaaaagatctaccaccgacaaatcttcaagcagtttttgacaaatagagtgctaaaagacccaaaacaaaggcggtttttcaaatccaatgatctctatgagctatttactctgactagtcctgatgcatcccagagcactgaaacaagtgcaatttttgcaggaactggatcagatgttcagacacccaaatgccatctaaaaagaaggattcaaccagcctttggagcagaccatgatgttccaaaacgcaagaagttccctgcttctaacatatctgtaaatgatgccacatcatctgaagagaaatctgaggctaaaggagctgaagtaaatgcagtaacttctaatcgaagtgatcctttgaaagatgaccctcacatgagtagtaatgtaactagcaatgataggcttggagaagagacaaatgcagtatctggaccagaagagttgtcagtgattagtggaaatggggaatgttcaaattcttcaggaacaggcaaaacttctatgccatctggtgatgaaagcattgatgaaaattgggagaataaacaaatggaaaataatttttataagcacaagtcaaaaacaaaacatcatagtgtggcagaagaagagaccctggagaaacatctgagaccaaagcaaaagcctaagaactctaagcattgcagagacgccaagtttgaaggaactcgaattccacacctggtgaagaaaaggcgttaccagaagcaagacagtgaaaacaagagtgaggccaaggaacagagcaatgacgattatgttttggaaaagcttttcaaaaaatcagttggcgtgcacagtgtcatgaagcacgatgccatcatggatggagccagcccagattatgtactggtggaggcagaagccaaccgagtggcccaggatgccctgaaagcactgaggctctctcgtcagcggtgtctgggagcagtgtctggtgttcccacctggactggccacagggggatttctggtgcaccagcaggaaaaaagagtagatttggtaagaaaaggaattctaacttctctgtgcagcatccttcatcaacatctccaacagagaagtgccaggatggcatcatgaaaaaggagggaaaagataatgtccctgagcattttagtggaagagcagaagatgcagactcttcatccgggcccctcgcttcctcctcactcttggctaaaatgagagctagaaaccacctgattctgccagagcgtttagaaagtgaaagcgggcacctgcaggaagcttctgccctgctgcccaccacagaacacgatgaccttctggtggagatgagaaacttcatcgctttccaggcccacactgatggccaggccagcaccagggagatactgcaggagtttgaatccaagttatctgcatcacagtcttgtgtcttccgagaactattgagaaatctgtgcactttccatagaacttctggtggtgaaggaatttggaaactcaagccagaatactgctaaacaacattgcttcctaaactttcaagtccctttttctaacgggcatttctgattattaatttattattaataatcatgtttgtcaatggaagttggctgcacttgatgtttgtttgcatgatgtctacctcagaattaaaactttaaggaagaaga

SEQ ID NO: 41150 - DNA, 4348 bp, Homo sapiens
cgcccaggtgcgcgcgtggcggagggggaacagagaagcaggacagctctccatccttcccgtgttcagtcgtgggagacaacaagagaggtcacagcctggcgaccaaaaagtagtctgtagagaatgccaaatgagggaatcccccactcaagtcaaactcaggagcaagactgtttacagagtcaacctgtcagtaataatgaagaaatggcaatcaagcaagaaagtggtggtgatggggaggtggaggagtacctgtcctttcgttctgtgggtgacgggctgtccacctctgctgtggggtgcgcatcagcagctccgaggagagggccagccctgctgcacatcgaccgacatcagatccaggcagtagagcctagcgcccaggcccttgagctgcagggtttgggtgtggacgtctatgaccaggacgtgctggaacagggagtgcttcagcaggtggacaatgccatccatgaggccagccgtgcctcccagctcgttgacgtggagaaggagtatcggtcggtcctggatgacctcacgtcatgtacgacatccctaaggcaaatcaataaaattattgaacagcttagccctcaagctgccaccagcagagacatcaacaggaaactagattctgtaaaacgacagaagtataataaggaacaacagctaaaaaagatcactgcaaaacaaaagcatctccaggccatccttggaggagcagaggtgaaaattgaactagatcacgccagtctggaggaggatgcagagccggggccatccagtcttggcagcatgctcatgcctgtccaggagactgcctgggaagagctcatccgcactggccagatgacaccttttggtacccagatccctcagaaacaggagaaaaagcccagaaaaatcatgcttaatgaagcatcaggcttcgaaaagtatttggcagatcaagcaaaactgtcttttgaaaggaagaagcaaggttgtaataaaagagcagctagaaaagctccagccccagtcacgcctccagccccagtgcaaaataaaaacaaaccaaacaagaaagccagagttctgtccaaaaaagaggagcgtttgaaaaagcacatcaagaaactccagaagagggctttgcagttccaggggaaagtgggattgccaaaggcaaggagaccttgggagtcagacatgaggccagaggcagagggagactctgagggtgaagagtctgagtatttccccacagaggaggaggaagaggaggaagatgacgaggtggagggggcagaggcggacctgtctggagatggtactgactatgagctgaagcctctgcccaagggcgggaaacggcagaagaaagtgccagtgcaggagattgatgatgactttttcccaagttctggggaagaagctgaagctgcttctgtaggagaaggaggaggaggaggtcggaaagtgggaagataccgagatgatggagatgaagattattataagcagcggttaaggagatggaataaactgagactgcaggacaaagagaaacgtctgaagctggaggacgattctgaggaaagtgatgctgaatttgacgaaggttttaaagtgccaggttttctgttcaaaaagctttttaagtaccagcagacaggtgttaggtggctgtgggaattgcactgccagcaggcaggaggaattctgggagatgaaatgggattgggcaagaccatccagataattgccttcttggcaggtctgagctacagcaagatcaggactcgtggttcaaattacaggagaaactaattcgagatgttgctcattgtcatggaattttgatcacatcttactcctacattcgattgatgcaggatgacattagcaggtatgactggcactatgtgatcttggacgaaggacacaaaattcgaaatccaaatgctgctgtcacccttgcttgcaaacagtttcgcacccctcatcggatcattctgtctggctcaccgatgcaaaataacctccgagagctgtggtcgctctttgacttcatcttcccgggaaagttaggcacgttgcctgtgtttatggagcagttctccgtccccatcaccatggggggatattcaaatgcttccccagtacaggtcaaaactgcttacaagtgtgcatgtgtcttacgagataccataaatccatacctactgcggagaatgaagtcagatgtcaagatgagcctttctttgccagataaaaatgaacaggtcttattttgccgtcttacagatgagcagcataaagtctaccaaaatttcgttgattccaaagaagtttacaggattctcaatggagagatgcagattttctccggacttatagccctaagaaaaatttgcaaccaccctgatctcttttctggaggtcccaagaatctcaaaggtcttcctgatgatgaactagaagaagatcagtttgggtactggaaacgttctgggaaaatgattgttgttgagtctttgttgaaaatatggcacaagcagggtcagcgagtattgctgttttctcagtcaaggcagatgctggacatacttgaagtattccttagagcccaaaagtatacctatctcaagatggatggtaccactacaatagcttcaagacagccactgattacgagatacaatgaggacacatccatatttgtgtttcttctgaccacgcgggtgggcggcttaggtgtcaacctgacgggggcaaacagagttgtcatctatgacccagactggaacccaagcacggacacgcaggcccgggagcgagcatggagaataggccagaagaagcaagtgactgtgtacaggctcctgactgcgggcaccattgaagaaaagatctaccaccgacaaatcttcaagcagtttttgacaaatagagtgctaaaagacccaaaacaaaggcggtttttcaaatccaatgatctctatgagctatttactctgactagtcctgatgcatcccagagcactgaaacaagtgcaatttttgcaggaactggatcagatgttcagacacccaaatgccatctaaaaagaaggattcaaccagcctttggagcagaccatgatgttccaaaacgcaagaagttccctgcttctaacatatctgtaaatgatgccacatcatctgaagagaaatctgaggctaaaggagctgaagtaaatgcagtaacttctaatcgaagtgatcctttgaaagatgaccctcacatgagtagtaatgtaactagcaatgataggcttggagaagagacaaatgcagtatctggaccagaagagttgtcagtgattagtggaaatggggaatgttcaaattcttcaggaacaggcaaaacttctatgccatctggtgatgaaagcattgatgaaaattgggagaataaacaaatggaaaataatttttataagcacaagtcaaaaacaaaacatcatagtgtggcagaagaagagaccctggagaaacatctgagaccaaagcaaaagcctaagaactctaagcattgcagagacgccaagtttgaaggaactcgaattccacacctggtgaagaaaaggcgttaccagaagcaagacagtgaaaacaagagtgaggccaaggaacagagcaatgacgattatgttttggaaaagcttttcaaaaaatcagttggcgtgcacagtgtcatgaagcacgatgccatcatggatggagccagcccagattatgtactggtggaggcagaagccaaccgagtggcccaggatgccctgaaagcactgaggctctctcgtcagcggtgtctgggagcagtgtctggtgttcccacctggactggccacagggggatttctggtgcaccagcaggaaaaaagagtagatttggtaagaaaaggaattctaacttctctgtgcagcatccttcatcaacatctccaacagagaagtgccaggtaatatagataacctttttgctttccagggtgagacttgcttgattgaatgctgtgaaaatttcacctgattctggatgtgaagaaaatggtcatctctggtgtaatgacacctgatatttgtgttgcacgctctgatttacgatgcacattcacttgaatctaaaaggacctgctgatttcctaaagacaaagtctttaacccaagatccgtagcagcatttctgttttgccattagaaggttgacacagggataggtgtgtcgctgctaggacagcctgccttgtctagagggaaagtgccagctccagagaccacaaccctctgaaataaaagtccagaaaactgc

SEQ ID NO: 41151 - DNA, 259 bp, Homo sapiens
ctggttaatttttcttatttattatcagaactcaagaagatacgttgtccctttttagtaaattaatacttggaaacttgaatttatgtagttggaagattattacttgatcttttgagaaatcagtctgctctaattataaaatatttaagaactacaatgaatcctatataacgaaaaggcttataaatttttttccttttaggtagtctgtagagaatgccaaatgagggaatcccccactcaagtcaaactcagg

SEQ ID NO: 41152 - DNA, 429 bp, Homo sapiens
gatgactttttcccaagttctggggaagaagctgaagctgcttctgtaggagaaggaggaggaggaggtcggaaagtgggaagataccgagatgatggagatgaagattattataagcagcggttaaggtcggtctgtggggattataaatacattgtactgtttgctttatcttaggtgacaggtttattaatatgtaagcattctagatccagcttaatatattagacccccccgattatacagaggttggatttctgcagccttaacctgctagaagcagtggggcccctgagtccttaatgatgctggccccaaatgcatgtacttctaggtctttagttggatttggaggcaagtctaagatgaaaaacttaagggaaggctggggcaagaggcatacagagggctgagtgtgagctgtgtcgc

SEQ ID NO: 41153 - DNA, 532 bp, Homo sapiens
tctatagtattcagcttcaacaataagaaaaaattctttctcattttttcatctaaatgtaattaaggatttgtaattgcataaaatgtgtatgttttggagagtaccaaaatgatgcaagaatgatgagtaaatgtgtaaataatttgcagaggagcgttttagggtaggaatggcgattgctaaaaggtaaatttaataaaaaggtgcttcctttcctcaaatagtttcgcacccctcatcggatcattctgtctggctcaccgatgcaaaataacctccgagagctgtggtcgctctttgacttcatcttcccgggaaagttaggcacgttgcctgtgtttatggagcagttctccgtccccatcaccatggggggatattcaaatgcttccccagtacaggtaaaatattaggatgataatacttttggcattttaatatttaaagtgctcctattaaatactataatttgtagccaagtcattcagaatgtgagaaagatggccaggctcataaattggtatctggt

SEQ ID NO: 41154 - DNA, 2210 bp, Homo sapiens
cgcccaggtgcgcgcgtggcggagggggaacagagaagcaggacagctctccatccttcccgtgttcagtcgtgggagacaacaagagaggtcacagcctggcgaccaaaaagtagtctgtagagaatgccaaatgagggaatcccccactcaagtcaaactcaggagcaagactgtttacagagtcaacctgtcagtaataatgaagaaatggcaatcaagcaagaaagtggtggtgatggggaggtggaggagtacctgtcctttcgttctgtgggtgacgggctgtccacctctgctgtggggtgcgcatcagcagctccgaggagagggccagccctgctgcacatcgaccgacatcagatccaggcagtagagcctagcgcccaggcccttgagctgcagggtttgggtgtggacgtctatgaccaggacgtgctggaacagggagtgcttcagcaggtggacaatgccatccatgaggccagccgtgcctcccagctcgttgacgtggagaaggagtatcggtcggtcctggatgacctcacgtcatgtacgacatccctaaggcaaatcaataaaattattgaacagcttagccctcaagctgccaccagcagagacatcaacaggaaactagattctgtaaaacgacagaagtataataaggaacaacagctaaaaaagatcactgcaaaacaaaagcatctccaggccatccttggaggagcagaggtgaaaattgaactagatcacgccagtctggaggaggatgcagagccggggccatccagtcttggcagcatgctcatgcctgtccaggagactgcctgggaagagctcatccgcactggccagatgacaccttttggtacccagatccctcagaaacaggagaaaaagcccagaaaaatcatgcttaatgaagcatcaggcttcgaaaagtatttggcagatcaagcaaaactgtcttttgaaaggaagaagcaaggttgtaataaaagagcagctagaaaagctccagccccagtcacgcctccagccccagtgcaaaataaaaacaaaccaaacaagaaagccagagttctgtccaaaaaagaggagcgtttgaaaaagcacatcaagaaactccagaagagggctttgcagttccaggggaaagtgggattgccaaaggcaaggagaccttgggagtcagacatgaggccagaggcagagggagactctgagggtgaagagtctgagtatttccccacagaggaggaggaagaggaggaagatgacgaggtggagggggcagaggcggacctgtctggagatggtactgactatgagctgaagcctctgcccaagggcgggaaacggcagaagaaagtgccagtgcaggagattgatgatgactttttcccaagttctggggaagaagctgaagctgcttctgtaggagaaggaggaggaggaggtcggaaagtgggaagataccgagatgatggagatgaagattattataagcagcggttaagtcccaagatgcctcgaacactaagtttacatgaaataactgaccttttagagacagatgacagcatagaagcaagtgctatagtgatacaaccacctgaaaatgctacagcacctgtttctgatgaggaatcaggagatgaagaaggtggaacaataaataatctgccaggttctttgttgcacacagctgcgtatcttattcaagatggctctgatgctgagtctgactcagatgatccctcatacgcacctaaagatgactctcctgatgaagttccatctacgtttactgtgcagcaacctccaccatcaaggaggaggaaaatgacaaaaattctttgcaaatggaaaaaagccgacctaactgtacaacccgtagcaggtagagttacagcaccaccaaacgatttcttcaccgtaatgagaactcccacagaaattcttgaactttttcttgatgacgaggtcattgaactcattgtcaagtactccaacttatatgcttgcagtaaaggtgtacatcttggcttgactagctctgaattcaaatgttttctgggaattatttttctgagtggttatgtctcagttcctagaaggcgtatgttttgggaacaaagaacagatgtgcataatgtactggttagtgctgccatgagacgtgaccggtttgaaactatattttc

SEQ ID NO: 41155 - DNA, 991 bp, Homo sapiens
ttgtcttactcattctgaatctctaccagctgctcccagagtcacagatactcaagacagtgaaaacaagagtgaggccaaggaacagagcaatgacgattatgttttggaaaagcttttcaaaaaatcagttggcgtgcacagtgtcatgaagcacgatgccatcatggatggagccagcccagattatgtactggtggaggcagaagccaaccgagtggcccaggatgccctgaaagcactgaggctctctcgtcagcggtgtctgggagcagtgtctggtgttcccacctggactggccacagggggatttctggtgcaccagcaggaaaaaagagtagatttggtaagaaaaggaattctaacttctctgtgcagcatccttcatcaacatctccaacagagaagtgccaggatggcatcatgaaaaaggagggaaaagataatgtccctgagcattttagtggaagagcagaagatgcagactcttcatccgggcccctcgcttcctcctcactcttggctaaaatgagagctagaaaccacctgattctgccagagcgtttagaaagtgaaagcgggcacctgcaggaagcttctgccctgctgcccaccacagaacacgatgaccttctggtggagatgagaaacttcatcgctttccaggcccacactgatggccaggccagcaccagggagatactgcaggagtttgaatccaagttatctgcatcacagtcttgtgtcttccgagaactattgagaaatctgtgcactttccatagaacttctggtggtgaaggaatttggaaactcaagccagaatactgctaaacaacattgcttcctaaactttcaagtccctttttctaacgggcatttctgattattaatttattattaataatcatgtttgtcaatggaagttggctgcacttgatgtttgtttgcatgatgtctacctcagaattaaaactttaaggaagaaga

SEQ ID NO: 41156 - DNA, 904 bp, Homo sapiens
  misc_feature (843)..(843): n is a, c, g, or t
  misc_feature (869)..(869): n is a, c, g, or t
gtttagccttagatagagaagcaactgccttctttccttatattcggagatataagtagaggtgggtttgtggacttggaaactcaagtgagctcccttttgatgactctctaggaggcagagtcatctggtgagaatgcagtaggaagaagtagggtatcagagatttgaagagaggaaataggggtttgaatagtcacaagaatggggaagaatgttgaccagggaaggatgttccatggatttagagtggcaccatttagcctagtatgtgaatttcttccccccgtccagcagtgttcagtagtctgagcccagattgtaccatcagctctttgaggatatatattctaacgtatttgttgaattattttataacacacattagtgatgtttaaaaaaaaaaaactcaatgcattccagattttgtcagtttctcacactcaagttaaaaagataaaccaaaatataccaaaggaagacattttctttaacattatgtggtaccttaagacatgagtgaataaagatgtaattaaggaaaatcagttggaatacttaaatagacttagttgtaaaaataaaaaaaaatgtgcttgttgaacgtataaaagcaaaataagtaataatactcggaacttcccagagaccctaaggttgctttagtaacattcctctccagccagatgagtactaagagttgattccaggttctcatgtttctcttgagccttttagtgtacagctattaagaaagtacaaataaactaatcaaaaactcgtgggttttttttgtttatttttggaggcagagtctcgctctatcccccaggctggaggttncggtgagccgagatcgctccattgtnttccggcctgggcaacaagaatgaaactctgtctc

SEQ ID NO: 41157 - DNA, 630 bp, Homo sapiens
aaaattggctcaagaactaggtgatacattttagaaaattttaaatagccaaaataatgttgaaatatgttatatggataatttatcaataaaaattattactgttaaaaattggtagaattctttcctccctgtgataaatgatttaagttgaatgggaatttaagtaacatacagggatgcatcttaatacctatatttgctcaacagtggtaaacacacaattaaaacttgtcctcattaaaatggacttttgtacactataatttgaagtaagtaatgaatatataaagtatttaaagagttgtatatcaaaatgtataacgttccatttttggctatattttgtaaaacatttttggtgtaatcagtatgactatcacatatgtcaaatcaagtattctactatttatttaaacggatatatacctaatgtatttgaaagcttattgcactcataaaattgtatatattgtggcttcaaaagtctgtacttattcttgctttaaaaaagtagtatgtgcatttctttccaatttatttttaattaattatattaaggataacattctttactaaatgtaccttaaaattcacaataaagtttcagaaattgttttgtacagtgtt

SEQ ID NO: 41158 - DNA, 631 bp, Homo sapiens
  misc_feature (248)..(249): n is a, c, g, or t
  misc_feature (256)..(256): n is a, c, g, or t
  misc_feature (259)..(259): n is a, c, g, or t
  misc_feature (330)..(330): n is a, c, g, or t
  misc_feature (355)..(355): n is a, c, g, or t
  misc_feature (361)..(361): n is a, c, g, or t
aaaattggctcaagaactaggtgatacattttagaaaattttaaatagccaaaataatgttgaaatatgttatatggataatttatcaataaaaattattactgttaaaaattggtagaattctttcctccctgtgataaatgatttaagttgaatgggaatttaagtaacatacagggatgcatcttaatacctatatttgctcaacagtggtaaacacacaattaaaacggggccgcaggaaaagnnacggggnganaagagaagggcaacgaacgaagcaagagagaaacgagggaaacacggcgagagaaaaagcgagaaacgganagggggcccgtagaggggcgaaaanagggtngggggaatcagtatgactatcacatatgtcaaatcaagtattctactatttatttaaacggatatatacctaatgtatttgaaagcttattgcactcataaaattgtatatattgtggcttcaaaagtctgtacttattcttgctttaaaaaagtagtatgtgcatttctttccaatttatttttaattaattatattaaggataacattctttactaaatgtaccttaaaattcacaataaagtttcagaaattgttttgtacagtgtt

SEQ ID NO: 41159 - DNA, 945 bp, Homo sapiens
cctcagctggtgctgcactctctgggcctcagtttcccacttgggcctcagctggtaatggcacccacctccgagggctgtcagggagaggaagggagagaatctgtctttgcactttgttctctgcccaggggagctctgttatgcccattttactgaagacgagactgaggctctgagcggcaggtgaggcctatagcccagcagcgcctttttcctcccctcctggtggctcaggtgtcgggagacagttcgcccggcacccccgcaccccatagccccgccttctcagatgctgttctagaggcctccctgctccctgagctgaacaaaggtgactttaatctccgtagccttgggctgggtttttagggcaccaccaaatctcgggagaacaggcctcccttgatctcattaagaaagcattttccttttaacccagcggcgcagtggagcgtctgcaggggctggccctccgcctcccacggcattcctgggctgagattctggggaggcctaggggctgggtgcgagtctgtgcgtgtggctgccctggggtgtctatgggtgctgcaggaggggtgcatgcatggagaggcggagacccagcctgccacccccttagctctgggcctcaccctagtgagcatgtgcccagggctgggtcaggctggataaggatctgagactaccaaggtgttccagggcctctgcgggacctgtgtgtacagggaaggaaactgaggctgggtgggcatcagggggttgtcccttggtcagagcattgcccgtacaccctgggttttgcactcagccatgccagggtgcgccgggcggcacgcgctgggcgggccgggcagaggaaggaacattcctccccgtgtgccggcaggcccaggcgggcgccggcgactcctggccccgccctggcggccccctcctctt

SEQ ID NO: 41160 - DNA, 347 bp, Homo sapiens
gtattctttttaaacttttccagagacatcacttatgtgatcttacttggtttctacaacattcccagccccaggaggcaggcagagtgatattgccaatcacatttttgtagacacaggctcagagaagtgacattacctgctagatgtcacacagcccatctgggaccccagggctcaagcccctgccctctggccctgagtcctgcctctgtctgtggactcccagctcttgctgttgctagagtgtgctgctcctttacttggcatgtccacattcctgggttgtccaggaacgcacattcttggagaggaaggggaatagatattttagccacatacaacac

SEQ ID NO: 41161 - DNA, 268 bp, Homo sapiens
gtggaacaagcatgaactttctgttcaaacgcactgcacagaacgagcctcagtcttctcacatttaaagcagtcagattcattagacttgagagacagtctctgagttcctctgctactcaaatttttatttatccttagtcattctcacaggacaaaggctgcaggaaccttctggtagaaagaaacaaagacaggagaaatcaacagagacagaaatggaacagtagcaaaaaggaagctgtcccagatccaggcaagaaagatg

SEQ ID NO: 41162 - DNA, 330 bp, Homo sapiens
tgaaggaaggaagggaaatagatttatgttaatgattcctgttcgactaaaggactgggaattttgcaagtattcaagggcaaaaagacctgtgttacaggtttatgactgggaaatgtagaatttccatctggatttttgaaaagctgggaatcatgaggctttcccggattctgtctggtttcaggacactgggatggggaccactggcttaagtcaaaggagaggaagtgattatgctgtggtggggtgtacacctcagcccggatttcgggaggctggaaggcctctgagaccatttccagctctatcattctatgcaaaaaaaaa

SEQ ID NO: 41163 - DNA, 929 bp, Homo sapiens
tgaaggaaggaagggaaatagatttatgttaatgattcctgttcgactaaaggactgggaattttgcaagtattcaagggcaaaaagacctgtggttacagctgtatccagctccagtccagggaaaccgtgggaagtagagctgggccttgagcagtcccagagcccaccttcgatggtggtgcttgctttggtccaccttgtctcttccatttccctccagggtccagtgtcatcctgatgcacctgcccctgcctccaagcaccttctatgaaaggcctgcagaagcccttccctcccaggtccacctgcctacccagcaaaccaattttggagcctggatgatgatagataagaaggagttaatccaacacctctcccaggcaactcatttccatgtcagaggcctggggtgagggtggtgggtggaggactcatggctcccacccatttcattaccaaggattcctttcattatttatcccctttcatcattcccaccttctgctttgaaaggttctgtatatcaaacaaacagtattcattaagaattgatttatttgttttgccattttgtaaattaagtcatcaaagctggctagagctgtaagtccacactcctgatcagcagagataagacctgctgtgtgctgagtggaagtaattgtattcccgagcaaagaaacctatagttacaggtttatgactgggaaatgtagaatttccatctggatttttgaaaagctgggaatcatgaggctttcccggattctgtctggtttcaggacactgggatggggaccactggcttaagtcaaaggagaggaagtgattatgctgtggtggggtgtacacctcagcccggatttcgggaggctggaaggcctctgagaccatttccagctctatcattctatgcaaaaaaaaa

SEQ ID NO: 41164 - DNA, 517 bp, Homo sapiens
cagaatttttgaaaagtaattattttgaaaaatgaatggcatgcagctagcctttgtataaaaataattttctagatttgaaccctaatagttaaaaattaaaaattaaacataaacatactgcttttaattgtcaggtatatatataagatagagctgaaactgtggtttaggtctttctgtggaatgccattacatctttatattagtcaagtccatgaaaataaatgtttagatcgtcttgaattgttagtctcaggcagtgttatcctgctctcaggccaacagggggagcaaaatagaaacattccagatatagctttcatttttgagaacttgagtaatcagaatttactgttctgtaaagaataaaggaaaggaaaattataaagagagaaatttctttttaaagccctcacagaatgtgctagaaatagaataaaatttaaaatacttttggcttcttttcctcagcttaagttcaaaataaaagcaatcctttacagttaaaaaaaaa

SEQ ID NO: 41165 - DNA, 385 bp, Homo sapiens
aattttaattggcagaagcagtgctgactgggaccccagacagccatctgagaccactataactttcctcactattgcctgtctctgttctggtagatgctgggttgtgtgttagatgttattttgcttttagaaaaaaagaaaagagaaaagcacctgaaattatctcttcttgcattcattcattcattcatgaaatactgattgagtgcatattgacaggcaaagatctgtgctagtagccgtagtgatcagagccaggcccagggtaaggcaagtggggcactcatcccaggggcatcatttaaggggacacacacaaaaaaacaggaatcaaggtaaataataccttaatgcaatatttcaagaagtcaaaagtaatgcc

SEQ ID NO: 41166 - DNA, 291 bp, Homo sapiens
tgtgatttaatgtatgcaacacctattctaggacaggcaaagtacaaagtgccttacacttaatctcccataattacttcctgaacatggattgttctcactgtgttcagatgtcataactgcacctgagcgttacagagccaacaaatgttggaactgggattcaaaggagatctggtcactccaaaggccatgctcttagtctctagtagtcaagataacacatttgagaattctgtagataaatatttaaagacatttttagcaattgttgcatgcttgtttctcacc

SEQ ID NO: 41167 - DNA, 539 bp, Homo sapiens
attctgtcagaagaatgccagatattataaaaagccccagtaaaagactttcccccccaaagatggaaaaatactcagtattggtaaatgtatggtgaaagagttgttcccgtgtatcgttagctgatatgtaaaatggtactacatttttaaagacaacatggcattttgcatttagtttaaaacacggccaagcactgtgttttatgcctctttgggaggctgaggcgggcagatcgcttgagccccaggagtttgagacccacatgggcaacatggtaaaaccccatctctacaaaaaacacagaaattagctgggccaggtacattggctcacacctataatcccagcactttgggaggccgaggcaggcggatcacctgaggtcaggagttcaagaccatcctgggcaacaccgtgaaacctcgtttctatgaaaaatacaaaaattagctaggggtggtggcacacacctgtaatcccagctactcgggaggctgaggcaagagaatcgcttgaacctgaaagacggaggttg

SEQ ID NO: 41168 - DNA, 361 bp, Homo sapiens
ggggctccaatttccgtcaaaacataaactaatctacataaacaaaaaaaaaaatcgctaaaatagcaagtatttctatgaataattcaccgtaaacactaaatcagtagtatcaggatgctaatttttagtgtcatatttgcgttaataaataggcacagtcttcaatcacaagtttcttctacatgtaaactaagagttaagaaagaaaaatagttaaggaaagacaagttaaaggaaacaatcagagaacaaaccagaaaaaggtaaaatatattttatttgggaacaaatagagctatctcatattacaaatagtccctattttacattacaaacaaaaattaattccagatggatt

SEQ ID NO: 41169 - DNA, 320 bp, Homo sapiens
ggtgaaaaagcttcttatgagggcatttttaaagtttatgtaactagcatattttagcattcagtagaagaaaatactctcaccttgctggaattatttctacagaaaaggaaaagattatgttaaccctgggtcattaagagcttcctagtacttagtaatgagtgggcttcatttccataacacaacattttggacaggaatatggcaagtatgtaatcctttttgcccttaatagcctaaacccagatctaccatggatttgttgtaattcaagatttgtgtgtatcttttaaagaggaaataatattttggaggga

SEQ ID NO: 41170 - DNA, 1887 bp, Homo sapiens
agtagagacagggtttcaccatgttgaccaggttggtcttgaacccctgagctcaagtaatcctcccacctcatcttcctaagtagctgggaccacagacacacagacatgcaccactaacccagttcatgatagacccttggactttactgttatggaaaatgtatataaagaaatatcagtgtgtcaaagccttatgtctgtcacaagctggtgaaagaaaaataaaaattactaagccaaagagaaaagtcaagctgggaactgtgtcagacaaacttgcctcccgttttattcctaaacaagatagctacaaggatttttaaaaagttagaggctgggtgcagttgatcacctgaggtcgggagttcgagaccagcctgaccgacatggagatacccggtctttactaaaaatacaaaattagccaggcgtggtggtgcctgcctataatcccagctactcaagaggctgaggcaggagaatcgcttgaacccaagaggcgaaggttgcagtgagccgagattgggccactgcactccagcttgggcaagagcaaaactgtctcaaaaaaaaaaaaaaaaaaaaaaaaaaaagctacaatactcccctcacaaactggaagcctcaagctcttcaccctaaaatagttctgttgaattttaccctggcaatgtaaactgatagcttatctgcacaggtgtgggacagaacccgtccctctgtacacctgagtcaaatgcctatctgactgcttcccctgccctatttatgtaaaaattcagagtcaatgagccagattaaggcataagtgactattcctctactccctctcatatataaattgtgtattcagtgaaaggctgatgagtcactcaaagaatgtgataatttattatctacctgtgacccggaagccccccaattccagtttttccacctttccagaccgaattaatgtacatcttatatgtattgattgatgtctcatgtctctgtaaaatatgtaaaaccaaactgcagcctgaaaaccttgggcacctgtggtcgggaccgcctgaggctgtgtcacaggtgcatttttaaccttggcaaaggagatttctaaattgattgagacctgttagatacttttggttcacaagctcatgaacacagaaaaaaaagaataggaaaaaaactagcacaaaatcagttccaaaatgatcgagatgccgccattgcactccagcctgggcaacaagagagaaactccatctcaaaaaacagtaaaagaaaagaaaagaactaagtgtaatggaaagcacgaaatcagttccaaaatctgaactccttcatatttattcaacatagggaaatgctcttcaactttgtgtgcttagattccatttatgaatgatatatttctaatatttgattaaaataaaaacccatgctatgtaattttagccaatttaaagctgcaaataataaatgatcaattatatacatacgtgaaacttcctaatatttcacttagtattgctattgctatgttcttgaggcagacgctcagtctgtcagatagatacattaccagagcttggtgtcttccatatttctgcttaggactctgtggaccatgagtgtataaacttaagcaggaacctaggagagctagagcgtgggggcggtgcctggaacaagactggggcggggcaagagggaggaggccgcctgggggccaggccatacaatgggaaagggcagaaccagagggttatcgtcatcttgggggcggggtctggagggggtgttgttctgaagggtgggggccggcaagggtcgggttcgggctctctcctcagctgggccccagatgtcgcctgctgtcatcctcttgcccgc

SEQ ID NO: 41171 - DNA, 618 bp, Homo sapiens
ctggagacagattcattccagtttgtttcataacttaggtggcagaatggcacttttccctggccacttctttccttcttccccttctaggaggaaatcttaggtaggagagggaaagggactaaggctgtctgtacacaatgagctacgttttgggaagaggagcttagtgttttaacaaaagaaaggtttgtctgtgttgtagagatatgacttggtccactgcctatgtttgtaaataaagttttattgggacatagccacactcatttatttatgtattgtctgttttcacactacaaaggcagagttgggtagttgtgacagagaccacgtaatctgcaaagcctaaaattgttttactatctagccctttacagaacatatttgtcaaccccctcttgcagaggtttcttctgagctgcttgaaggaaaccttgacggaatcagtggacaggaaggacagtgggaggtgaacagtgtggtgaaatgcctgcgggttcctgtggagtccacagaaaggaaaccacagagaggcgagattccatattgcccatttcagttgggttcagtatggattttgagaaattattctatttaaaataaataaatatttta

SEQ ID NO: 41172 - DNA, 201 bp, Homo sapiens
cttgaatttatcaaactgagtacatggtcatccagagagataaagatcattccagccccaaccctagtccccttgtttttaacatcaagtctggccatagaaagggtgaaggaatgaaatagaagaagaggtggcttcctagcttccttctttccccacacacccacatctaacgttctcttcacccaccgctattctctc

SEQ ID NO: 41173 - DNA, 375 bp, Homo sapiens
agcgtggctgtaatccttggactttagggggccatggcgggtggatcacttgagctcaggaattcgagaccagcctgggcaacatggcaaaaccctggctctacaaaaattagccagatgtgatggtgcgtgcctgtagtcccagttacctgggaggctgagatggaaggaccccctgagctcgggaggttgtggatgcagtgagctgagatcgagctactgcactctagcctgtgtgacagagtgataccctgtctcaaaaaatatatatatattttgtcaccaaggtaaatgtgtctgtaattttaaaattagattctttattttataatttaaaaaatagtataagtatatacttttattattgctcttata

SEQ ID NO: 41174 - DNA, 329 bp, Homo sapiens
tcttaatagagatggggttttgtcatgttgctcaggctggtcttgaaaccctgggctcgagtgatctcgccttggcatcccaaagtgtcagccactgtgctcggccatatatattaaagttattctgaaatatttattttaaaacaattttgctagtttacttagagcatcccaattcctttaatgttattttaacatgtatttgcacaagactatctaaaggaaccaccactgaaaaaaagtatatgcaagattccattgagcttctatgaatagttactaaaaagtatatttctgcctgaacaagaggggtacagactacaatttgc

SEQ ID NO: 41175 - DNA, 511 bp, Homo sapiens
tctggtgtgataggcacaagagtaacaaagatgactaagatgcagtctgccctttaagggatggtcagagactgatatgtgtttaccaaaatcgtttactcttctgcctgggtccatagtacatttccagtctcccttgcaggtcagtgtggcatgtgactgaagtctggtcaatggcatgtggacataaatagtatgtgatttccagtcctcacccataagaaacaatcctcatgcaatcctctagtagcttttctttttctgtccgttgcctggaaactaaggactccaaggtcttaggggatagcaaagccataatataaaaggagtttgggttcctgaataattgagtagaaggccaacagctgaacacgtgaatggacttgacatgaacgagaaataagcctgaactatgtttagttactgagatgttttactttatctcttacagcagctactgctgtcttaaggttatattcttcagtcaatagcatacgatgattcttagcac

SEQ ID NO: 41176 - DNA, 390 bp, Homo sapiens
gcgacagtggttaaaattgtgggtgctggagtcaagagagcacccgatgcaaaccctggccctgctgcttagtagccacaagaccttgacgagttcacctctctaggcctcagttgcctcatctctaaactggggataataaccgagcctgctgcgggcattcattgtgagaatcaagtgagacaatgaccacagcataccgagcacggcacctggcacacagtaagggcctcctaactggaagccattgtcatcactggcgcatcctggagatagcatcacaagtgccagttcttgcactgtgtcaccaagaggcctggtgcgcagcgggagactcagggaggaaggtatttttcagttccttcctggaaggcaattacaaacccagga

SEQ ID NO: 41177 - DNA, 978 bp, Homo sapiens
ttttctttctttttctttttaattttgagacggagttttgctcttattgcccaggcggaggttgcagtgagctgagatttgcgccactgcactccagcccgggaaaaaagaaaaaaaaagaaaatgcagttttgaaataacaatgatagtaataataataatcataaataacatattgagtgcctactgtgtgcagaccccgtgctggctgctagacactggaggagaggcattctttacatgagaggtatttgattttctccctcatcactgggtagggagagccttcttgtgcccgtttacagatgggaaacttgaggtccagagaagtgcagtgacttgccctgggtcacattactttttttttcttttttttatttttatatactttaagttctggggtaacacgttcatgtgcagaatgtgcaggtttgttacataggtatatacatgccatggtggtttgctgcacccatcaacccatgatctacattaggtatttttcctaatgctatccctcccctagccccctacaccacatactcttaatggtgaaaaccacagttacttttgcaccaacctgatattatgaggaagaactgggattacaccccaagtttgatgccaggactatagccaaagcccttgaccttctacccccaggagcccccaccctaagcaacgccctgtgctgagcactgagagtaggcagagggcaaggagcaccaggccctgaattcaaagggctcccggtccatgtgggacccatggaagaagcatatagtgctttgcgcttgttttttgcaatccatcagatccaacttttatttttattattatttttttaagagccacctcttaaaagatctcgctctgtctctcactgcagccttgagctcatgggctcaagcaatcctcccaccttagcctcctaagtccctgggactacatgtgtgtgccactgctaattaaaaaaaa

SEQ ID NO: 41178 - DNA, 433 bp, Homo sapiens
gccaggaaccccccagggctaagccccaatttgggggcttgcttatcctgtatcacaatctattctagacagattgtagatgtaaatagtaaagatgtttttagaaaagttttctcttttgttttcaattgagttagtttctgctctcatatggtttttctgtttgttttttggtggtttttgttttgttttgttttgttttgtttttgagacagggtcttgctctgttgcccaggctggagtgcgatggcacgatctcagctcactgcaactgccgcctcctgggttccagtgattctcctgcctcagccacctgagtagctggggttataggagtgtgccatcgtgcccaactaacttggggtttttttttgtttttgtttaagacagagtctcactctgttgcccaggctggagtgcagtggcacaatct

SEQ ID NO: 41179 - DNA, 278 bp, Homo sapiens
tggaaggctcaaaatagaaaaattattaatcatccctaaattgatatgcaggtttaatgcaattcctatcaaaatcccagcaagactatttgtagagcgagaagataattctaaaatttgtgtggaaaggcaaaagaactagaagaatatttaaacaaagtaaaagcaattactctacctaattttatgacttattacatagtctgacatagtaatcaagaccatgtggtaatggtgggagacagaaacactgatcaatggaacagaacagaggaccc

SEQ ID NO: 41180 - DNA, 878 bp, Homo sapiens
ttgtctatgcatatgatacctgtataagttttacaaaatgagaactaatacaatatttattgcctgcaatttgctttgtttttatttatattttcagtaaatggttattcagcgtctgcttacacatctatctatagagaacaagagctacataattgcaaaaatagtcctttccgttgtcattgtttacgctcattgtagttgattttagaatgtcttctccatttgttttaaatcttcctcactctatttgcatccatttgtcctatttctgtcccctggaacaacacagataaatctaatccctttaccacataacagactttaaacatgaaaagtaagccctcacttctctctgactgtcttcttcttctagttaaacaatgtcagggtttttttaatccatcttctcattcatcattacttctggatcattggccatcctaatagcagcacctgccagctctttggcctctcttacccctcgagacctccctcagttccatccctcacctcttttggtgcaaacacatttctccccaacttctactgaagtttttattctgttttcatttctctcctcagctacactagcatttcctctaagaactgaaacaagacaaggatgcccactcttaacattcttattcaacacagtaatggaagtcctagcccaagcaactaggcaagacaaagaaataaaggacatccaaattggaaaggaggaagtcaaattgttcctgtttgcagatgacatgattttatatacagaaaaatctaatgactctaccaaaaaactcagagctaataacaaattctgtaaagttgcagaatacgatatcaatatacaaaaatcagtagtatttctatacatgaac

SEQ ID NO: 41181 - DNA, 530 bp, Homo sapiens
ttgtctatgcatatgatacctgtataagttttacaaaatgagaactaatacaatatttattgcctgcaatttgctttgtttttatttatattttcagtaaatggttattcagcgtctgcttacacatctatctatagagaacaagagctacataattgcaaaaatagtcctttccgttgtcattgtttacgctcattgtagttgattttagaatgtcttctccatttgttttaaatcttcctcactctatttgcatccatttgtcctatttctgtcccctggaacaacacagataaatctaatccctttaccacataacagactttaaacatgaaaagtaagccctcacttctctctgactgtcttcttcttctagttaaacaatgtcagggtttttttaatccatcttctcattcatcattacttctggatcattaacacactaccatacatcgcaacacttaaaacacatactggcctatcctctaacatcagcaagcgggcgccacctacaaaacacaacctctcac

SEQ ID NO: 41182 - DNA, 222 bp, Homo sapiens
atcaataatatcttacatgtttaaagtaaaatacacaacaataaaaaccatataaacaaggaggggaatgattaaagtcaaaacaatatacaatcttgtattgtccaggaggagggtaaagatgccaattaaagttaaataaacatgcaaaaatttctcagaaactgttgatttgtatgggcatagtttgttttattgcacttcaaagatactgctttaaaa

SEQ ID NO: 41183 - DNA, 404 bp, Homo sapiens
cggtcatcctgtgctcggtggtgcacttagccacaggccctgtgcagagaggcgggagggagcacatagttgtcaaatagacatacccagaaacttaatatagagtgaccttactgcttattaggagccctacatagaataagtaatgtaaagggggggtgtgctttttaatttttatattttttacttgttgtattcaagaacgtatgtgaatttgtatagtagaattatatcacatgcatttaactatacaagaatgcagcttcatacccaattgactaaaagagttaaaaaaaaggcagacaatacgcaaaagtaccactagatttccaaattttaaaggctgtatgatacatttgctatttatgcttagtttagaactagtatgtccagaaattttgctg

SEQ ID NO: 41184 - DNA, 244 bp, Homo sapiens
ggcacgagaaaaagtatggttttcatttcatgaatggcgagtctgaagttcagagaggcttaccacatgtctaagaccacataccttccatcagttcttctatgctcccttttcacattctcagatctctgaaatcaggatgctttttacaattggcagtgtcttacaatcaagtggaagtatttttctgtttttagtggtatataaaataatgtatcttatattagcttagattcaatgaaat

SEQ ID NO: 41185 - DNA, 477 bp, Homo sapiens
gtacctcagaatatgactatatttgatgataggggcttgagagaggtgatgaagttaatcatgtctttgatcttggatttccagcctgcagaactgtgagaaaataaatttctgttatttaagccagctagtctgtggtattttgttatgtcaggcctagcaaactaatagatgccccaaagtgacaattctggaaacattagactggtcaatttacagcggattaaagtgtacaccaagtgtcagtttaataatttacattgggattacattgggattatttactgggattccaggcgtgagccactgcacttggcccaaaatttataggctggatgttctaaaactgttatgttgctactctttctgaaaaatatatctgtttagtggtagaaggctaaaatttctttgctgtttaacttgaagctaatttgttctctttcaagacacattttattaaaggaaagtgaagagaag

SEQ ID NO: 41186 - DNA, 328 bp, Homo sapiens
acaaattgcagcccatttcatttgttcttcacaagctggaacttttcttgtaagctaaatattaaatggttcaagtaaattggatacataagcctgaaactaggcgtttctcattatacatagagtataaattaagacagactttttcatggtgaaaggtttacagcctttaaaacatctgggaagaagtgggaaagtagggaataactctgttaaatatgataaaagacaaagcaccaacaaaggcctagttctaaacttgttataatttctcatgggagttgtggtttgtcacaaggttatggcggtccaagcaagtttacaatat

SEQ ID NO: 41187 - DNA, 1047 bp, Homo sapiens
gcatgacttcattggcgtcagcaacgttttgctgttcgggtttagccgccatgtttaagttggccgggtttcgcaccactgaggtcatggatactcaggcctctttgcgtgtttcttcaacactgcttctaaggttaaccgcgttacatttgttggagaaaatcctgggaacgctgaaaaggactagtgggtggggtgcgagggtggggtcttgcccgaattaaagatggccgcagtcagctctgccccgcgcaatttcacgtcaacttttggagctgcgggagccggccagttggcctcagcgcctccttacggaattggcgtaaggcaaagaggcgcggctggaagaaccagactgagaaagtgccacagggcgggggccgcatccgcccctcggcttctggttactgacccgacggctttgtgagtgaaagtgaagagacacttcgaggcaggtgtctgtgctccccattcatccctgtttccgtggctatcttgactttcggggtgaaaagtgaggttaggccctgtttccccgacccttccctcgcgccatcacactctagtggcctggcacagccccagaggtcggccgctgtagcccccattgcggactcgccacattcatattggctcaccttgtcggtgcccggttcggtcctcttggagctcacactccagttgaggaaatgaatggacacaggaactactgggtaacaaaatactaataaagggctgcgattgtgtgagtttctactgtagcgatgaatgtcgctgtcattggaacgttccccaagtgccttctagtgaaagccttacttcactcggaataacctgtggtcttttcttgaacgtgatggctctcttggttgtattcttcatgcacatgtgttacttttcctgtttaactacatgttaaagaaatgtgtatgttcctgtttaactgcatgttttaaaaaagtatgtgtatttttaagttataggcacgtgcaagaaagttcagagcaaaatagcttatattagtgaaacaataaatgtctactaata

SEQ ID NO: 41188 - DNA, 1102 bp, Homo sapiens
gcatgacttcattggcgtcagcaacgttttgctgttcgggtttagccgccatgtttaagttggccgggtttcgcaccactgaggtcatggatactcaggcctctttgcgtgtttcttcaacactgcttctaaggttaaccgcgttacatttgttggagaaaatcctgggaacgctgaaaaggactagtgggtggggtgcgagggtggggtcttgcccgaattaaagatggccgcagtcagctctgccccgcgcaatttcacgtcaacttttggagctgcgggagccggccagttggcctcagcgcctccttacggaattggcgtaaggcaaagaggcgcggctggaagaaccagactgagaaagtgccacagggcgggggccgcatccgcccctcggcttctggttactgacccgacggctttgtgagtgaaagtgaagagacacttcgaggcaggtgtctgtgctccccattcatccctgtttccgtggctatcttgactttcggggtgaaaagtgaggttaggccctgtttccccgacccttccctcgcgccatcacactctagtggcctggcacagccccagaggtcggccgctgtagcccccattgcggactcgccacattcatattggctcaccttgtcggtgcccggttcggtcctcttggagctcacactccagttgaggaaatgaatggacacaggaactactgggtaacaaaatactaataaagggctgcgattgtgtgagtttctactgtagcgatgaatgtcgctgtcattggaacgttccccaagtgccttctagtgaaagccttacttcactcggaataacctgtggtcttttcttgaacgtgatggctctcttggttgtattcttcatgcacatgtgttacttttcctgtttaactacatgttaaagaaatgtgtatgttcctgtttaactgcatgttttaaaaaagtatgtgtatttttaagttataggcacgtgcaagaaagttcagagcaaaatagcttatattagtgaaacaataaatgtctactaataggagaatggatgaataagtgtcattgttgaacaaattgacatacaacacgaacca

SEQ ID NO: 41189 - DNA, 385 bp, Homo sapiens
tgaagcaagcatgtcactcttttttgagattatctgaagaattttgctgcagtagccagagggaaaccgggtaaaattttccctatagggaacatgggttaaaagtctcacaagcctcatctgctggtgtttcttggaatgcagagtttggcgtggctttctcagcttcctaagtgcatgttcatccttctagaaagctctttctcctcttggttccctgaaatggtgctctagacccactttccctcagggactgagcctctaacttaattttcctcagtccctttccctacagggagagacacaggtcacattaagaattcatactggccaggctcggtggctcacacctgtaatcccagcactttgggaggccagggcgggc

SEQ ID NO: 41190 - DNA, 407 bp, Homo sapiens
gatccctcccagcccactcagcacaatggacatgctctctaccatccagtgactgcaccggcctcttcccctcagcacccacgtctggccatctcccaggaaacccggaccaccacgggcagggaccaccttcctcactgtccacatggaccaccccacacctgacctcagatgcagtcacaatacgtcctgcttcaatattgaaagggggaaaagctggaggaggggaaagatgaaagagaaaaaagcaagaggggagggtcacattcttctgaggctttgattacatctcactgagccccccacgttgcatgaaaaggaggggtggagggagcaattacgcattcgccttgtgctcactaaatctacactttataagcaaataaacagagtagaggaagaagtca

SEQ ID NO: 41191 - DNA, 400 bp, Homo sapiens
tcaacgactaaaccaaaaccaaatcaaaccatgtccagttaactcctatctagaaaaagaaaaaaaaaaatctccccttgaccctgcctgccttttccttttctctcctttccttcactaccagttttctgtatgagaactctgtatcattctctacatttcttcgcctatattccttccctaatctgctttagtatgaataagtctactaaaattactctcacaaaagggcacctaggacttgaggtgccagagcctatgttcttttactactagacattactaggacatttaacactcttcctttctgaagctctcgctttacctgttttttctagtgccacttccccttggttttctcagacttctcttaccactcctgctcagtatccccaccaga

SEQ ID NO: 41192 - DNA, 421 bp, Homo sapiens
aaattggcggccctcaaacaatttagatagggattagtctacagcccgtataatcttctggcatgccacaatgcatgttgttttttgcatatcatctttatttttctctttttgatagttattatatgagataaaaagagaaccatttctcagtgatgttacagacgagtgaagggagtatacagataagtaaacccacaattgtaacacaacatgaaatatgtcagggcacatagatgttgcacatttaggatgtaagcatactattagaagggccagaggagacttgcagatggaaatgattcttaggcagatatctgtagggtgagtagtaatatttaaaataatatatattaccctttgtatgtttctgtaactagcctatgtgttttgcaagcattaactcatttaattttatcac

SEQ ID NO: 41193 - DNA, 154 bp, Homo sapiens
aatcttttttcagaagtcacagtaatgatttatttgggcaaaaatcaccaattggtattaaaaccttaaagtgaaaatttgacaaagaatgataagagatatacataattgcagagaatctcctctcatacttattaatcacaaaaggaaagtt

SEQ ID NO: 41194 - DNA, 365 bp, Homo sapiens
tcagggtcaagatgctgggagctgccagtggcgctagaggaacccatgttttccattgtggattaaaatacccatttgcctgcggctgagcttcccctccgaatccaataggtcaataaggaccaaggacaaagcacaaacagggcctggaagccaagagatgtcgataaaaatggagatgaataggcatttcagtgcgggcaggccgtgggtgtggggcattgtcttttctctggccagcagtgcctggccactttgtctccaaacagtgcttccattttagagatgccagattggtttggacccaaagcttgactgttgcggggtgggctgaggtgggagtggggaggattcacaccagaaaa

SEQ ID NO: 41195 - DNA, 406 bp, Homo sapiens
tttggttgcatctggtttatccatgtcttctgctgtgatttgtgcctcttcttacctgagaaacctttgcctaccccataatcacgaatgttctccctggatgagctcgttgcctcttttgtgttcagctcactgaggtccggtctgaggctggggctttgtgtttggagcctgaggcaagggttgagggccatggtttgtaaggacaccagtggttccagcgccatctctcatttccaccactgacgcccctgatgtcttcagcaaacatcaaaccccagccaggcggctctgcttctggtctctgttctgttccgtttgtctgtctgcccataagctgataccaatcaaccttgatcaccatagctttgtagtaaatcttgaaatacagtcatgaaacttcaac

SEQ ID NO: 41196 - DNA, 291 bp, Homo sapiens
ctgcactctgaactcactgcaacctctgcctcctgagcttaagcgattctcatgccttagcctcccaatagctgggactacaggcatgtaccaccatggccagctaatgtttgtatttttagtagagatgaggtttcaccatgttggccaggctggtctcgaacacctgaccttaaatgatccacctgcctgggcctcccaaagtggtgggattacaggcgtgagccaccgcgcccagcctctatctctttttaatggagagaaggctgagaatggcagcaaggaatgaaa

SEQ ID NO: 41197 - DNA, 528 bp, Homo sapiens
tcgagaaaccccgggggcccgggggtgaccgatgtagaggaaggtctcaggccaagtggggcgttagggtataatacagtggcgacgtaaggagtgcccgcgtaaatgccctcctgcccgccctgtgccgctgctcccacctcagttccctgagcctctccgacaaccccatctccagtgcctgcctcctgagcctgctggagcacaccatggggctgatggagctgaagcaggtactctatcccatcccagttgactgctgcatctacctgcatggcgtctgccggggtcctatgaacgaggacaagctgtgccagttgcaggccgagatacagaagcagctgcaagccatgcagcaggctgacatgcagtggagcccctccactgtctttgcttatgcagctggtgcagtttgaatgaagaacaggagccaggctcagggaacagaagtcagagagggcagctggaatcacagctgaggccacatgttgtttgcaaggaacataaaataaacttccatgggaacta

SEQ ID NO: 41198 - DNA, 339 bp, Homo sapiens
cgtgggataattagttttcttttcttcagaaagcattttgattagcctgcaaagtgagttgtgccttgcgagctgatggctgggttcagagccttcatttggctgaggatgtcggggtgagccctgaggaggaggggatatttgggatgtccctggtggccagttccagggttctgccccaaatattcttttgtgagagagcccccatcccctctcaggtacggttccgtcctgcaggtcagtgagaagctgtcagcaaggtttctttcaggaagcccaacaatcaaaaaagctgctgtttagacagctgatctcttggtctgaaaacaaaaaaaaaaa

SEQ ID NO: 41199 - DNA, 401 bp, Homo sapiens
acatattcacaaagtggcagacttttttaatccaaaaatttaactgcatgaatgtctcatttatagaacattattttacaatgaggttttacacatcaatcagttgagtcacttctttttttttttgagatggagtctcgctctgttgcccaggctggagtgcagtggtgtgacctcagctcactgcaacctccacctcctgggttcaagcgattctcctgcctcagcatcccgagtacaggcactacaggcacgtgagcaagagaagctgacagattcaaatgttcacaaacatttatgttctattttgatagatacataaactatatttctcattcttatatactttatattagggcatgggattaaagtcaaaatagtggaaaattagtagaaataac

SEQ ID NO: 41200 - DNA, 424 bp, Homo sapiens
accctttctatttcaagatttgttcctgaaaaacttttcccctaagtataggaatttgaaaataatgcaaccctttcctttaatttcacttgccctcagagacataactgagaacttcagctctctttgtacaatactgtagacagtataagaaatggactgagtctatcagacccatagttatccccaggaaactgatttctaaagaaatccctttagtagtttacttgctctttatcctaaaagatgagtgcaacaaaaacatggtgctagttggtttccaagtaataccagttttgaagaactactttaaagaaatacattgcagcaaaagcaggcatgtgaagcagtacgtgcactgacaggagtaccctgctggagaagcagctctaaccaacacagcgtcctgattcctaactgcttc

SEQ ID NO: 41201 - DNA, 836 bp, Homo sapiens
catgaagggatcaccatgactttgagagaaaaaagaatcagattaggcctaacattggttgaagaagattaaaatagattcttatattcaagcagaagggaaaaatgaagccaatctagaaaagtaagctaaaaatcctctccttggcttaggatcattgggtcaaactgggagtatatctgtgtgattacaacctgctgctatgagaaaaaagaattgtaacttgaccatgttggctcacacagggcaatgcaaaagaagtcaaaacattcatatcaggtcttggtatctgtgtcaggagaaacgtggtggctttcacagcttcttcacctctgtcctctgtcatgcaactccatttttggctaggtactatttcacatgcacactgtcctgggtgccagaaatacttgtggtgtacttggtttgagcagtacctctagtatgcaccattccagggaacatggttgtcaacataacaagtttagtgtgtgtatttgcagacaacatagccctgaaagcatgaaatgtagaataggtaaggtctgtcttagaaaaggaggaggaagtaccaatttggtgcaagaagatcgtggtgaggaaggacatgggagccacagtgaagtgaaagaggctttaaggaatcagatgcacagatggatgctttgatttacacatttatctagaggagtgattctcaaccttgactgtacataagaatcacctcaggaaatttttaaattcccaattatattaaaatcatttggagtgggaaccagacaccaatatttgcgaaagcctccaaggcggttctaatgtccagccaaagttgattatca

SEQ ID NO: 41202 - DNA, 803 bp, Homo sapiens
aactgcacaaccttgtggacctacttaaaacactgaattgtacaatttaaattggtgaattatgtggcatgtaaattaaatctcagtacagctgctaaacttgagaccatgggggaaaacactggaatttgctggctcagtgacttagcaacccagttacagcctgacatttgcccttagcaccaactcttggttctccatagcacagcacggataagcttctccctgcgagatccccagttgcacggtgaaaatgagcagatcacagatgagaagcctgagagctacagaataggaagggccctcatttaatacagcccttgactgccaactactgtgctgacttaattcactgaaaagaaaggaggacgttctgattctggccagaacggagtaagcccactgctgcctctctcctgccgactgccagcaaaacctatggacaaaacacaaaaacaaacacctgaggactctggggagtcaacccaagctgatggattgcagaggagagtcaaacccatggaagtggctgtacaggggaagagtttcccatgtttttccctttttcctcttgcagccttgccctgagtatgggctccaacatgcagaactgtgtggtggtgcaagaagctagaactccaatagaaactccatctttctgactagaggaacaaaagggggcccctgccgtcctcaaagaataggggtgagggttattgtaggttttttactctttcttgtggctgtgccccaaggacagtccccagtcacatgctgcatggtggcggcgatgccggcaggta

SEQ ID NO: 41203 - DNA, 403 bp, Homo sapiens
ccactgcaggggactggacctgaacccattgccatccttgggctctgggtgggaccccttttgaaagcttccactgaaccagaaagatagcacagtggtaaactgcttacaagggaggcactgcaacaaacatgaacattgctctaaaaattagtgtgcactctgggaggccaaggggagcagatcacctcaggtcgggagtttgagaccagcctgaccaacatggagaaaccccatctctaccaaaaatacaaaattagctgggcgtggtggtgggcacctataatcccagctactcgggaggctgaggcaggagaatcgcttgaacccaggaggcagaggttgctgtgagcggagatcaggccattgcactccagtctgggcagcaagagtgaaactccgc

SEQ ID NO: 41204 - DNA, 672 bp, Homo sapiens
aaaaatgttaacatatttcttaaaagttaagttagctgattcagcttcaaaaaaagttacttaattgaaataagttctttcaataggggaggtgctctgacatagcgatagtatggtttgataatacagtttttctcctctagctgcctcctgttcttgaggtaatgctcagtgattaactagataggactagataatttatttcaccttggcaggtcttgcctccaagttggcctattcctatggtatttccttttctttcttttgcttcttcctgcacactaagtatggtattttctgacagtatttttcttaattctttatttatttttcttggtaatttcttgctgtagagctggtacccattagacataatgactttccttgacttgcttcttgctcataaatttctgtaagacaatcaggaagtttttagaaacaaacagtggaaccaattaggctgttaagtgagacacgcctaaattaagctatgaggaaataaatacagctccagcaaaaatagaaataattttcagattatccatgcttttgtttccctggttttctttgaacctcatttcctcaagctatgaagtgaaatgaagtggtaagtacacctctaagtaggacattcagggtgaatccaaaggaacttgtgaatttgaccaaaaa

SEQ ID NO: 41205 - DNA, 298 bp, Homo sapiens
ctgcagagtaaagggactcactgaagaagaggaacgtgggggtcctcaagagagtgtctcatgccctacaaggtgtggggctgacctttatgggcttcttcaactaaagaggggtatattcatgaagattccaggaaaaggtaaagatttctcaagaccgtggtgccacaatttacacccaaatacaggtgttcctggagccgtcttggcactggtgggtgtacggtttcatatgttactgattgtacagtgagatcctaggtgaaacctacatcaaatacagcgccatgttgcttct

SEQ ID NO: 41206 - DNA, 445 bp, Homo sapiens
ctccagccctctgccttgtttgatatagactgggcaggggccacggtgaccccccgtcccgggtgtggcggccccctctcccacactccccggcaaggagtcaggagagggcagatgagcatcactgagaccaagccttggctctggcggcccttcctcccttcgcagggcctgggaagcatgtgctcagagctgcatttcaggaaagcagctgcagctcgtgacacgctttccacagcgggagatttatggggctgtgcggctttcatggtttctgtggggttcctattctccccctcatttgtcctggccgctgtctccgaggcagatgggtgacaagcctcccctagctggaccggcccaacaggaaggtatggctgtgtaggggaggggagaggctgaccacctcagcctccttcggagggggaagctgctgggagccact

SEQ ID NO: 41207 - DNA, 336 bp, Homo sapiens
gtccctgctcttcaggtccttgtgtgatgtgacccagctgacaccctagccccagatgactgcccctgaattagtctcagcttctccaacctgttcccttatcctctattcttgcatgtgctgataccgtattgagaacgttctttaatgttatttatctcctctggaataattctgactccctcctcaagcatcacctcctccaggaagccctctcggatcctccaggctcagccagtgtctccagtggtcctcacagtctcctgtacttcccaagctcatcatattgtcttcaaattccgtggttacatgttccccactcgcctgagaaacagg

SEQ ID NO: 41208 - DNA, 146 bp, Homo sapiens
gacattacagtacaacactctagactttataaacattgtacacttaagcaacactacatgtatttaaagtttttcttccataataaattaacccttgcttgctgtaacttttctactttataaatgttcaaatttttaaaagcttt

SEQ ID NO: 41209 - DNA, 2045 bp, Homo sapiens
  misc_feature (358)..(358): n is a, c, g, or t
  misc_feature (633)..(633): n is a, c, g, or t
  misc_feature (1058)..(1058): n is a, c, g, or t
  misc_feature (1355)..(1355): n is a, c, g, or t
tttaccttatctcttttaactatttatgaacaatgtacatttttgtgcatagaatggaatggttctaacagctttgatcagtttctaagttcttcatcatgtctgcgtagtgaattctgtagaatgttttttttgttgttgttccttctgcttcagttccctgttgttatagctggaggttagtaaacagagagaagcctcagccaagtggcataaaatatacttttatccacaaaaagaatatatatatctttccctttccaaatccattttattccagaaatttatgcatacaacaggaaataggatttggatagcaagcgatatagcaacacatttatcgaatttattcattcangcgtttggaaaacaggagtctggatagcaaaggttcagatagtgagagggattcctgcacattcacagactgggtttcttttgttaacatatttttattcaaaaatgcatttaccagtctttgctttttgatgaattgaccttgagctgacaatgtgactttcattcatggcatttctgagccctcattcctggccaggacacagaggtaccacatcccactgcaccctgccccaactcacaggagagatggtctgggatgctcttggaattttnctgtgactttcccaaaatctacagtaagttggacaagtccctgtccctctctggcctcagtttcaccatcagtgaaatgaggggatgaaccagattaagggctctctaactacatggctgcacttcagaacccccttccctggggaaacatcccccacccgggtccctggatgaggagggacctcatccaggttctgctgaggaggcctagggacagcatttccacatatttcctgaatgattcctcagcagccatcccagcccaagccactttcctgagcatggaagcctccagaattggtggccagatctaccaaccttgtggctgtgcaattcacctcattcaatcctcatggcagcccaggagacagaccatcttattcccactttgcacatgaagggctgagtttctgagaggtcataantcattcaagttagatcctagtctattggacacctacttactgtctgccagtcactgtgctaggtctaagctacagagatgagcagaggacagccaccagacccttgggagaaagattggcgtaaaatcaaataagagtaataattgacatattgccaagccatcccatctgcctggtgtgtcagataagagtcccagagcaggaaatggttggccgtggtctagcaaggtgagcagggaggagttcactgggcaaatgtgaggagggggcattgtaagaggaaggaggagcacaggngcccagggccagaggcaggagactgacactgtgcctggaattgggaaccagcagctggtgaaagtgcaaaggtagacagaaattagaacacagaaggccttaatgtgtagaactgccctgaagccagtgggaagctactgttgggttttaagcaggaggcatggactgaccaggtttgcatgtgagaattgattctagaagctgggtggagacggaggttgatgctgagacctgaggctggagaccactcccccgttccatccacttctcagcctccgttttctctgtggaaaagtccagatcccgacttatactgtctctgtcttacggattagtgtgagagtcaaatgagatcattattgccaataggctctgtcaatacatagaatttagttgaccattttcattgtcttcacttgtgggttaaataaacactaaaataaaaacatcagggagcctggctgagcagggaataacctcttggaggaaggaaaacattcccctttatatgtcagcaactttgaccctagagggaatcagaacccatgcctttggggggtgttcctgcagacacagagctgttctccccctgggaacctcaccactgctcaaaatgtaatgcaaacatgaactgacttagttatctcaatgttcaaacttgaaaaaaaataaacattatgttccaaaaac

SEQ ID NO: 41210 - DNA, 448 bp, Homo sapiens
aaatccagtgcagggctaccatcctgatagagcggcttggtaccagtgtcccacaccccaatgtaggcattgcccatggggacgagaggggacatagacactccttgggggccttttgtgtaggaaccgtgaccaccagtccagtgtctcagtctgtggtctctcctttaaagtaggaatcttcctaattagctgatcactctcgttcttcctggactccccagtgtctttcagaaatagcttctggtaagttgcagcttgctcatgatgggagggaaggaagaggaagtagaacagtagaggcagaacaattaaaaataaatggtgaagggcctggtgtgtggctcacacctgtaatcccagtactttgggaggctgaggaaggaggattgcttgagctcaggagtttgagaccagcctaggaaacatggtgaaacctgtctctacc

SEQ ID NO: 41211 - DNA, 440 bp, Homo sapiens
taatgaagaggtttagaagtatttgcattggaacagatatggaaatttctggaaatgtttgggcaaggacatttagatttcataagtgtatatgtgtatgtaaaatatattcttcaccatgactgacttttaaaatttacattttacttattggccaggcacggtggctcatacctgtaatcccagcatttggggaggccaaggcgagaggatagcttgaactcaggcgttcaagaccagcctgggtaacatactgagatcccatctctactaaaaattaaaaaattacctgggcatagtggtgcatgcctgtagtcccagctacttgggaagctgagatgggaggatcacttcagaccaggagttggaggctggctgcagtgagctgtatttgtgccattgcactccagcctgggtgacagagcaagaccttgtctggg

SEQ ID NO: 41212 - DNA, 481 bp, Homo sapiens
ccttgaattcttgggactatggtacttaaacctaattacctagaatgaattaagatcactttaatatggctgagactaaaaagtaacaaaaactgttggccacagacttccaaatatgctcattgtatatctggaagcatttcaaacaccagacctttgtatacaatagcacacaagttgtaattcagaaaattcagtcagtggactaacttgaagttaggcagaatgaagctggaaagtgggtttgtgctaaattttaaaagaagtggttcaacatggacagacagaggggaacaacacactctggggcctttcagagggtggagggtgggaggaaggagaggatcgggtagaataactaatgggttccttgcttagtacctgggtgatgaaataatctgtacaacaacccccatgacgcaagtttacctatgtagcaaacctgcatttgtacccgtgaacttaaatgttaaaaaaaaga

SEQ ID NO: 41213 - DNA, 165 bp, Homo sapiens
ctggtctgataagtgctggatccaaagtttctattcggtttgtggccatgataactttcacatctcccctagaatcaaatccatccaactggttcagcagttccaacattgttcgctgaatttctctctcaccaccagaattggagtcttatctttttgtcccaa

SEQ ID NO: 41214 - DNA, 738 bp, Homo sapiens
tagaggatcccctgagccgagattgcgcgctacactccatcctgggggatagagcgagactgtgtctccgaacaaaaaaaaaagatgttactttatatgctagacttttccaatagtatacctttaggatcatactaaattgttggtagcttatttgttaaaggtggaatgttaggttaaaatgtattaatctgaggccaggcacagtggcttacacctgcctcagtctcccaaagtgctgggattacaggcatgagccactgtgcctggcctcttctatgcttaagagcttttccaatctcaaaacagttgaccttagggagtgcatatccgagaatgcagtgatcactggcttattcctgacgaacaggtagtattttgcccaattttttatattaattacctcctaacttcagaagggtggtagtatccccattacaaaaatggagaggctgggcgtggtggctcacgcctgtaatcccagcactttgggaggctgaggtgggtggaccatctgagatcaggagttcgagaccagcctggccaacatggtgaaaccccatctctactaaaaatataaaaattagccgggcgtggtggcaggcacctgtaatcccagctactcgagaggctgaggcgtgagaatcacttgaacccaggaggcagaggttgcagtgagccgagattgcgctgctacactccatcctgggggatagagcgagactgtgtctccgaaca

SEQ ID NO: 41215 - DNA, 328 bp, Homo sapiens
gaaaaactattgaaatacaaataaagtctacagttaagggaaaaaaaaatcagattctatgatcttcctaggcaaacctgatgataaatttacttatttccataagcttttttgacccccaggggaattaacagatatagtcagtaatttttattaaatatttaacattcacatttaatacactagcctatgtatgttataaagcaaaatgtatttccacgttaacattccagcccagttgagtcctcctttctaagtacttttggaagaataacaagttatctttcaattatttacaacggagggaagggttcatattatatatttc

SEQ ID NO: 41216 - DNA, 274 bp, Homo sapiens
tatatttaacctgaaaataatctttggtgtatacgttgatgagcctaggcctttgcagacctcttacagttactctgtcacagcccttcaaaggttctttgacttcagattaagaatcaattgcatgtggaatgcatgtgcaaaggaagagatattcaaggcaattgttaccatgtaccataaaccttgtacataattttttgtcattttcttttcctctgtctctatcccttcttctttgacacacaatagacacctagtcaatttattacaa

SEQ ID NO: 41217 - DNA, 154 bp, Homo sapiens
acacacaggaacccataacaatcctcaatccggagcaataggacttctgcaacacttttcccccaaattcaaatctcctttgaagagcctaaagcttaaaggcataagcttaaccctgggctatgtgggaagaggcagtctgagaaaaacttca

SEQ ID NO: 41218 - DNA, 547 bp, Homo sapiens
taactccctggggactgaggtgggcagacagacctcagtgaccctttccaataatcttttaagaatattgctttactgagatatgattcacatacaaaccaagggtattgctacagcatttacgtgaacaaaaagcgatatgtttgtgatttcaaaaagatatataaagatgccctcccctttgtggcttatgtaagacctgaaacacaaactttagcaacaaaatgttgcgtagatataggagttatatacagtgtcagtgaagagagacctggacctcaacagaaggtaggttgggatttacaagggacaaaacacggttaccactaatagttttttcaaatactcgactttctatcacccaactttcaacatttcatgtttttttgatgcatgaaatactatcttctctttccagggaaggcttcctatctgtgtggtgatgaatcgcatttcctgagaacaaaataaaaggatttttctgtaactgtcacctgaaataatacattgcagcaagcaataaacacaacattttgtaaagttattt

SEQ ID NO: 41219 - DNA, 2010 bp, Homo sapiens
gttacttttttactgataatgtgaaagaatgatataaaaacttgattttcctcaacaacattactttcttttgtaaatgtggtttctacaaagatgaaactactaaaacttacaggttttatttttttcttgttttttttgactgaatccctaaccctgcccacacaacctcgggatatagagaacttcaatagtactcaaaaatttatagaagataatattgaatacatcaccatcattgcatttgctcagtatgttcaggaagcaacctttgaagaaatggaaaagctggtgaaagacatggtagaatacaaagacagatgtatggctgacaagacgctcccagagtgttcaaaattacctaataatgttttacaggaaaaaatatgtgctatggaggggctgccacaaaagcataatttctcacactgctgcagtaaggttgatgctcaaagaagactctgtttcttctataacaagaaatctgatgtgggatttctgcctcctttccctaccctggatcccgaagagaaatgccaggcttatgaaagtaacagagaatcccttttaaatcactttttatatgaagttgccagaaggaacccatttgtcttcgcccctacacttctaactgttgctgttcattttgaggaggtggccaaatcatgttgtgaagaacaaaacaaagtcaactgccttcaaacaagggcaatacctgtcacacaatatttaaaagcattttcttcttatcaaaaacatgtctgtggggcacttttgaaatttggaaccaaagttgtacactttatatatattgcgatactcagtcaaaaattccccaagattgaatttaaggagcttatttctcttgtagaagatgtttcttccaactatgatggatgctgtgaaggggatgttgtgcagtgcatccgtgacacgagcaaggttatgaaccatatttgttcaaaacaagattctatctccagcaaaatcaaagagtgctgtgaaaagaaaataccagagcgcggccagtgcataattaactcaaacaaagatgatagaccaaaggatttatctctaagagaaggaaaatttactgacagtttacttttgaatactcaaggagacatccagacctgtctataccagagcttttaagaattgttcaaatatacaaagatctcctgagaaattgctgcaacacagaaaaccctccaggttgttaccgttacgcggaagacaaattcaatgagacaactgagaaaagcctcaagatggtacaacaagaatgtaaacatttccagaatttggggaaggatggtttgaaataccattacctcatcaggctcacgaagatagctccccaactctccactgaagaactggtgtctcttggcgagaaaatggtgacagctttcactacttgctgtacgctaagtgaagagtttgcctgtgttgataatttggcagatttagtttttggagagttatgtggagtaaatgaaaatcgaactatcaaccctgctgtggaccactgctgtaaaacaaactttgccttcagaaggccctgctttgagagtttgaaagctgataaaacatatgtgcctccacctttctctcaagatttatttacctttcacgcagacatgtgtcaatctcagaatgaggagcttcagaggaagacagacaggtttcttgtcaacttagtgaagctgaagcatgaactcacagatgaagagctgcagtctttgtttacaaatttcgcaaatgtagtggataagtgctgcaaagcagagagtcctgaagtctgctttaatgaagagagtccaaaaattggcaactgaagccagctgctggagatatgtaaagaaaaaagcaccaaagggaaggcttcctatctgtgtggtgatgaatcgcatttcctgagaacaaaataaaaggatttttctgtaactgtcacctgaaataatacattgcagcaagcaataaacacaacattttgtaaagttattt

SEQ ID NO: 41220 - DNA, 1900 bp, Homo sapiens
gttacttttttactgataatgtgaaagaatgatataaaaacttgattttcctcaacaacattactttcttttgtaaatgtggtttctacaaagatgaaactactaaaacttacaggttttatttttttcttgttttttttgactgaatccctaaccctgcccacacaacctcgggatatagagaacttcaatagtactcaaaaatttatagaagataatattgaatacatcaccatcattgcatttgctcagtatgttcaggaagcaacctttgaagaaatggaaaagctggtgaaagacatggtagaatacaaagacagatgtatggctgacaagacgctcccagagtgttcaaaattacctaataatgttttacaggaaaaaatatgtgctatggaggggctgccacaaaagcataatttctcacactgctgcagtaaggttgatgctcaaagaagactctgtttcttctataacaagaaatctgatgtgggatttctgcctcctttccctaccctggatcccgaagagaaatgccaggcttatgaaagtaacagagaatcccttttaaatcactttttatatgaagttgccagaaggaacccatttgtcttcgcccctacacttctaactgttgctgttcattttgaggaggtggccaaatcatgttgtgaagaacaaaacaaagtcaactgccttcaaacaagggcaatacctgtcacacaatatttaaaagcattttcttcttatcaaaaacatgtctgtggggcacttttgaaatttggaaccaaagttgtacactttatatatattgcgatactcagtcaaaaattccccaagattgaatttaaggagcttatttctcttgtagaagatgtttcttccaactatgatggatgctgtgaaggggatgttgtgcagtgcatccgtgacacgagcaaggttatgaaccatatttgttcaaaacaagattctatctccagcaaaatcaaagagtgctgtgaaaagaaaataccagagcgcggccagtgcataattaactcaaacaaagatgatagaccaaaggatttatctctaagagaaggaaaatttactgacagtttacttttgaatactcaaggagacatccagacctgtctataccagagcttttaagaattgttcaaatatacaaagatctcctgagaaattgctgcaacacagaaaaccctccaggttgttaccgttacgcggaagacaaattcaatgagacaactgagaaaagcctcaagatgttacctcatcaggctcacgaagatagctccccaactctccactgaagaactggtgtctcttggcgagaaaatggtgacagctttcactacttgctgtacgctaagtgaagagtttgcctgtgttgataatttggcagatttagtttttggagagttatgtggagtaaatgaaaatcgaactatcaaccctgctgtggaccactgctgtaaaacaaactttgccttcagaaggccctgctttgagagtttgaaagctgatatgtgtcaatctcagaatgaggagcttcagaggaagacagacaggtttcttgtcaacttagtgaagctgaagcatgaactcacagatgaagagctgcagtctttgtttacaaatttcgcaaatgtagtggataagtgctgcaaagcagagagtcctgaagtctgctttaatgaagagagtccaaaaattggcaactgaagccagctgctggagatatgtaaagaaaaaagcaccaaagggaaggcttcctatctgtgtggtgatgaatcgcatttcctgagaacaaaataaaaggatttttctgtaactgtcacctgaaataatacattgcagcaagcaataaacacaacattttgtaaagttattt

SEQ ID NO: 41221 - DNA, 2231 bp, Homo sapiens
gttacttttttactgataatgtgaaagaatgatataaaaacttgattttcctcaacaacattactttcttttgtaaatgtggtttctacaaagatgaaactactaaaacttacaggttttatttttttcttgttttttttgactgaatccctaaccctgcccacacaacctcgggatatagagaacttcaatagtactcaaaaatttatagaagataatattgaatacatcaccatcattgcatttgctcagtatgttcaggaagcaacctttgaagaaatggaaaagctggtgaaagacatggtagaatacaaagacagatgtatggctgacaagacgctcccagagtgttcaaaattacctaataatgttttacaggaaaaaatatgtgctatggaggggctgccacaaaagcataatttctcacactgctgcagtaaggttgatgctcaaagaagactctgtttcttctataacaagaaatctgatgtgggatttctgcctcctttccctaccctggatcccgaagagaaatgccaggcttatgaaagtaacagagaatcccttttaaatcactttttatatgaagttgccagaaggaacccatttgtcttcgcccctacacttctaactgttgctgttcattttgaggaggtggccaaatcatgttgtgaagaacaaaacaaagtcaactgccttcaaacaagggcaatacctgtcacacaatatttaaaagcattttcttcttatcaaaaacatgtctgtggggcacttttgaaatttggaaccaaagttgtacactttatatatattgcgatactcagtcaaaaattccccaagattgaatttaaggagcttatttctcttgtagaagatgtttcttccaactatgatggatgctgtgaaggggatgttgtgcagtgcatccgtgacacgagcaaggttatgaaccatatttgttcaaaacaagattctatctccagcaaaatcaaagagtgctgtgaaaagaaaataccagagcgcggccagtgcataattaactcaaacaaagatgatagaccaaaggatttatctctaagagaaggaaaatttactgacagtgaaaatgtgtgtcaagaacgagatgctgacccagacaccttctttgcgaagtttacttttgaatactcaaggagacatccagacctgtctataccagagcttttaagaattgttcaaatatacaaagatctcctgagaaattgctgcaacacagaaaaccctccaggttgttaccgttacgcggaagacaaattcaatgagacaactgagaaaagcctcaagatggtacaacaagaatgtaaacatttccagaatttggggaaggatggtttgaaataccattacctcatcaggctcacgaagatagctccccaactctccactgaagaactggtgtctcttggcgagaaaatggtgacagctttcactacttgctgtacgctaagtgaagagtttgcctgtgttgataatttggcagatttagtttttggagagttatgtggagtaaatgaaaatcgaactatcaaccctgctgtggaccactgctgtaaaacaaactttgccttcagaaggccctgctttgagagtttgaaagctgataaaacatatgtgcctccacctttctctcaagatttatttacctttcacgcagacatgtgtcaatctcagaatgaggagcttcagaggaagacagacaggtttcttgtcaacttagtgaagctgaagcatgaactcacagatgaagagctgcagtctttgtttacaaatttcgcaaatgtagtggataagtgctgcaaagcagagagtcctgaagtctgctttaatgaagagagtccaaaaattggcaactgaagccagctgctggagatatgtaaagaaaaaagcaccaaaggcttatctgatctccttgccttttctccctcatgcttctttgtctatttctggttcatcctacatgaacaagaaatgcacatgtagctaacagaccccgatattgttcctgtgtttttctgggtatcagccactccttatggggtggcaatgctgcatttgtgcttgcccttctcttgctgttcaatcagttttctagataaccaagaggcgcttaagtcctctgccttcctactcatgtattcagctgtctggaccacaaaggagggatgatggaacctctgaatgttgacagaaag

SEQ ID NO: 41222 - DNA, 1097 bp, Homo sapiens
aagagaacttttgtaaaatgatctatagccaaaatgtcctcttaaattactctgtgaccaagacagaggagaaaattagcttttgaaagcagagtcagtattagatctgactggattacaaaatagtggaattgggttttttgctctttctctaatttctaatatacaaaattttacacattgcaggtttacttttgaatactcaaggagacatccagacctgtctataccagagcttttaagaattgttcaaatatacaaagatctcctgagaaattgctgcaacacagaaaaccctccaggttgttaccgttacgcggaagacaaattcaatgagacaactgagaaaagcctcaagatggtacaacaagaatgtaaacatttccagaatttggggaaggatggtttgaaataccattacctcatcaggctcacgaagatagctccccaactctccactgaagaactggtgtctcttggcgagaaaatggtgacagctttcactacttgctgtacgctaagtgaagagtttgcctgtgttgataatttggcagatttagtttttggagagttatgtggagtaaatgaaaatcgaactatcaaccctgctgtggaccactgctgtaaaacaaactttgccttcagaaggccctgctttgagagtttgaaagctgataaaacatatgtgcctccacctttctctcaagatttatttacctttcacgcagacatgtgtcaatctcagaatgaggagcttcagaggaagacagacaggtttcttgtcaacttagtgaagctgaagcatgaactcacagatgaagagctgcagtctttgtttacaaatttcgcaaatgtagtggataagtgctgcaaagcagagagtcctgaagtctgctttaatgaagagagtccaaaaattggcaactgaagccagctgctggagatatgtaaagaaaaaagcaccaaagggaaggcttcctatctgtgtggtgatgaatcgcatttcctgagaacaaaataaaaggatttttctgtaactgtcacctgaaataatacattgcagcaagcaataaacacaacattttgtaaagttattt

SEQ ID NO: 41223 - DNA, 2062 bp, Homo sapiens
gttacttttttactgataatgtgaaagaatgatataaaaacttgattttcctcaacaacattactttcttttgtaaatgtggtttctacaaagatgaaactactaaaacttacaggttttatttttttcttgttttttttgactgaatccctaaccctgcccacacaacctcgggatatagagaacttcaatagtactcaaaaatttatagaagataatattgaatacatcaccatcattgcatttgctcagtatgttcaggaagcaacctttgaagaaatggaaaagctggtgaaagacatggtagaatacaaagacagatgtatggctgacaagacgctcccagagtgttcaaaattacctaataatgttttacaggaaaaaatatgtgctatggaggggctgccacaaaagcataatttctcacactgctgcagtaaggttgatgctcaaagaagactctgtttcttctataacaagaaatctgatgtgggatttctgcctcctttccctaccctggatcccgaagagaaatgccaggcttatgaaagtaacagagaatcccttttaaatcactttttatatgaagttgccagaaggaacccatttgtcttcgcccctacacttctaactgttgctgttcattttgaggaggtggccaaatcatgttgtgaagaacaaaacaaagtcaactgccttcaaacaagggcaatacctgtcacacaatatttaaaagcattttcttcttatcaaaaacatgtctgtggggcacttttgaaatttggaaccaaagttgtacactttatatatattgcgatactcagtcaaaaattccccaagattgaatttaaggagcttatttctcttgtagaagatgtttcttccaactatgatggatgctgtgaaggggatgttgtgcagtgcatccgtgacacgagcaaggttatgaaccatatttgttcaaaacaagattctatctccagcaaaatcaaagagtgctgtgaaaagaaaataccagagcgcggccagtgcataattaactcaaacaaagatgatagaccaaaggatttatctctaagagaaggaaaatttactgacagtgaaaatgtgtgtcaagaacgagatgctgacccagacaccttctttgcgaagtttacttttgaatactcaaggagacatccagacctgtctataccagagcttttaagaattgttcaaatatacaaagatctcctgagaaattgctgcaacacagaaaaccctccaggttgttaccgttacgcggaagacaaattcaatgagacaactgagaaaagcctcaagatggtacaacaagaatgtaaacatttccagaatttggggaaggatggtttgaaataccattacctcatcaggctcacgaagatagctccccaactctccactgaagaactggtgtctcttggcgagaaaatggtgacagctttcactacttgctgtacgctaagtgaagagtttgcctgtgttgataatttggcagatttagtttttggagagttatgtggagtaaatgaaaatcgaactatcaaccctgctgtggaccactgctgtaaaacaaactttgccttcagaaggccctgctttgagagtttgaaagctgataaaacatatgtgcctccacctttctctcaagatttatttacctttcacgcagacatgtgtcaatctcagaatgaggagcttcagaggaagacagacaggtttcttgtcaacttagtgaagctgaagcatgaactcacagatgaagagctgcagtctttgtttacaaatttcgcaaatgtagtggataagtgctgcaaagcagagagtcctgaagtctgctttaatgaagagagtccaaaaattggcaactgaagccagctgctggagatatgtaaagaaaaaagcaccaaagggaaggcttcctatctgtgtggtgatgaatcgcatttcctgagaacaaaataaaaggatttttctgtaactgtcacctgaaataatacattgcagcaagcaataaacacaacattttgtaaagttattt

SEQ ID NO: 41224 - DNA, 1780 bp, Homo sapiens
gaaggagaggagtaggagaaagagaaggagctctgttggtaatggtgggaaaattagtcattgtgttttctcagtgagtacagaagctttactttaccatgactaaaaattgtccttttcttctctgttgtatagaataatgttttacaggaaaaaatatgtgctatggaggggctgccacgtttcttctataacaagaaatctgatgtgggatttctgcctcctttccctaccctggatcccgaagagaaatgccaggcttatgaaagtaacagagaatcccttttaaatcactttttatatgaagttgccagaaggaacccatttgtcttcgcccctacacttctaactgttgctgttcattttgaggaggtggccaaatcatgttgtgaagaacaaaacaaagtcaactgccttcaaacaagggcaatacctgtcacacaatatttaaaagcattttcttcttatcaaaaacatgtctgtggggcacttttgaaatttggaaccaaagttgtacactttatatatattgcgatactcagtcaaaaattccccaagattgaatttaaggagcttatttctcttgtagaagatgtttcttccaactatgatggatgctgtgaaggggatgttgtgcagtgcatccgtgacacgagcaaggttatgaaccatatttgttcaaaacaagattctatctccagcaaaatcaaagagtgctgtgaaaagaaaataccagagcgcggccagtgcataattaactcaaacaaagatgatagaccaaaggatttatctctaagagaaggaaaatttactgacagtgaaaatgtgtgtcaagaacgagatgctgacccagacaccttctttgcgaagtttacttttgaatactcaaggagacatccagacctgtctataccagagcttttaagaattgttcaaatatacaaagatctcctgagaaattgctgcaacacagaaaaccctccaggttgttaccgttacgcggaagacaaattcaatgagacaactgagaaaagcctcaagatggtacaacaagaatgtaaacatttccagaatttggggaaggatggtttgaaataccattacctcatcaggctcacgaagatagctccccaactctccactgaagaactggtgtctcttggcgagaaaatggtgacagctttcactacttgctgtacgctaagtgaagagtttgcctgtgttgataatttggcagatttagtttttggagagttatgtggagtaaatgaaaatcgaactatcaaccctgctgtggaccactgctgtaaaacaaactttgccttcagaaggccctgctttgagagtttgaaagctgataaaacatatgtgcctccacctttctctcaagatttatttacctttcacgcagacatgtgtcaatctcagaatgaggagcttcagaggaagacagacaggtttcttgtcaacttagtgaagctgaagcatgaactcacagatgaagagctgcagtctttgtttacaaatttcgcaaatgtagtggataagtgctgcaaagcagagagtcctgaagtctgctttaatgaagagagtccaaaaattggcaactgaagccagctgctggagatatgtaaagaaaaaagcaccaaagggaaggcttcctatctgtgtggtgatgaatcgcatttcctgagaacaaaataaaaggatttttctgtaactgtcacctgaaataatacattgcagcaagcaataaacacaacattttgtaaagttattt

SEQ ID NO: 41225 - DNA, 1553 bp, Homo sapiens
gttacttttttactgataatgtgaaagaatgatataaaaacttgattttcctcaacaacattactttcttttgtaaatgtggtttctacaaagatgaaactactaaaacttacaggttttatttttttcttgttttttttgactgaatccctaaccctgcccacacaacctcgggatatagagaacttcaatagtactcaaaaatttatagaagataatattgaatacatcaccatcattgcatttgctcagtatgttcaggaagcaacctttgaagaaatggaaaagctggtgaaagacatggtagaatacaaagacagatgtatggctgacaagacgctcccagagtgttcaaaattacctaataatgttttacaggaaaaaatatgtgctatggaggggctgccacaaaagcataatttctcacactgctgcagtaaggttgatgctcaaagaagactctgtttcttctataacaagaaatctgatgtgggatttctgcctcctttccctaccctggatcccgaagagaaatgccaggcttatgaaagtaacagagaatcccttttaaatcactttttatatgaagttgccagaaggaacccatttgtcttcgcccctacacttctaactgttgctgttcattttgaggaggtggccaaatcatgttgtgaagaacaaaacaaagtcaactgccttcaaacaagggcaatacctgtcacacaatatttaaaagcattttcttcttatcaaaaacatgtctgtggggcacttttgaaatttggaaccaaagttgtacactttatatatattgcgatactcagtcaaaaattccccaagattgaatttaaggagcttatttctcttgtagaagatgtttcttccaactatgatggatgctgtgaaggggatgttgtgcagtgcatccgtgacacgagcaaggttatgaaccatatttgttcaaaacaagattctatctccagcaaaatcaaagagtgctgtgaaaagaaaataccagagcgcggccagtgcataattaactcaaacaaagatgatagaccaaaggatttatctctaagagaaggaaaatttactgacagtttacttttgaatactcaaggagacatccagacctgtctataccagagcttttaagaattgttcaaatatacaaagatctcctgagaaattgctgcaacacagaaaaccctccaggttgttaccgttacgcggaagacaaattcaatgagacaactgagaaaagcctcaagatggtacaacaagaatgtaaacatttccagaatttggggaaggatggtttgaaataccagtatgttgtttgcacaagtgggctaacacttgccactagaattgaatacataatccctcgaagcgtaaaaaagttagctgtcaagtttttcagttatggccgattcataaactcttggaagaatttttttttaaagtcaagaatgcctattgaactgtcacattaatcttttatcagaaatgaagctaaaaataaaagaaatacaggattctggagacattga

SEQ ID NO: 41226 - DNA, 689 bp, Homo sapiens
gttacttttttactgataatgtgaaagaatgatataaaaacttgattttcctcaacaacattactttcttttgtaaatgtggtttctacaaagatgaaactactaaaacttacaggttttatttttttcttgttttttttgactgaatccctaaccctgcccacacaacctcgggatatagagaacttcaatagtactcaaaaatttatagaagataatattgaatacatcaccatcattgcatttgctcagtatgttcaggaagcaacctttgaagaaatggaaaagctggtgaaagacatggtagaatacaaagacagatgtatggctgacaagacgctcccagagtgttcaaaattacctaataatgttttacaggaaaaaatatgtgctatggaggggctgccacaaaagcataatttctcacactgctgcagtaaggttgatgctcaaagaagactctgtttcttctataacaagaaatctgatgtgggatttctgcctcctttccctaccctggatcccgaagagaaatgccaggcttatgaaagtaacagagaatcccttttaaatcactttttatatgaagttgccagaaggaacccatttgtcttcgcccctacacttctaactgttgctgttcattttgaggaggtggcgtcgacgcggccgcgaatttagtagtagta

SEQ ID NO: 41227 - DNA, 1377 bp, Homo sapiens
  misc_feature (24)..(24): n is a, c, g, or t
tcgaggcaagaattcggcagaggnttacaggaaacttgataatgaagatctccaccctggtcaagaacagaggaaagacctaaagtgaggtcagctaaaaacaagaaagaaatttaaagcatcctgggaagtcatcataccctttttctccaagaaaatctagttttgcttgtttttgtgtatcccacaacacctgtgtttgactatctttttcactttggatttggattttggtgtgatatacacagttccaaaaaatcaatggatagaaaactcaatggcataaataagtgcttaaaacaatacttcaagaaatgttcaacattccacgagaacaatatccacgtgagatgaaaagaaaagtctaagttagttcctgattcctggaagctgggaaagtctcattccagtaactacttaataccccctgtcagtctccttcaaaggctgaagccagcctctgactgaagcgcagccgcaatgtttcctgtctggtgccagcacagcttgcctggacttctgaaaattgcaagcgcttgctccttgctagtcaccacactccccctttcttagttgcagactccctcttgctgtggtttaccaggtgcccttattgcccctcatgcttgtgtgccactttggacttaatctggcacacttaactcccttcatctacgcctgaagctggacaagctgaagtgactgcgtcactttctcaattctggctcctgcccaccgaccttgctctgctaggaggaattagctctgcctggccagaacccaagaagtgacaaatcaaactcgctcaataggtggtaattaaacttctggctctaaagcccagaataggttgtcaatgggatttcacagtggctccctgacactaagcaaggatgtatttctacatctagttttaaatcttaaactctaataggattctcagaaaagacagtaaagactaaggccaaaaaaagttgtttaaaggggaaaatgacagtaagtacaaaagataatctggggaagacctggcaattctgaaatcaaaacatctgttactaagtggatcatgactgcttagtttctagtctagaatctttaagtaagccattcagaagatgtgatactatagaatgataccaactgaggatagagtggagaggaagggctgaagatgacttcagaaaaaggcctgaggcgtgacaaatgttgatctcactcactgatctatgctgtatttcttttaagaatgtattaatataaatgtccttttcttcccacatccaatccctattactacaccaaatacttgttcctctaggaaatgtgaagttgaaaaaaatttcccccattaaatgagaattattctgcttatgaaat

SEQ ID NO: 41228 - DNA, 340 bp, Homo sapiens
gtggagcaagcttctcaacgatctgttcccttttagttacaggaaacttgataatgaagatctccaccctggtcaagaacagaggaaagacctaagtaagtcttattatatttttaattatttaaaatatgctttcatttatgattgaagactattttacaagtttgtctgtttctcataaactatttaataccagaattataattgcctgccaatttgtctccatgtctgcttctcccacaaaacctagagctccttgaggataagaactatgtatatatcatatatctttgtatcaccagtgttttacatagtacctggccacacgttgagaagctgg

SEQ ID NO: 41229 - DNA, 1149 bp, Homo sapiens
  misc_feature (24)..(24): n is a, c, g, or t
tcgaggcaagaattcggcagaggntccttaactttacctgacagaactacaaagatttaggagtgcttaaaacaatacttcaagaaatgttcaacattccacgagaacaatatccacgtgagatgaaaagaaaagtctaagttagttcctgattcctggaagctgggaaagtctcattccagtaactacttaataccccctgtcagtctccttcaaaggctgaagccagcctctgactgaagcgcagccgcaatgtttcctgtctggtgccagcacagcttgcctggacttctgaaaattgcaagcgcttgctccttgctagtcaccacactccccctttcttagttgcagactccctcttgctgtggtttaccaggtgcccttattgcccctcatgcttgtgtgccactttggacttaatctggcacacttaactcccttcatctacgcctgaagctggacaagctgaagtgactgcgtcactttctcaattctggctcctgcccaccgaccttgctctgctaggaggaattagctctgcctggccagaacccaagaagtgacaaatcaaactcgctcaataggtggtaattaaacttctggctctaaagcccagaataggttgtcaatgggatttcacagtggctccctgacactaagcaaggatgtatttctacatctagttttaaatcttaaactctaataggattctcagaaaagacagtaaagactaaggccaaaaaaagttgtttaaaggggaaaatgacagtaagtacaaaagataatctggggaagacctggcaattctgaaatcaaaacatctgttactaagtggatcatgactgcttagtttctagtctagaatctttaagtaagccattcagaagatgtgatactatagaatgataccaactgaggatagagtggagaggaagggctgaagatgacttcagaaaaaggcctgaggcgtgacaaatgttgatctcactcactgatctatgctgtatttcttttaagaatgtattaatataaatgtccttttcttcccacatccaatccctattactacaccaaatacttgttcctctaggaaatgtgaagttgaaaaaaatttcccccattaaatgagaattattctgcttatgaaat

SEQ ID NO: 41230 - DNA, 451 bp, Homo sapiens
gcttgaacactccagacatactgctgcctcagggcctttgaaaatacatcacatgactaactttggcatctccttcagtcttcagtcacatatgcctttacagtgcgatggcactgtagaagtgtaggtgatatcacaacttcctcaattctttgacttgtcacaatgagcataaattacttttgtaattttataggacactcatggagggaaatctatacacagaaacacacacacacagggagaaagccatgtgaagacaggcagagactggggtaatgcagctacaagggaatgtcagagattgctagcaaacaccagaagctggaagaggcaattaaggattgctccctagagcttttagagggaggacggctctgccacctgccttgttcttggactcctagcctccagaattgtgagagaataaatttctgttgtttaaactatc

SEQ ID NO: 41231 - DNA, 313 bp, Homo sapiens
gtggagcaagcttctcaacgatctgttcccttttagttacaggaaacttgataatgaagatctccaccctggtcaagaacagaggaaagacctaagtaagtcttattatatttttaattatttaaaatatgctttcttgtataaggggggccgggtcatcgcgacggggcttttacatgaattggacgactgtaacaggaggatatccgtcgcgcgatgcgacgcagtgatcggttcgcctggcacaacattggagcttcgtcttgccgagagatatccggtgaggactagagatatattgcgtccagcagta

SEQ ID NO: 41232 - DNA, 1536 bp, Homo sapiens
gcttgaacactccagacatactgctgcctcagggcctttgaaaatacatcacatgactaactttggcatctccttcagtcttcagtcacatatgcctttacagtgcgatggcactgtagaagtgtaggtgatatcacaacttcctcaattctttgacttgtcacaatgagcataaattacttttgtaattttataggacactcatggagggaaatctatacacagaaacacacacacacagggagaaagccatgtgaagacaggcagagactggggtaatgcagctacaagggaatgtcagagattgctagcaaacaccagaagctggaagaggcaattaaggattgctccctagagcttttagagggaggacggctctgccacctgccttgttcttggactcctagcctccagaattaggtcacctgttgggcaatatcaccatagactgaatacagaagcagatattagcctccagcctcctgctcatctggacactagagagagtgaggtcagctaaaaacaagaaagaaatttaaagcatcctgggaagtcatcataccctttttctccaagaaaatctagttttgcttgtttttgtgtatcccacaacacctgtgtttgactatctttttcactttggatttggattttggtgtgatatacacagttccaaaaaatcaatggatagaaaactcaatggcataaataagtgcttaaaacaatacttcaagaaatgttcaacattccacgagaacaatatccacgtgagatgaaaagaaaagtctaagttagttcctgattcctggaagctgggaaagtctcattccagtaactacttaataccccctgtcagtctccttcaaaggctgaagccagcctctgactgaagcgcagccgcaatgtttcctgtctggtgccagcacagcttgcctggacttctgaaaattgcaagcgcttgctccttgctagtcaccacactccccctttcttagttgcagactccctcttgctgtggtttaccaggtgcccttattgcccctcatgcttgtgtgccactttggacttaatctggcacacttaactcccttcatctacgcctgaagctggacaagctgaagtgactgcgtcactttctcaattctggctcctgcccaccgaccttgctctgctaggaggaattagctctgcctggccagaacccaagaagtgacaaatcaaactcgctcaataggtggtaattaaacttctggctctaaagcccagaataggttgtcaatgggatttcacagtggctccctgacactaagcaaggatgtatttctacatctagttttaaatcttaaactctaataggattctcagaaaagacagtaaagactaaggccaaaaaaagttgtttaaaggggaaaatgacagtaagtacaaaagataatctggggaagacctggcaattctgaaatcaaaacatctgttactaagtggatcatgactgcttagtttctaggtgagctgaataaaaatactaactgaaca

SEQ ID NO: 41233 - DNA, 287 bp, Homo sapiens
tgcttaaaacaatacttcaagaaatgttcaacattccacgagaacaatatccacgtgagatgaaaagaaaagtctaagttagttcctgattcctggaagctgggaaagtatgtattttatttgtgtatttgcttaacaaacatttatagggctaattataggccagatacttttccacagatttctaaaatattattattaattctcataactaccctctgaggtatgtactactactgtcccccttttacagatggggtaacaggtatagagaagttaaggacttg

SEQ ID NO: 41234 - DNA, 302 bp, Homo sapiens
ccccctgtcagtctccttcaaaggctgaagccagcctctgactgaagcgcagccgcaatgtttcctgtctggtgccagcacagcttgcctggacttctgaaaattgcaagcgcttgctccttgctagtcaccacactccccctttcttagttgcagactccctcttgctgtggtttaccaggtgcccttattgcccctcatgcttgtgtgccactttggacttaatctggcacacttaactcccttcatctacgcctgaagctggacaagctgaagtgactgcgtcactttctcaattctgg

SEQ ID NO: 41235 - DNA, 261 bp, Homo sapiens
gctactcttactggtaggagccattcaaggaatctaagcatgaacctcggggttcaaatctgatttttctgaatttgagatatcagatcctctatcatcaagggagaaatggtaattacttcacagcttgtacatagaataggaatttagcctgttgctgggctaatctgttctcttctagttctatttcttcctctagctcatctcttatcattaatctccttgatggttgtctcatttttaccttcttattggcctaaa

SEQ ID NO: 41236 - DNA, 637 bp, Homo sapiens
aaagatacaaattgccagtattaggaatgaaataggacatcactaacagatgctacatacattcaaaggaggctaagggaataatgtggacaacttcaagccaataaatttgacaatttaaatggaagagacaaattccctggaagacacaaattaccaaaactgattcaaaaagaaatggaggctgggcgcagtggctgcctctgtctcccaaagtgctgggattacaggcatgagccactgtgtctggcctcactggtaaattctataaaacatgtaaggaagagataataccaatcttaaccatactctttcaaaaaacggagaagggaacacttcaactcatcctaggaggagactagcacaattctaataccaaaccagaggaaaaaaaaacttcaaaatggtgtctctcatgaccctggacagaaaagtccttaacaaaaatactggtaaatcagattcaacaatctgtaattcacaaagataacatcagtatatgttctcctgacagtgggtccttagtataatcattgtctacttcatttctttgcaatgctattattaaggcttgatggaatatttattttttaaacagcttaattaaggtataatgacatgcaatatactgctcata

SEQ ID NO: 41237 - DNA, 327 bp, Homo sapiens
aaagatacaaattgccagtattaggaatgaaataggacatcactaacagatgctacatacattcaaaggaggctaagggaataatgtggacaacttcaagccaataaatttgacaatttaaatggaagagacaaattccctggaagacacaaattaccaaaactgattcaaaaagaaatggaggctgggcgcagtggctcacgcctgtaatcccaacactttaggaggctgaggcaggcggatcacgaggtcaagagatcgagaccatcctggccaacttggtgacaccccatctctactaaaaatacaaaaattagctgggagtgg

SEQ ID NO: 41238 - DNA, 251 bp, Homo sapiens
cagccaggaaaacctgaatatttcacacctttcttaaaatctttcagtggttgtcattgccctgttctctagtctcacttcttgttgttcccgtttttgaattctatgcttcagccacactgatcatttttcactttctcaattatgtcattttctcatctcctagtcttaatacatttccttctcctacttccacaatccttattgtctctcttctttgactaccaattttacaggtctcaggttcaaca

SEQ ID NO: 41239 - DNA, 449 bp, Homo sapiens
aaggacccttccttcattcatcacacactggctccatctgcactgcacctactgccagccaggcactgagcttcacatccgcacaaaacacaaagacctctgatacggtttgggtctgtgttcccacctaaacctcgtggtgaattgtgattatgttgagttgttttggaggtagggcctggtgagaagtgactcgatgatggggtggatttctcatgaatggtttagcaccatctccttgatgctgttcttaagatagtgagttttcacgaaatctggttgtttaaaagtgtgcgccccaccccttgcttctgctctggccatgtgatctgcctgccttccccttcgccttccaccatgattgtaagattcctgaggcctccccagaggctgagcagatatcggtactacgcttgctatacagcctgcagaactatgagccaattaaa

SEQ ID NO: 41240 - DNA, 1674 bp, Homo sapiens
  misc_feature (1552)..(1552): n is a, c, g, or t
  misc_feature (1674)..(1674): n is a, c, g, or t
tcctgttctggcagactcatggcgaggtggagcggcgcattgtatcacagttgttgaccctcatggatggcctaaagcagagggcacatgtgattgttatggcagcaaccaacagacccaacagcattgacccagctctacggcgatttggtcgctttgacagggaggtagatattggaattcctgatgctacaggacgcttagagattcttcagatccataccaagaacatgaagctggcagatgatgtggacctggaacaggtagccaatgagactcacgggcatgtgggtgctgacttagcagccctgtgctcagaggctgctctgcaagccatccgcaagaagatggatctcattgacctagaggatgagaccattgatgccgaggtcatgaactctctagcagttactatggatgacttccggtgggccttgagccagagtaacccatcagcactgcgggaaaccgtggtagaggtgccacaggtaacctgggaagacatcgggggcctagaggatgtcaaacgtgagctacaggagctggtccagtatcctgtggagcacccagacaaattcctgaagtttggcatgacaccttccaagggagttctgttctatggacctcctggctgtgggaaaactttgttggccaaagccattgctaatgaatgccaggccaacttcatctccatcaagggtcctgagctgctcaccatgtggtttggggagtctgaggccaatgtcagagaaatctttgacaaggcccgccaagctgccccctgtgtgctattctttgatgagctggattcgattgccaaggctcgtggaggtaacattggagatggtggtggggctgctgaccgagtcatcaaccagatcctgacagaaatggatggcatgtccacaaaaaaaaatgtgttcatcattggcgctaccaaccgggctgacatcattgatcctgccatcctcagacctggccgtcttgatcagctcatctacatcccacttcctgatgagaagtcccgtgttgccatcctcaaggctaacctgcgcaagtccccagttgccaaggaatgtggacttggagttcctggctaaaatggactaatgggttctctggagctgacctgacagagatttgccagcgtgcttgcaagctggccatccgtgaatcatcgagagtgagattaggcgagaacgagagaggcagacaaacccatcagccatggaggtagaagaggatgatccagtgcctgagatccgtcgagatcactttgaagaagccatgctttgcgctgccgttctgtcagtgacaatgacattcggaagtatgagatgtttgcccagacccttcagcagagtcggggctttggcagcttcagattcccttcagggaaccagggtggagctggccccagtcagggcagtggaggcggcacaggtggcagtgtatacacagaagacaatgatgatgacctgtatggctaagtggtggtggccagcgtgcagtgagctggcctgcctggaccttgttccctgggggtgggggngcttgcccaggagagggaccaggggtgcgcccacagcctgctccattctccagtctgaacagttcagctacagtctgactctggacagggggtttctgttgaaaaaatacaaaacaaaagcn

SEQ ID NO: 41241 - DNA, 1195 bp, Homo sapiens
  misc_feature (1073)..(1073): n is a, c, g, or t
  misc_feature (1195)..(1195): n is a, c, g, or t
aacgtcagtacgaggctggtgttgatcgggggcctagaggatgtcaaacgtgagctacaggagctggtccagtatcctgtggagcacccagacaaattcctgaagtttggcatgacaccttccaagggagttctgttctatggacctcctggctgtgggaaaactttgttggccaaagccattgctaatgaatgccaggccaacttcatctccatcaagggtcctgagctgctcaccatgtggtttggggagtctgaggccaatgtcagagaaatctttgacaaggcccgccaagctgccccctgtgtgctattctttgatgagctggattcgattgccaaggctcgtggaggtaacattggagatggtggtggggctgctgaccgagtcatcaaccagatcctgacagaaatggatggcatgtccacaaaaaaaaatgtgttcatcattggcgctaccaaccgggctgacatcattgatcctgccatcctcagacctggccgtcttgatcagctcatctacatcccacttcctgatgagaagtcccgtgttgccatcctcaaggctaacctgcgcaagtccccagttgccaaggaatgtggacttggagttcctggctaaaatggactaatgggttctctggagctgacctgacagagatttgccagcgtgcttgcaagctggccatccgtgaatcatcgagagtgagattaggcgagaacgagagaggcagacaaacccatcagccatggaggtagaagaggatgatccagtgcctgagatccgtcgagatcactttgaagaagccatgctttgcgctgccgttctgtcagtgacaatgacattcggaagtatgagatgtttgcccagacccttcagcagagtcggggctttggcagcttcagattcccttcagggaaccagggtggagctggccccagtcagggcagtggaggcggcacaggtggcagtgtatacacagaagacaatgatgatgacctgtatggctaagtggtggtggccagcgtgcagtgagctggcctgcctggaccttgttccctgggggtgggggngcttgcccaggagagggaccaggggtgcgcccacagcctgctccattctccagtctgaacagttcagctacagtctgactctggacagggggtttctgttgaaaaaatacaaaacaaaagcn

SEQ ID NO: 41242 - DNA, 630 bp, Homo sapiens
tgagtgtcattacagatacctggatcatgatgatcctgaaaaacaggtcacagggccaacagctgatgagtatttggagcatcttattcccccaagatgaccactccctgtcttctgctacacctatattcatcgggggggggaggtgggaaaatagcaggattcttggggactctgagggcatgaatggagaattatttgattgaaaccacagagctcttgtacttagtattaaatattaaaatagaaatgaaaagttcagcttttctgagctgtaccatagcggccaatggaggaagtcttacaaagaaaatctatatctgcacaagactgaagccactaaaccgagtatacacaacataaagatatcttcctatttcaagtatcccttagggggcatgggtgcttagctatcctatgaaagacagagaagataagctcaattttagagcccagagcttgctccggaacagcaagatccacatgaacttaaactctttcccactgagcctaggggtggaatgtaattcctctgatggttttgatttatttccaagctagacttctctatttgatcattggcaccttggcagctcacacatctccgtggtctcttctgtagctttcaga

SEQ ID NO: 41243 - DNA, 970 bp, Homo sapiens
gcttttgctgcttccttgagagaagttttaacacatgaaaatggctaagagcaaaggctttggcaccgctgcctgctttcagattgctgcttttgctagccatgtcatcttgatcctgtttcttcccttctctgggccttggtttccccatttgtaaaatggtaatggtggcaatagtactcatcagttattgccaccacaatgctgcccagcaaactacctcagtagcacacagtagtaagtgtttgttgttcacacatctgggctggccagagggctttgctggtcttggctggccttgctcatgtctggatggctttggctgaggggaatgactgagatgatttgtctcagcttcctgtatctctctcatcctcctctagtggtgtagcccaggcaaattctcatggatctggcaaaggtacaagagccagtgagccactcatgtaactgcttttaagttcttttctcacccgccccccaccatgtttgctgccatcccattggccacagcaagtcacatggccgagcccagcatcaaggctcctggcagactgcacttcccaggatggcactgcagagtcacagtgccaaggtgtatggaattggggtgttttttgcaatctaccatgagtactaacctcacagtttcgtatgcaagcaaatcctcatccacttaccagtcttaggacagaggatcctcactggtctcctcgaccttgagacacccagattaggaattcttttctcctctgacttcttgtagttccctccatatactgttctattacccccgtccatgacacctttgtactgctgttccttctgcctgtaatgcctaccccttggcttacccatctgatcaactcagctctggggtcagactgtttgggtttaaagctggttcatgtcatttatttaaagcttcatgaccctggcaagtttctcaccctctctgggcttcaggtgc

SEQ ID NO: 41244 - DNA, 910 bp, Homo sapiens
aaagaattactatatgttctggccccttcccctctagttaaacaggtgttcaaggagctggagtttctgggttggtataccacaggggggccacctgacccctcggacatccacgtccataagcaggtatgcatgctcacacctgtgcatgctggggcagagaatggagaatgaggggaaggagaaaggtagggggcactgacttcctgtgcattgtccctctcttccaggtgtgtgagatcatcgagagccccctctttctgaagttgaaccctatgaccaagcacacagatcttcctgtcagcgtttttgagtctgtcattgatataatcaatggagaggccacaatgctgtttgctgagctgacctacactctggccacagaggaagcggaacgcattggtgtagaccacgtagcccgaatgacagcaacaggcagtggagagaactccactgtggctgaacacctgatagcacagcacagcgccatcaagatgctgcacagccgcgtcaagctcatcttggagtacgtcaaggcctctgaagcgggagaggtcccctttaatcatgagatcctgcgggaggcctatgctctgtgtcactgtctcccggtgctcagcacagacaagttcaagacagatttttatgatcaatgcaacgacgtggggctcatggcctacctcggcaccatcaccaaaacgtgcaacaccatgaaccagtttgtgaacaagttcaatgtcctctacgaccgacaaggcatcggcaggagaatgcgcgggctctttttctgatgagggtacttgaagggctgatggacaggggtcaggcaactatcccaaaggggagggcactacacttccttgagagaaaccgctgtcattaataaaaggggagcagcccctgagcaccc

SEQ ID NO: 41245 - DNA, 1165 bp, Homo sapiens
  misc_feature (1152)..(1152): n is a, c, g, or t
  misc_feature (1155)..(1155): n is a, c, g, or t
aggaagggggcggggccgaggctggcgggcgcggggaaaatggcggcggcggcggcggcggctgcagctacgaacgggaccggaggaagcagcgggatggaggtggatgcagcagtagtccccagcgtgatggcctgcggagtgactgggagtgtttccgtcgctctccatccccttgtcattctcaacatctcagaccactggatccgcatgcgctcccaggaggggcggcctgtgcaggtgattggggctctgattggcaagcaggagggccgaaatatcgaggtgatgaactcctttgagctgctgtcccacaccgtggaagagaagattatcattgacaaggaatattattacaccaaggaggagcagtttaaacaggtgttcaaggagctggagtttctgggttggtataccacaggggggccacctgacccctcggacatccacgtccataagcaggtgtgtgagatcatcgagagccccctctttctgaagttgaaccctatgaccaagcacacagatcttcctgtcagcgtttttgagtctgtcattgatataatcaatggagaggccacaatgctgtttgctgagctgacctacactctggccacagaggaagcggaacgcattggtgtagaccacgtagcccgaatgacagcaacaggcagtggagagaactccactgtggctgaacacctgatagcacagcacagcgccatcaagatgctgcacagccgcgtcaagctcatcttggagtacgtcaaggcctctgaagcgggagaggtcccctttaatcatgagatcctgcgggaggcctatgctctgtgtcactgtctcccggtgctcagcacagacaagttcaagacagatttttatgatcaatgcaacgacgtggggctcatggcctacctcggcaccatcaccaaaacgtgcaacaccatgaaccagtttgtgaacaagttcaatgtcctctacgaccgacaaggcatcggcaggagaatgcgcgggctctttttctgatgagggtacttgaagggctgatggacaggggtcaggcaactatcccaaaggggagggcactacacttccttgagagaaaccgctgtcattaataaaaggggagcagcccctgagcacccaaaaaaaaanganacagaaaaac

SEQ ID NO: 41246 - DNA, 873 bp, Homo sapiens
aggaagggggcggggccgaggctggcgggcgcggggaaaatggcggcggcggcggcggcggctgcagctacgaacgggaccggaggaagcagcgggatggaggtggatgcagcagtagtccccagcgtgatggcctgcggagtgactgggagtgtttccgtcgctctccatccccttgtcattctcaacatctcagaccactggatccgcatgcgctcccaggaggggcggcctgtgcagggtgtgtgagatcatcgagagccccctctttctgaagttgaaccctatgaccaagcacacagatgccacaatgctgtttgctgagctgacctacactctggccacagaggaagcggaacgcattggtgtagaccacgtagcccgaatgacagcaacaggcagtggagagaactccactgtggctgaacacctgatagcacagcacagcgccatcaagatgctgcacagccgcgtcaagctcatcttggagtacgtcaaggcctctgaagcgggagaggtcccctttaatcatgagatcctgcgggaggcctatgctctgtgtcactgtctcccggtgctcagcacagacaagttcaagacagatttttatgatcaatgcaacgacgtggggctcatggcctacctcggcaccatcaccaaaacgtgcaacaccatgaaccagtttgtgaacaagttcaatgtcctctacgaccgacaaggcatcggcaggagaatgcgcgggctctttttctgatgagggtacttgaagggctgatggacaggggtcaggcaactatcccaaaggggagggcactacacttccttgagagaaaccgctgtcattaataaaaggggagcagcccctgagcaccc

SEQ ID NO: 41247 - DNA, 864 bp, Homo sapiens
gacccacgcgtccgcggacgcgtggggccacaatgctgtttgctgagctgacctacactctggccacagaggaagcggaacgcattggtgtagaccacgtagcccgaatgacagcaacaggcagtggagagaactccactgtggctgaacacctgatagcacagcacagcgccatcaagatgctgcacagccgcgtcaagctcatcttggagtacgtcaaggcctctgaagcgggagaggtcccctttaatcatgagatcctgcgggaggcctatgctctgtgtcactgtctcccggtgctcagcacagacaagttcaagacagatttttatgatcaatgcaacgacgtggggctcatggcctacctcggcaccatcaccaaaacgtgcaacaccatgaaccagtttgtgaacaagttcaatgtcctctacgaccgacaaggcatcggcaggagaatgcgcgggctctttttctgatgagggtacttgaagggctgatggacaggggtcaggcaactatcccaaaggggagggcactacacttccttgagagaaaccgctgtcattaataaaaggggagcagcccctgagcacccaaaaaaaaaaaaaaaaaaaaaaaaaaacacagacgagctaaacaaagcaaacaaaaagagagggggggcgcggataaaagataccccagaggggcgcgcccagtagtagagtaccccgaaaatcggcgagacacaagggggcccccaaagagggagccgcacaaaacaggcaaaagccagcggacgggagattacaaaccggcggacacggggaaacagcggaaccggggcaacctggggagagacacccaaaccggggaggggagcaa

SEQ ID NO: 41248 - DNA, 976 bp, Homo sapiens
aggaagggggcggggccgaggctggcgggcgcggggaaaatggcggcggcggcggcggcggctgcagctacgaacgggaccggaggaagcagcgggatggaggtggatgcagcagtagtccccagcgtgatggcctgcggagtgactgggagtgtttccgtcgctctccatccccttgtcattctcaacatctcagaccactggatccgcatgcgctcccaggaggggcggcctgtgcaggtgattggggctctgattggcaagcaggagggccgaaatatcgaggtgatgaactcctttgagctgctgtcccacaccgtggaagagaagattatcattgacaaggaatattattacaccaaggaggagcagtgtgagagtggaatagatgtggggaagaggagtgggagttaaaaaaaaaatgtacagggtggggaagatggagagggttggaaagaaacaggagaggagaccaagaacaggggagaaaaagtgaagagtagctggagagatctcagaaaaagaaaacgttcagagttctttctcaaaagaaagcaaaggatgagaggagacaggatagaagggagtagttattctaaactgagccaggatttgaggagggaggagagaagctggtgaaaatacaccaggagcttcacattgaggaaggatggtttaaagaattactatgtcaggccgggctcagtgactcatgcctctaatcccagcactttgggaggccgaggtgggtggatcatgaggtcaggagttcaagaccagcctggcaaacatagtgaaaccccacctctactaaaaatacaaaaattagtctggcatggtggtgcgtgcctgtagtcccagctacgcgggatgctgaggcaggagaattgcttgaacctgggaggcggaggttgtggtgagctgagatcatgccactgcactccagcctgggcaacagagcgagattccgtctcag

SEQ ID NO: 41249 - DNA, 754 bp, Homo sapiens
  misc_feature (426)..(426): n is a, c, g, or t
aggaagggggcggggccgaggctggcgggcgcggggaaaatggcggcggcggcggcggcggctgcagctacgaacgggaccggaggaagcagcgggatggaggtggatgcagcagtagtccccagcgtgatggcctgcggagtgactgggagtgtttccgtcgctctccatccccttgtcattctcaacatctcagaccactggatccgcatgcgctcccaggaggggcggcctgtgcaggtgcaggatgatctggtggctctggagttggcgaagcacgtgagggcccggaagataatcgacggtgagtgcaacatccgtttgcacgtctgcgtcgtcccaccacctggtgcgtagagggagtagaagcagtttagtccattcgcagccaaggcggaagtcatctaatctaaccacgccagaggntacggcagcgacgctattcagagactacgcgttcgtttacagagggaagcttgggaagcttttgcgtagagggtctagggtgatgaccacacaagagggggggagcccacacgtggaacgcccactccggggagcgataccgacagttccacatagagaggcaacggatgctgatgacaggactcccataggtgagagaagacccaccctgtcctctctcgtgaaaaagatgtggcaacccccttgatgagaacccaaagtgcgacgcactgaggaatccctatccctgtggctcgaagcgcgattatatgtgaaagatcagtgatct

SEQ ID NO: 41250 - DNA, 1723 bp, Homo sapiens
aggaagggggcggggccgaggctggcgggcgcggggaaaatggcggcggcggcggcggcggctgcagctacgaacgggaccggaggaagcagcgggatggaggtggatgcagcagtagtccccagcgtgatggcctgcggagtgactgggagtgtttccgtcgctctccatccccttgtcattctcaacatctcagaccactggatccgcatgcgctcccaggaggggcggcctgtgcaggtgattggggctctgattggcaagcaggagggccgaaatatcgaggtgatgaactcctttgagctgctgtcccacaccgtggaagagaagattatcattgacaaggaatattattacaccaaggaggagcagtttaaacaggtgttcaaggagctggagtttctgggttggtataccacaggggggccacctgacccctcggacatccacgtccataagcaggtgtgtgagatcatcgagagccccctctttctgaagttgaaccctatgaccaagcacacagatcttcctgtcagcgtttttgagtctgtcattgatataatcaatggagaggccacaatgctgtttgctgagctgacctacactctggccacagaggaagcggaacgcattggtgtagaccacgtagcccgaatgacagcaacaggcagtggagagaactccactgtggctgaacacctgatagcacagcacagcgccatcaagatgctgcacagccgcgtcaagctcatcttggagtacgtcaaggcctctgaagcgggagaggtcccctttaatcatgagatcctgcgggaggcctatgctctgtgtcactgtctcccggtgctcagcacagacaagttcaagacagatttttatgatcaatgcaacgacgtggggctcatggcctacctcggcaccatcaccaaaacgtgcaacaccatgaaccagtttgtgaacaagttcaatgtcctctacgaccgacaaggcatcggcaggagaatgcgcgggctctttttctgatgagggtacttgaagggctgatggacaggggtcaggcaactatcccaaaggggagggcactacacttccttgagagaaaccgctgtcattaataaaaggggagcagcccctgagcacccctgctggtggctctgtcctctgttaggcaccacactggttggtcaacttggatgttcatcgaggctcattctggccttgctcagaagcccttctgatgctcttcagtgagggaggcactaccatttgaagtgaccccatgtcagtcacatggactggtctttagcaaagtccaaggctgcctgcttccacctaagtggtctctgttctacactttaatgtcaccctctacatcatcttacctagcccacccaaccttataaacatgataattgactactaaaaaaaaaaaaaaaaaaaaaaacaaaaaaaaaaaaaaaaaaaaaaaaaaaaaaaaaaaacacagacgagctaaacaaagcaaacaaaaagagagggggggcgcggataaaagataccccagaggggcgcgcccagtagtagagtaccccgaaaatcggcgagacacaagggggcccccaaagagggagccgcacaaaacaggcaaaagccagcggacgggagattacaaaccggcggacacggggaaacagcggaaccggggcaacctggggagagacacccaaaccggggaggggagcaa

SEQ ID NO: 41251 - DNA, 1614 bp, Homo sapiens
aggaagggggcggggccgaggctggcgggcgcggggaaaatggcggcggcggcggcggcggctgcagctacgaacgggaccggaggaagcagcgggatggaggtggatgcagcagtagtccccagcgtgatggcctgcggagtgactgggagtgtttccgtcgctctccatccccttgtcattctcaacatctcagaccactggatccgcatgcgctcccaggaggggcggcctgtgcaggtgattggggctctgattggcaagcaggagggccgaaatatcgaggtgatgaactcctttgagctgctgtcccacaccgtggaagagaagattatcattgacaaggaatattattacaccaaggaggagcagtttaaacaggtgttcaaggagctggagtttctgggttggtataccacaggggggccacctgacccctcggacatccacgtccataagcaggtgtgtgagatcatcgagagccccctctttctgaagttgaaccctatgaccaagcacacagatcttcctgtcagcgtttttgagtctgtcattgatataatcaatggagaggccacaatgctgtttgctgagctgacctacactctggccacagaggaagcggaacgcattggtgtagaccacgtagcccgaatgacagcaacaggcagtggagagaactccactgtggctgaacacctgatagcacagcacagcgccatcaagatgctgcacagccgcgtcaagctcatcttggagtacgtcaaggcctctgaagcgggagaggtcccctttaatcatgagatcctgcgggaggcctatgctctgtgtcactgtctcccggtgctcagcacagacaagttcaagacagatttttatgatcaatgcaacgacgtggggctcatggcctacctcggcaccatcaccaaaacgtgcaacaccatgaaccagtttgtgaacaagttcaatgtcctctacgaccgacaaggcatcggcaggagaatgcgcgggctctttttctgatgagggtacttgaagggctgatggacaggggtcaggcaactatcccaaaggggagggcactacacttccttgagagaaaccgctgtcattaataaaaggggagcagcccctgagcacccctgctggtggctctgtcctctgttaggcaccacactggttggtcaacttggatgttcatcgaggctcattctggccttgctcagaagcccttctgatgctcttcagtgagggaggcactaccatttgaagtgaccccatgtcagtcacatggactggtctttagcaaagtccaaggctgcctgcttccacctaagtggtctctgttctacactttaatgtcaccctctacatcatcttacctagcccacccaaccttataaacatgataattgactactttcctgagctaaattaacttgtttttcacatacgcaaaaaagaagggatagtaagcagatttttattagaaagaagtccaagccttgatcctgtgggcactgtgaattaccaggagggagagtttctcaatgaccgtttactacatattttggagaggcagctaggaagtggtctaaaggttgggattgctgt

SEQ ID NO: 41252 - DNA, 1411 bp, Homo sapiens
aggaagggggcggggccgaggctggcgggcgcggggaaaatggcggcggcggcggcggcggctgcagctacgaacgggaccggaggaagcagcgggatggaggtggatgcagcagtagtccccagcgtgatggcctgcggagtgactgggagtgtttccgtcgctctccatccccttgtcattctcaacatctcagaccactggatccgcatgcgctcccaggaggggcggcctgtgcaggtgattggggctctgattggcaagcaggagggccgaaatatcgaggtgatgaactcctttgagctgctgtcccacaccgtggaagagaagattatcattgacaaggaatattattacaccaaggaggagcagtttaaacaggtgttcaaggagctggagtttctgggttggtataccacaggggggccacctgacccctcggacatccacgtccataagcaggtgtgtgagatcatcgagagccccctctttctgaagttgaaccctatgaccaagcacacagatcttcctgtcagcgtttttgagtctgtcattgatataatcaatggagaggccacaatgctgtttgctgagctgacctacactctggccacagaggaagcggaacgcattggtgtagaccacgtagcccgaatgacagcaacaggcagtggagagaactccactgtggctgaacacctgatagcacagcacagcgccatcaagatgctgcacagccgcgtcaagctcatcttggagtacgtcaaggcctctgaagcgggagaggtcccctttaatcatgagatcctgcgggaggcctatgctctgtgtcactgtctcccggtgctcagcacagacaagttcaagacagatttttatgatcaatgcaacgacgtggggctcatggcctacctcggcaccatcaccaaaacgtgcaacaccatgaaccagtttgtgaacaagttcaatgtcctctacgaccgacaaggcatcggcaggagaatgcgcgggctctttttctgatgagggtacttgaagggctgatggacaggggtcaggcaactatcccaaaggggagggcactacacttccttgagagaaaccgctgtcattaataaaaggggagcagcccctgagcacccaaaaaaaaaaaaaaaaaaaaaaaaaaacacagacgagctaaacaaagcaaacaaaaagagagggggggcgcggataaaagataccccagaggggcgcgcccagtagtagagtaccccgaaaatcggcgagacacaagggggcccccaaagagggagccgcacaaaacaggcaaaagccagcggacgggagattacaaaccggcggacacggggaaacagcggaaccggggcaacctggggagagacacccaaaccggggaggggagcaa

SEQ ID NO: 41253 - DNA, 1279 bp, Homo sapiens
aggaagggggcggggccgaggctggcgggcgcggggaaaatggcggcggcggcggcggcggctgcagctacgaacgggaccggaggaagcagcgggatggaggtggatgcagcagtagtccccagcgtgatggcctgcggagtgactgggagtgtttccgtcgctctccatccccttgtcattctcaacatctcagaccactggatccgcatgcgctcccaggaggggcggcctgtgcaggtgattggggctctgattggcaagcaggagggccgaaatatcgaggtgatgaactcctttgagctgctgtcccacaccgtggaagagaagattatcattgacaaggaatattattacaccaaggaggagcagtttaaacaggtgttcaaggagctggagtttctgggttggtataccacaggggggccacctgacccctcggacatccacgtccataagcaggtgtgtgagatcatcgagagccccctctttctgaagttgaaccctatgaccaagcacacagatcttcctgtcagcgtttttgagtctgtcattgatataatcaatggagaggccacaatgctgtttgctgagctgacctacactctggccacagaggaagcggaacgcattggtgtagaccacgtagcccgaatgacagcaacaggcagtggagagaactccactgtggctgaacacctgatagcacagcacagcgccatcaagatgctgcacagccgcgtcaagctcatcttggagtacgtcaaggcctctgaagcgggagaggtcccctttaatcatgagatcctgcgggaggcctatgctctgtgtcactgtctcccggtgctcagcacagacaagttcaagacagatttttatgatcaatgcaacgacgtggggctcatggcctacctcggcaccatcaccaaaacgtgcaacaccatgaaccagtttgtgaacaagttcaatgtcctctacgaccgacaaggcatcggcaggagaatgcgcgggctctttttctgatgagggtacttgaagggctgatggacaggggtcaggcaactatcccaaaggggagggcactacacttccttgagagaaaccgctgtcattaataaaaggggagcagcccctgagcacccctgctggtggctctgtcctctgttaggcaccacactggttggtcaacttggatgttcatcgaggctcattctggccttgctcagaagcccttctgatgctcttgtctccgtgaggtgccacgctccccgggatacag

SEQ ID NO: 41254 - DNA, 1893 bp, Homo sapiens
aggaagggggcggggccgaggctggcgggcgcggggaaaatggcggcggcggcggcggcggctgcagctacgaacgggaccggaggaagcagcgggatggaggtggatgcagcagtagtccccagcgtgatggcctgcggagtgactgggagtgtttccgtcgctctccatccccttgtcattctcaacatctcagaccactggatccgcatgcgctcccaggaggggcggcctgtgcaggtgattggggctctgattggcaagcaggagggccgaaatatcgaggtgatgaactcctttgagctgctgtcccacaccgtggaagagaagattatcattgacaaggaatattattacaccaaggaggagcagtttaaacaggtgttcaaggagctggagtttctgggttggtataccacaggggggccacctgacccctcggacatccacgtccataagcaggtgtgtgagatcatcgagagccccctctttctgaagttgaaccctatgaccaagcacacagatcttcctgtcagcgtttttgagtctgtcattgatataatcaatggagaggccacaatgctgtttgctgagctgacctacactctggccacagaggaagcggaacgcattggtgtagaccacgtagcccgaatgacagcaacaggcagtggagagaactccactgtggctgaacacctgatagcacagcacagcgccatcaagatgctgcacagccgcgtcaagctcatcttggagtacgtcaaggcctctgaagcgggagaggtcccctttaatcatgagatcctgcgggaggcctatgctctgtgtcactgtctcccggtgctcagcacagacaagttcaagacagatttttatgatcaatgcaacgacgtggggctcatggcctacctcggcaccatcaccaaaacgtgcaacaccatgaaccagtttgtgaacaagttcaatgtcctctacgaccgacaaggcatcggcaggagaatgcgcgggctctttttctgatgagggtacttgaagggctgatggacaggggtcaggcaactatcccaaaggggagggcactacacttccttgagagaaaccgctgtcattaataaaaggggagcagcccctgagcaccctcaaaaaaaaaccatacccaaaacaactttttgccgcgcttcgcccagagaaaagttttaacccatcttttggcgcgcgggcccttgttacgcgacccggccacagcggcacccgggaacccgggccggaacaggggggtcccccataaaagcgctgggacgggcgtggaacaccatggggtccgggcacggctcacaggccgacgtataacccacacggcataacaaaaaaaaacacgatactcacacacaccatcacgaccagcacgatatagacacacacagcgatacacacacaaaacgagcactacaacacacaagaagagaaggggagcggagggggggaggcagacggcgaagactgtgggcgtcgaggaggggggcaggtgaagcagggaaggggaggcggggcagcggggaaggagagagagtaagagagaggcaagaaaccaaacgggggcgagagcggccgcagagcgagcggaagagagagacaagagggcaacgaaagacgcacacgaaggaacacgcgcgggccaaagcgccagagggcggagagtcggaaggcgcaccacgcggggaccgcacaaaacagaagcaagcgcaggccagagacgggagggcaggcgcggagacagaggaggagcagacagagcacggaggacggagaggcagacaaggaagagcaaagggggcgagccagagcgcagaacgcgaacgagagagaggagacgagagcgagagggaaggt

SEQ ID NO: 41255 - DNA, 1124 bp, Homo sapiens
aggaagggggcggggccgaggctggcgggcgcggggaaaatggcggcggcggcggcggcggctgcagctacgaacgggaccggaggaagcagcgggatggaggtggatgcagcagtagtccccagcgtgatggcctgcggagtgactgggagtgtttccgtcgctctccatccccttgtcattctcaacatctcagaccactggatccgcatgcgctcccaggaggggcggcctgtgcaggtgattggggctctgattggcaagcaggagggccgaaatatcgaggtgatgaactcctttgagctgctgtcccacaccgtggaagagaagattatcattgacaaggaatattattacaccaaggaggagcagtttaaacaggtgttcaaggagctggagtttctgggttggtataccacaggggggccacctgacccctcggacatccacgtccataagcaggtgtgtgagatcatcgagagccccctctttctgaagttgaaccctatgaccaagcacacagatcttcctgtcagcgtttttgagtctgtcattgatataatcaatggagaggccacaatgctgtttgctgagctgacctacactctggccacagaggaagcggaacgcattggtgtagaccacgtagcccgaatgacagcaacaggcagtggagagaactccactgtggctgaacacctgatagcacagcacagcgccatcaagatgctgcacagccgcgtcaagctcatcttggagtacgtcaaggcctctgaagcgggagaggtcccctttaatcatgagatcctgcgggaggcctatgctctgtgtcactgtctcccggtgctcagcacagacaagttcaagacagatttttatgatcaatgcaacgacgtggggctcatggcctacctcggcaccatcaccaaaacgtgcaacaccatgaaccagtttgtgaacaagttcaatgtcctctacgaccgacaaggcatcggcaggagaatgcgcgggctctttttctgatgagggtacttgaagggctgatggacaggggtcaggcaactatcccaaaggggagggcactacacttccttgagttagcgcgtgctgtcctaagccctcga

SEQ ID NO: 41256 - DNA, 1474 bp, Homo sapiens
aggaagggggcggggccgaggctggcgggcgcggggaaaatggcggcggcggcggcggcggctgcagctacgaacgggaccggaggaagcagcgggatggaggtggatgcagcagtagtccccagcgtgatggcctgcggagtgactgggagtgtttccgtcgctctccatccccttgtcattctcaacatctcagaccactggatccgcatgcgctcccaggaggggcggcctgtgcaggtgattggggctctgattggcaagcaggagggccgaaatatcgaggtgatgaactcctttgagctgctgtcccacaccgtggaagagaagattatcattgacaaggaatattattacaccaaggaggagcagtttaaacaggtgttcaaggagctggagtttctgggttggtataccacaggggggccacctgacccctcggacatccacgtccataagcaggtgtgtgagatcatcgagagccccctctttctgaagttgaaccctatgaccaagcacacagatcttcctgtcagcgtttttgagtctgtcattgatataatcaatggagaggccacaatgctgtttgctgagctgacctacactctggccacagaggaagcggaacgcattggtgtagaccacgtagcccgaatgacagcaacaggcagtggagagaactccactgtggctgaacacctgatagcacagcacagcgccatcaagatgctgcacagccgcgtcaagctcatcttggagtacgtcaaggcctctgaagcgggagaggtcccctttaatcatgagatcctgcgggaggcctatgctctgtgtcactgtctcccggtgctcagcacagacaagttcaagacagatttttatgatcaatgcaacgacgtggggctcatggcctacctcggcaccatcaccaaaacgtgcaacaccatgaaccagtttgtgaacaagttcaatgtcctctacgaccgacaaggcatcggcaggagaatgcgcgggctctttttctgatgagggtacttgaagggctgatggacaggggtcaggcaactatcccaaaggggagggcactacacttccttgagagaaaccgctgtcattaataaaaggggagcagcccctgagcacccaaaaaaaaaaaaaaaaaaaaaaaaaaaaaaaaaaaaaaaaaaaaaaaaaaaaacaaaaaaaaaaaaaaaaaaaaaaaaaaaaaaaaaaaacacagacgagctaaacaaagcaaacaaaaagagagggggggcgcggataaaagataccccagaggggcgcgcccagtagtagagtaccccgaaaatcggcgagacacaagggggcccccaaagagggagccgcacaaaacaggcaaaagccagcggacgggagattacaaaccggcggacacggggaaacagcggaaccggggcaacctggggagagacacccaaaccggggaggggagcaa

SEQ ID NO: 41257 - DNA, 1176 bp, Homo sapiens
  misc_feature (1100)..(1100): n is a, c, g, or t
  misc_feature (1103)..(1103): n is a, c, g, or t
  misc_feature (1132)..(1132): n is a, c, g, or t
aggaagggggcggggccgaggctggcgggcgcggggaaaatggcggcggcggcggcggcggctgcagctacgaacgggaccggaggaagcagcgggatggaggtggatgcagcagtagtccccagcgtgatggcctgcggagtgactgggagtgtttccgtcgctctccatccccttgtcattctcaacatctcagaccactggatccgcatgcgctcccaggaggggcggcctgtgcaggtgattggggctctgattggcaagcaggagggccgaaatatcgaggtgatgaactcctttgagctgctgtcccacaccgtggaagagaagattatcattgacaaggaatattattacaccaaggaggagcagtttaaacaggtgttcaaggagctggagtttctgggttggtataccacaggggggccacctgacccctcggacatccacgtccataagcaggtgtgtgagatcatcgagagccccctctttctgaagttgaaccctatgaccaagcacacagatcttcctgtcagcgtttttgagtctgtcattgatataatcaatggagaggccacaatgctgtttgctgagctgacctacactctggccacagaggaagcggaacgcattggtgtagaccacgtagcccgaatgacagcaacaggcagtggagagaactccactgtggctgaacacctgatagcacagcacagcgccatcaagatgctgcacagccgcgtcaagctcatcttggagtacgtcaaggcctctgaagcgggagaggtcccctttaatcatgagatcctgcgggaggcctatgctctgtgtcactgtctcccggtgctcagcacagacaagttcaagacagatttttatgatcaatgcaacgacgtggggctcatggcctacctcggcaccatcaccaaaacgtgcaacaccatgaaccagtttgtgaacaagttcaatgtcctctacgaccgacaaggcatcggcaggagaatgcgcgggctctttttctgatgagggtacttgaagggctgatggacaggggtcaggcaactatcccaaaggggagggcactacacttccttgagganagnaattctagcccctgttcgaggtaattaanatatgggggaggcaagccaccctgctgtcctttattgaattctc

SEQ ID NO: 41258 - DNA, 1361 bp, Homo sapiens
aggaagggggcggggccgaggctggcgggcgcggggaaaatggcggcggcggcggcggcggctgcagctacgaacgggaccggaggaagcagcgggatggaggtggatgcagcagtagtccccagcgtgatggcctgcggagtgactgggagtgtttccgtcgctctccatccccttgtcattctcaacatctcagaccactggatccgcatgcgctcccaggaggggcggcctgtgcaggtgattggggctctgattggcaagcaggagggccgaaatatcgaggtgatgaactcctttgagctgctgtcccacaccgtggaagagaagattatcattgacaaggaatattattacaccaaggaggagcagtttaaacaggtgttcaaggagctggagtttctgggttggtataccacaggggggccacctgacccctcggacatccacgtccataagcaggtgtgtgagatcatcgagagccccctctttctgaagttgaaccctatgaccaagcacacagatcttcctgtcagcgtttttgagtctgtcattgatataatcaatggagaggccacaatgctgtttgctgagctgacctacactctggccacagaggaagcggaacgcattggtgtagaccacgtagcccgaatgacagcaacaggcagtggagagaactccactgtggctgaacacctgatagcacagcacagcgccatcaagatgctgcacagccgcgtcaagctcatcttggagtacgtcaaggcctctgaagcgggagaggtcccctttaatcatgagatcctgcgggaggcctatgctctgtgtcactgtctcccggtgctcagcacagacaagttcaagacagatttttatgatcaatgcaacgacgtggggctcatggcctacctcggcaccatcaccaaaacgtgcaacaccatgaaccagtttgtgaacaagttcaatgtcctctacgaccgacaaggcatcggcaggcaactatcccaaaggggagggcactacacttccttgagagaaaccgctgtcattaataaaaggggagcagcccctgagcacccctgctggtggctctgtcctctgttaggcaccacactggttggtcaacttggatgttcatcgaggctcattctggccttgctcagaagcccttctgatgctcttcagtgagggaggcactaccatttgaagtgaccccatgtcagtcacatggactggtctttagcaaagtccaaggctgcctgcttccacctaagtggtctctgttctacactttaatgtcaccctctacatcatcttacctagcccacccaaccttataaacatgataattgactact

SEQ ID NO: 41259 - DNA, 1057 bp, Homo sapiens
  misc_feature (13)..(13): n is a, c, g, or t
caagtttggcacncggggtggatgcagcagtagtccccagcgtgatggcctgcggagtgactgggagtgtttccgtcgctctccatccccttgtcattctcaacatctcagaccactggatccgcatgcgctcccaggaggggcggcctgtgcaggtgattggggctctgattggcaagcaggagggccgaaatatcgaggtgatgaactcctttgagctgctgtcccacaccgtggaagagaagattatcattgacaaggaatattattacaccaaggaggagcagtttaaacaggtgttcaaggagctggagtttctgggttggtataccacaggggggccacctgacccctcggacatccacgtccataagcaggtgtgtgagatcatcgagagccccctctttctgaagttgaaccctatgaccaagcacacagatcttcctgtcagcgtttttgagtctgtcattgatataatcaatggagaggccacaatgctgtttgctgagctgacctacactctggccacagaggaagcggaacgcattggtgtagaccacgtagcccgaatgacagcaacaggcagtggagagaactccactgtggctgaacacctgatagcacagcacagcgccatcaagatgctgcacagccgcgtcaagctcatcttggagtacgtcaaggcctctgaagcgggagaggtcccctttaatcatgagatcctgcgggaggcctatgctctgtgtcactgtctcccggtgctcagcacagacaagttcaagacagatttttatgatcaatgcaacgacgtggggctcatggcctacctcggcaccatcaccaaaacgtgcaacaccatgaaccagtttgtgaacaagttcaatgtcctctacgaccgacaaggcatcggcaggagaatgcgcgggctctttttctgatgagggtacttgaagggctgatggacaggggtcaggcaactatcccaaaggggagggcactacacttccttgagagaaaccgctgtcattaataaaaggggagcagcccctgagcaccc

SEQ ID NO: 41260 - DNA, 836 bp, Homo sapiens
tgaaagctcctctctctacgtatgattatcattgacaaggaatattattacaccaaggaggagcagtttaaacaggtgttcaaggagctggagtttctgggttggtataccacaggggggccacctgacccctcggacatccacgtccataagcaggtgtgtgagatcatcgagagccccctctttctgaagttgaaccctatgaccaagcacacagatcttcctgtcagcgtttttgagtctgtcattgatataatcaatggagaggccacaatgctgtttgctgagctgacctacactctggccacagaggaagcggaacgcattggtgtagaccacgtagcccgaatgacagcaacaggcagtggagagaactccactgtggctgaacacctgatagcacagcacagcgccatcaagatgctgcacagccgcgtcaagctcatcttggagtacgtcaaggcctctgaagcgggagaggtcccctttaatcatgagatcctgcgggaggcctatgctctgtgtcactgtctcccggtgctcagcacagacaagttcaagacagatttttatgatcaatgcaacgacgtggggctcatggcctacctcggcaccatcaccaaaacgtgcaacaccatgaaccagtttgtgaacaagttcaatgtcctctacgaccgacaaggcatcggcaggagaatgcgcgggctctttttctgatgagggtacttgaagggctgatggacaggggtcaggcaactatcccaaaggggagggcactacacttccttgagagaaaccgctgtcattaataaaaggggagcagcccctgagcaccc

SEQ ID NO: 41261 - DNA, 924 bp, Homo sapiens
  misc_feature (95)..(95): n is a, c, g, or t
cgtgatctagaggatcccagttcgacggagactctctctgtagcatgcttacagagagaggagctgtgagaaaataagtgtcctatttcttaccntgccagttgggtggatgctgacctcattcaaggaatattattacaccaaggaggagcagtttaaacaggtgttcaaggagctggagtttctgggttggtataccacaggggggccacctgacccctcggacatccacgtccataagcaggtgtgtgagatcatcgagagccccctctttctgaagttgaaccctatgaccaagcacacagatcttcctgtcagcgtttttgagtctgtcattgatataatcaatggagaggccacaatgctgtttgctgagctgacctacactctggccacagaggaagcggaacgcattggtgtagaccacgtagcccgaatgacagcaacaggcagtggagagaactccactgtggctgaacacctgatagcacagcacagcgccatcaagatgctgcacagccgcgtcaagctcatcttggagtacgtcaaggcctctgaagcgggagaggtcccctttaatcatgagatcctgcgggaggcctatgctctgtgtcactgtctcccggtgctcagcacagacaagttcaagacagatttttatgatcaatgcaacgacgtggggctcatggcctacctcggcaccatcaccaaaacgtgcaacaccatgaaccagtttgtgaacaagttcaatgtcctctacgaccgacaaggcatcggcaggagaatgcgcgggctctttttctgatgagggtacttgaagggctgatggacaggggtcaggcaactatcccaaaggggagggcactacacttccttgagagaaaccgctgtcattaataaaaggggagcagcccctgagcaccc

SEQ ID NO: 41262 - DNA, 1389 bp, Homo sapiens
aggaagggggcggggccgaggctggcgggcgcggggaaaatggcggcggcggcggcggcggctgcagctacgaacgggaccggaggaagcagcgggatggaggtggatgcagcagtagtccccagcgtgatggcctgcggagtgactgggagtgtttccgtcgctctccatccccttgtcattctcaacatctcagaccactggatccgcatgcgctcccaggaggggcggcctgtgcaggtgattggggctctgattggcaagcaggagggccgaaatatcgaggtgatgaactcctttgagctgctgtcccacaccgtggaagagaagattatcattgacaaggaatattattacaccaaggaggagcagtttaaacaggtgttcaaggagctggagtttctgggttggtataccacaggggggccacctgacccctcggacatccacgtccataagcaggtgtgtgagatcatcgagagccccctctttctgaagttgaaccctatgaccaagcacacagatgtgagtaatactccatgcctactctgtcatgattgtcgctataccttttactgtgtgacactcctctattggggaatgccagatgccacttaccagctgtgactctggcttagtcatttaatctccaaactgtgaaaggaggtaatccctacttcattggtttcttgggaagatgagaggaaatgtgtaaaagcagctagcccaaatgttggcatatagtgttcaggtttctccgtctccttcacagcttcctgtcagcgtttttgagtctgtcattgatataatcaatggagaggccacaatgctgtttgctgagctgacctacactctggccacagaggaagcggaacgcattggtgtagaccacgtagcccgaatgacagcaacaggcagtggagagaactccactgtggctgaacacctgatagcacagcacagcgccatcaagatgctgcacagccgcgtcaagctcatcttggagtacgtcaaggcctctgaagcgggagaggtcccctttaatcatgagatcctgcgggaggcctatgctctgtgtcactgtctcccggtgctcagcacagacaagttcaagacagatttttatgatcaatgcaacgacgtggggctcatggcctacctcggcaccatcaccaaaacgtgcaacaccatgaaccagtttgtgaacaagttcaatgtcctctacgaccgacaaggcatcggcaggagaatgcgcgggctctttttctgatgagggtacttgaagggctgatggacaggggtcaggcaactatcccaaaggggagggcactacacttccttgagagaaaccgctgtcattaataaaaggggagcagcccctgagcaccc

SEQ ID NO: 41263 - DNA, 1477 bp, Homo sapiens
aggaagggggcggggccgaggctggcgggcgcggggaaaatggcggcggcggcggcggcggctgcagctacgaacgggaccggaggaagcagcgggatggaggtggatgcagcagtagtccccagcgtgatggcctgcggagtgactgggagtgtttccgtcgctctccatccccttgtcattctcaacatctcagaccactggatccgcatgcgctcccaggaggggcggcctgtgcaggtgattggggctctgattggcaagcaggagggccgaaatatcgaggtgatgaactcctttgagctgctgtcccacaccgtggaagagaagattatcattgacaaggaatattattacaccaaggaggagcagtttaaacaggtgttcaaggagctggagtttctgggttggtataccacaggggggccacctgacccctcggacatccacgtccataagcaggtgtgtgagatcatcgagagccccctctttctgaagttgaaccctatgaccaagcacacagatgtgagtaatactccatgcctactctgtcatgattgtcgctataccttttactgtgtgacactcctctattggggaatgccagatgccacttaccagctgtgactctggcttagtcatttaatctccaaactgtgaaaggaggtaatccctacttcattggtttcttgggaagatgagaggaaatgtgtaaaagcagctagcccaaatgttggcatatagtgttcaggtttctccgtctccttcacagcttcctgtcagcgtttttgagtctgtcattgatataatcaatggagaggtaataccctacccttcaaccctcagatcctgctcttggcctctttcctgcttttgattctccctttgtgggttaccttgccctgtaggccacaatgctgtttgctgagctgacctacactctggccacagaggaagcggaacgcattggtgtagaccacgtagcccgaatgacagcaacaggcagtggagagaactccactgtggctgaacacctgatagcacagcacagcgccatcaagatgctgcacagccgcgtcaagctcatcttggagtacgtcaaggcctctgaagcgggagaggtcccctttaatcatgagatcctgcgggaggcctatgctctgtgtcactgtctcccggtgctcagcacagacaagttcaagacagatttttatgatcaatgcaacgacgtggggctcatggcctacctcggcaccatcaccaaaacgtgcaacaccatgaaccagtttgtgaacaagttcaatgtcctctacgaccgacaaggcatcggcaggagaatgcgcgggctctttttctgatgagggtacttgaagggctgatggacaggggtcaggcaactatcccaaaggggagggcactacacttccttgagagaaaccgctgtcattaataaaaggggagcagcccctgagcaccc

SEQ ID NO: 41264 - DNA, 664 bp, Homo sapiens
gatctgaggacccccgggagccttaacttatgaccaagcacacagatcttcctgtcagcgtttttgagtctgtcattgatataatcaatggagaggccacaatgctgtttgctgagctgacctacactctggccacagaggaagcggaacgcattggtgtagaccacgtagcccgaatgacagcaacaggcagtggagagaactccactgtggctgaacacctgatagcacagcacagcgccatcaagatgctgcacagccgcgtcaagctcatcttggagtacgtcaaggcctctgaagcgggagaggtcccctttaatcatgagatcctgcgggaggcctatgctctgtgtcactgtctcccggtgctcagcacagacaagttcaagacagatttttatgatcaatgcaacgacgtggggctcatggcctacctcggcaccatcaccaaaacgtgcaacaccatgaaccagtttgtgaacaagttcaatgtcctctacgaccgacaaggcatcggcaggagaatgcgcgggctctttttctgatgagggtacttgaagggctgatggacaggggtcaggcaactatcccaaaggggagggcactacacttccttgagagaaaccgctgtcattaataaaaggggagcagcccctgagcaccc

SEQ ID NO: 41265 - DNA, 659 bp, Homo sapiens
taatcagccggtacccagaaacagctataccaagcacacagacttcctgtcagcgtttttgagtctgtcattgatataatcaatggagaggccacaatgctgtttgctgagctgacctacactctggccacagaggaagcggaacgcattggtgtagaccacgtagcccgaatgacagcaacaggcagtggagagaactccactgtggctgaacacctgatagcacagcacagcgccatcaagatgctgcacagccgcgtcaagctcatcttggagtacgtcaaggcctctgaagcgggagaggtcccctttaatcatgagatcctgcgggaggcctatgctctgtgtcactgtctcccggtgctcagcacagacaagttcaagacagatttttatgatcaatgcaacgacgtggggctcatggcctacctcggcaccatcaccaaaacgtgcaacaccatgaaccagtttgtgaacaagttcaatgtcctctacgaccgacaaggcatcggcaggagaatgcgcgggctctttttctgatgagggtacttgaagggctgatggacaggggtcaggcaactatcccaaaggggagggcactacacttccttgagagaaaccgctgtcattaataaaaggggagcagcccctgagcaccc

SEQ ID NO: 41266 - DNA, 815 bp, Homo sapiens
ctgatcacacgaggggtctcatggccataagccagacggcatcagctcagaaacagagacttgcgtgtcacaggctcgtgttgttagcgcgtgctgtccggacagcacagcgccatcaagatgctgcacagccgcgtcaagctcatcttggagtacgtcaaggcctctgaagcgggagaggtcccctttaatcatgagatcctgcgggaggcctatgctctgtgtcactgtctcccggtgctcagcacagacaagttcaagacagatttttatgatcaatgcaacgacgtggggctcatggcctacctcggcaccatcaccaaaacgtgcaacaccatgaaccagtttgtgaacaagttcaatgtcctctacgaccgacaaggcatcggcaggagaatgcgcgggctctttttctgatgagggtacttgaagggctgatggacaggggtcaggcaactatcccaaaggggagggcactacacttccttgagagaaaccgctgtcattaataaaaggggagcagcccctgagcacccctgctggtggctctgtcctctgttaggcaccacactggttggtcaacttggatgttcatcgaggctcattctggccttgctcagaagcccttctgatgctcttcagtgagggaggcactaccatttgaagtgaccccatgtcagtcacatggactggtctttagcaaagtccaaggctgcctgcttccacctaagtggtctctgttctacactttaatgtcaccctctacatcatcttacctagcccacccaaccttataaacatgataattgactact

SEQ ID NO: 41267 - DNA, 862 bp, Homo sapiens
aggaagggggcggggccgaggctggcgggcgcggggaaaatggcggcggcggcggcggcggctgcagctacgaacgggaccggaggaagcagcgggatggaggtggatgcagcagtagtccccagcgtgatggcctgcggagtgactgggagtgtttccgtcgctctccatccccttgtcattctcaacatctcagaccactggatccgcatgcgctcccaggaggggcggcctgtgcaggtgattggggctctgattggcaagcaggagggccgaaatatcgaggtgatgaactcctttgagctgctgtcccacaccgtggaagagaagattatcattgacaaggaatattattacaccaaggaggagcagtttaaacaggtgttcaaggagctggagtttctgggttggtataccacaggggggccacctgacccctcggacatccacgtccataagcaggtgtgtgagatcatcgagagccccctctttctgaagttggagaggtcccctttaatcatgagatcctgcgggaggcctatgctctgtgtcactgtctcccggtgctcagcacagacaagttcaagacagatttttatgatcaatgcaacgacgtggggctcatggcctacctcggcaccatcaccaaaacgtgcaacaccatgaaccagtttgtgaacaagttcaatgtcctctacgaccgacaaggcatcggcaggagaatgcgcgggctctttttctgatgagggtacttgaagggctgatggacaggggtcaggcaactatcccaaaggggagggcactacacttccttgagagaaaccgctgtcattaataaaaggggagcagcccctgagcaccc

SEQ ID NO: 41268 - DNA, 1142 bp, Homo sapiens
aggaagggggcggggccgaggctggcgggcgcggggaaaatggcggcggcggcggcggcggctgcagctacgaacgggaccggaggaagcagcgggatggaggtggatgcagcagtagtccccagcgtgatggcctgcggagtgactgggagtgtttccgtcgctctccatccccttgtcattctcaacatctcagaccactggatccgcatgcgctcccaggaggggcggcctgtgcaggtgattggggctctgattggcaagcaggagggccgaaatatcgaggtgatgaactcctttgagctgctgtcccacaccgtggaagagaagattatcattgacaaggaatattattacaccaaggaggagcagtttaaacaggtgttcaaggagctggagtttctgggttggtataccacaggggggccacctgacccctcggacatccacgtccataagcaggtgtgtgagatcatcgagagccccctctttctgaagttgaaccctatgaccaagcacacagatcttcctgtcagcgtttttgagtctgtcattgatataatcaatggagaggccacaatgctgtttgctgagctgacctacactctggccacagaggaagcggaacgcattggtgtagaccacgtagcccgaatgacagcaacaggcagtggagagaactccactgtggctgaacacctgatagcacagcacagcgccatcaagatgctgcacagccgcgtcaagctcatcttggagtacgtcaaggcctctgaagcgggagaggtcccctttaatcatgagatcctgcgggaggcctatgctctgtgtcactgtctcccggtgctcagcacagacaagttcaagacagatttttatgatcaatgcaacgacgtggggctcatggcctacctcggcaccatcaccaaaacgtgcaacaccatgaaccagtttgtgaacaagttcaatgtcctctacgaccgacaaggcatcggcaggagaatgcgcgggctctttttctgatgagggtacttgaagggctgatggacaggggtcaggcaactatcccaaaggggagggcactacacttccttgagagaaaccgctgtcattaataaaaggggagcagcccctgagcaccc

SEQ ID NO: 41269 - DNA, 1176 bp, Homo sapiens
aggaagggggcggggccgaggctggcgggcgcggggaaaatggcggcggcggcggcggcggctgcagctacgaacgggaccggaggaagcagcgggatggaggtggatgcagcagtagtccccagcgtgatggcctgcggagtgactgggagtgtttccgtcgctctccatccccttgtcattctcaacatctcagaccactggatccgcatgcgctcccaggaggggcggcctgtgcaggggtgagtgttgggcatagactccagtctcttctccttgctcacctcccccaggcagtggtcttttccccttcctctactggagccaattccccctcccccaaatcatcgtttccccaatacatggttcccactgatctcagaccctcaggtcatagaagtttctttaccctcaccttttccatgtcattctctttcccagtgattggggctctgattggcaagcaggagggccgaaatatcgaggtgatgaactcctttgagctgctgtcccacaccgtggaagagaagattatcattgacaaggaatattattacaccaaggaggagcagtgtgagagtggaatagatgtggggaagaggagtgggagttaaaaaaaaaatgtacagggtggggaagatggagagggttggaaagaaacaggagaggagaccaagaacaggggagaaaaagtgaagagtagctggagagatctcagaaaaagaaaacgttcagagttctttctcaaaagaaagcaaaggatgagaggagacaggatagaagggagtagttattctaaactgagccaggatttgaggagggaggagagaagctggtgaaaatacaccaggagcttcacattgaggaaggatggtttaaagaattactatgtcaggccgggctcagtgactcatgcctctaatcccagcactttgggaggccgaggtgggtggatcatgaggtcaggagttcaagaccagcctggcaaacatagtgaaaccccacctctactaaaaatacaaaaattagtctggcatggtggtgcgtgcctgtagtcccagctacgcgggatgctgaggcaggagaattgcttgaacctgggaggcggaggttgtggtgagctgagatcatgccactgcactccagcctgggcaacagagcgagattccgtctcag

SEQ ID NO: 41270 - DNA, 1421 bp, Homo sapiens
aggaagggggcggggccgaggctggcgggcgcggggaaaatggcggcggcggcggcggcggctgcagctacgaacgggaccggaggaagcagcgggatggaggtggatgcagcagtagtccccagcgtgatggcctgcggagtgactgggagtgtttccgtcgctctccatccccttgtcattctcaacatctcagaccactggatccgcatgcgctcccaggaggggcggcctgtgcaggtgattggggctctgattggcaagcaggagggccgaaatatcgaggtgatgaactcctttgagctgctgtcccacaccgtggaagagaagattatcattgacaaggaatattattacaccaaggaggagcagtttaaacaggtgttcaaggagctggagtttctgggttggtataccacaggggggccacctgacccctcggacatccacgtccataagcaggtgtgtgagatcatcgagagccccctctttctgaagttgaaccctatgaccaagcacacagatcttcctgtcagcgtttttgagtctgtcattgatataatcaatggagaggccacaatgctgtttgctgagctgacctacactctggccacagaggaagcggaacgcattggtgtagaccacgtagcccgaatgacagcaacaggcagtggagagaactccactgtggctgaacacctgatagcacagcacagcgccatcaagatgctgcacagccgcgtcaagctcatcttggagtacgtcaaggcctctgaagcgggagaggtcccctttaatcatgagatcctgcgggaggcctatgctctgtgtcactgtctcccggtgctcagcacagacaagttcaagacagatttttatgatcaatgcaacgacgtggggctcatggcctacctcggcaccatcaccaaaacgtgcaacaccatgaaccagtttgtgaacaagttcaatgtcctctacgaccgacaaggcatcggcaggagaatgcgcgggctctttttctgatgagggtacttgaagggctgatggacaggggtcaggcaactatcccaaaggggagggcactacacttccttgagagaaaccgctgtcattaataaaaggggagcagcccctgagcacccctgctggtggctctgtcctctgttaggcaccacactggttggtcaacttggatgttcatcgaggctcattctggccttgctcagaagcccttctgatgctcttcagtgagggaggcactaccatttgaagtgaccccatgtcagtcacatggactggtctttagcaaagtccaaggctgcctgcttccacctaagtggtctctgttctacactttaatgtcaccctctacatcatcttacctagcccacccaaccttataaacatgataattgactact

SEQ ID NO: 41271 - DNA, 1244 bp, Homo sapiens
aggaagggggcggggccgaggctggcgggcgcggggaaaatggcggcggcggcggcggcggctgcagctacgaacgggaccggaggaagcagcgggatggaggtggatgcagcagtagtccccagcgtgatggcctgcggagtgactgggagtgtttccgtcgctctccatccccttgtcattctcaacatctcagaccactggatccgcatgcgctcccaggaggggcggcctgtgcaggtgattggggctctgattggcaagcaggagggccgaaatatcgaggtgatgaactcctttgagctgctgtcccacaccgtggaagagaagattatcattgacaaggaatattattacaccaaggaggagcagtttaaacaggtgttcaaggagctggagtttctgggttggtataccacaggggggccacctgacccctcggacatccacgtccataagcaggtgtgtgagatcatcgagagccccctctttctgaagttgaaccctatgaccaagcacacagatcttcctgtcagcgtttttgagtctgtcattgatataatcaatggagaggccacaatgctgtttgctgagctgacctacactctggccacagaggaagcggaacgcattggtgtagaccacgtagcccgaatgacagcaacaggcagtggagagaactccactgtggctgaacacctgatagcacagcacagcgccatcaagatgctgcacagccgcgtcaagctcatcttggagtacgtcaaggcctctgaagcgggagaggtcccctttaatcatgagatcctgcgggaggcctatgctctgtgtcactgtctcccggtgctcagcacagacaagttcaagacagatttttatgatcaatgcaacgacgtggggctcatggcctacctcggcaccatcaccaaaacgtgcaacaccatgaaccagtttgtgaacaagttcaatgtcctctacgaccgacaaggcatcggcaggagaatgcgcgggctctttttctgatgagggtacttgaagggctgatggacaggggtcaggcaactatcccaaaggggagggcactacacttccttgagagaaaccgctgtcattaataaaaggggagcagcccctgagcacccaaaaaaaacaaatcaccacgcaacaccacacacacaaaaaaaggggggggcgcaaaaattacaccgagggggcacaaacacaccagcttttgtaaagggcca

SEQ ID NO: 41272 - DNA, 1504 bp, Homo sapiens
aggaagggggcggggccgaggctggcgggcgcggggaaaatggcggcggcggcggcggcggctgcagctacgaacgggaccggaggaagcagcgggatggaggtggatgcagcagtagtccccagcgtgatggcctgcggagtgactgggagtgtttccgtcgctctccatccccttgtcattctcaacatctcagaccactggatccgcatgcgctcccaggaggggcggcctgtgcaggtgattggggctctgattggcaagcaggagggccgaaatatcgaggtgatgaactcctttgagctgctgtcccacaccgtggaagagaagattatcattgacaaggaatattattacaccaaggaggagcagtttaaacaggtgttcaaggagctggagtttctgggttggtataccacaggggggccacctgacccctcggacatccacgtccataagcaggtgtgtgagatcatcgagagccccctctttctgaagttgaaccctatgaccaagcacacagatcttcctgtcagcgtttttgagtctgtcattgatataatcaatggagaggccacaatgctgtttgctgagctgacctacactctggccacagaggaagcggaacgcattggtgtagaccacgtagcccgaatgacagcaacaggcagtggagagaactccactgtggctgaacacctgatagcacagcacagcgccatcaagatgctgcacagccgcgtcaagctcatcttggagtacgtcaaggcctctgaagcgggagaggtcccctttaatcatgagatcctgcgggaggcctatgctctgtgtcactgtctcccggtgctcagcacagacaagttcaagacagatttttatgatcaatgcaacgacgtggggctcatggcctacctcggcaccatcaccaaaacgtgcaacaccatgaaccagtttgtgaacaagttcaatgtcctctacgaccgacaaggcatcggcaggagaatgcgcgggctctttttctgatgagggtacttgaagggctgatggacaggggtcaggcaactatcccaaaggggagggcactacacttccttgagagaaaccgctgtcattaataaaaggggagcagcccctgagcacccctgctggtggctctgtcctctgttaggcacaaaaaaaaaaaaaaaaaaaaaaaaaaaaaaaaaaaaaaaaaaaaaaaaaaaaacaaaaaaaaaaaaaaaaaaaaaaaaaaaaaaaaaaaacacagacgagctaaacaaagcaaacaaaaagagagggggggcgcggataaaagataccccagaggggcgcgcccagtagtagagtaccccgaaaatcggcgagacacaagggggcccccaaagagggagccgcacaaaacaggcaaaagccagcggacgggagattacaaaccggcggacacggggaaacagcggaaccggggcaacctggggagagacacccaaaccggggaggggagcaa

SEQ ID NO: 41273 - DNA, 1092 bp, Homo sapiens
aggaagggggcggggccgaggctggcgggcgcggggaaaatggcggcggcggcggcggcggctgcagctacgaacgggaccggaggaagcagcgggatggaggtggatgcagcagtagtccccagcgtgatggcctgcggagtgactgggagtgtttccgtcgctctccatccccttgtcattctcaacatctcagaccactggatccgcatgcgctcccaggaggggcggcctgtgcaggtgattggggctctgattggcaagcaggagggccgaaatatcgaggtgatgaactcctttgagctgctgtcccacaccgtggaagagaagattatcattgacaaggaatattattacaccaaggaggagcagtttaaacaggtgttcaaggagctggagtttctgggttggtataccacaggggggccacctgacccctcggacatccacgtccataagcaggtgtgtgagatcatcgagagccccctctttctgaagttgaaccctatgaccaagcacacagatcttcctgtcagcgtttttgagtctgtcattgatataatcaatggagaggccacaatgctgtttgctgagctgacctacactctggccacagaggaagcggaacgcattggtgtagaccacgtagcccgaatgacagcaacaggcagtggagagaactccactgtggctgaacacctgatagcacagcacagcgccatcaagatgctgcacagccgcgtcaagctcatcttggagtacgtcaaggcctctgaagcgggagaggtcccctttaatcatgagatcctgcgggaggcctatgctctgtgtcactgtctcccggtgctcagcacagacaagttcaagacagatttttatgatcaatgcaacgacgtggggctcatggcctacctcggcaccatcaccaaaacgtgcaacaccatgaaccagtttgtgaacaagttcaatgtcctctacgaccgacaaggcatcggcaggagaatgcgcgggctctttttctgatgagggtactgaaacatgtaacttggagaaaatttaccagggagcaataaacttccgtacgaatagcct

SEQ ID NO: 41274 - DNA, 1098 bp, Homo sapiens
aaccacatagggtcagtacgaggccggctgtataattcggcaccgaggcgggatggaggtggttgcagcagtagtccccagcgtgatggcctgcggagtgactgggagtgtttccgtcgctctccatccccttgtcattctcaacatctcagaccactggatccgcatgcgctcccaggaggggcggcctgtgcaggtgattggggctctgattggcaagcaggagggccgaaatatcgaggtgatgaactcctttgagctgctgtcccacaccgtggaagagaagattatcattgacaaggaatattattacaccaaggaggagcagtttaaacaggtgttcaaggagctggagtttctgggttggtataccacaggggggccacctgacccctcggacatccacgtccataagcaggtgtgtgagatcatcgagagccccctctttctgaagttgaaccctatgaccaagcacacagatcttcctgtcagcgtttttgagtctgtcattgatataatcaatggagaggccacaatgctgtttgctgagctgacctacactctggccacagaggaagcggaacgcattggtgtagaccacgtagcccgaatgacagcaacaggcagtggagagaactccactgtggctgaacacctgatagcacagcacagcgccatcaagatgctgcacagccgcgtcaagctcatcttggagtacgtcaaggcctctgaagcgggagaggtcccctttaatcatgagatcctgcgggaggcctatgctctgtgtcactgtctcccggtgctcagcacagacaagttcaagacagatttttatgatcaatgcaacgacgtggggctcatggcctacctcggcaccatcaccaaaacgtgcaacaccatgaaccagtttgtgaacaagttcaatgtcctctacgaccgacaaggcatcggcaggagaatgcgcgggctctttttctgatgagggtacttgaagggctgatggacaggggtcaggcaactatcccaaaggggagggcactacacttccttgagagaaaccgctgtcattaataaaaggggagcagcccctgagcaccc

SEQ ID NO: 41275 - DNA, 930 bp, Homo sapiens
ctccacccgacggggtgggtagtgtggggtgattggggctctgattggcaagcaggagggccgaaatatcgaggtgatgaactcctttgagctgctgtcccacaccgtggaagagaagattatcattgacaaggaatattattacaccaaggaggagcagtttaaacaggtgttcaaggagctggagtttctgggttggtataccacaggggggccacctgacccctcggacatccacgtccataagcaggtgtgtgagatcatcgagagccccctctttctgaagttgaaccctatgaccaagcacacagatcttcctgtcagcgtttttgagtctgtcattgatataatcaatggagaggccacaatgctgtttgctgagctgacctacactctggccacagaggaagcggaacgcattggtgtagaccacgtagcccgaatgacagcaacaggcagtggagagaactccactgtggctgaacacctgatagcacagcacagcgccatcaagatgctgcacagccgcgtcaagctcatcttggagtacgtcaaggcctctgaagcgggagaggtcccctttaatcatgagatcctgcgggaggcctatgctctgtgtcactgtctcccggtgctcagcacagacaagttcaagacagatttttatgatcaatgcaacgacgtggggctcatggcctacctcggcaccatcaccaaaacgtgcaacaccatgaaccagtttgtgaacaagttcaatgtcctctacgaccgacaaggcatcggcaggagaatgcgcgggctctttttctgatgagggtacttgaagggctgatggacaggggtcaggcaactatcccaaaggggagggcactacacttccttgagagaaaccgctgtcattaataaaaggggagcagcccctgagcaccc

SEQ ID NO: 41276 - DNA, 812 bp, Homo sapiens
gcgaattcactagtgattagagactgcgagaaggaggagcagtttaaacaggtgttcaaggagctggagtttctgggttggtataccacaggggggccacctgacccctcggacatccacgtccataagcaggtgtgtgagatcatcgagagccccctctttctgaagttgaaccctatgaccaagcacacagatcttcctgtcagcgtttttgagtctgtcattgatataatcaatggagaggccacaatgctgtttgctgagctgacctacactctggccacagaggaagcggaacgcattggtgtagaccacgtagcccgaatgacagcaacaggcagtggagagaactccactgtggctgaacacctgatagcacagcacagcgccatcaagatgctgcacagccgcgtcaagctcatcttggagtacgtcaaggcctctgaagcgggagaggtcccctttaatcatgagatcctgcgggaggcctatgctctgtgtcactgtctcccggtgctcagcacagacaagttcaagacagatttttatgatcaatgcaacgacgtggggctcatggcctacctcggcaccatcaccaaaacgtgcaacaccatgaaccagtttgtgaacaagttcaatgtcctctacgaccgacaaggcatcggcaggagaatgcgcgggctctttttctgatgagggtacttgaagggctgatggacaggggtcaggcaactatcccaaaggggagggcactacacttccttgagagaaaccgctgtcattaataaaaggggagcagcccctgagcaccc

SEQ ID NO: 41277 - DNA, 1230 bp, Homo sapiens
aggaagggggcggggccgaggctggcgggcgcggggaaaatggcggcggcggcggcggcggctgcagctacgaacgggaccggaggaagcagcgggatggaggtggatgcagcagtagtccccagcgtgatggcctgcggagtgactgggagtgtttccgtcgctctccatccccttgtcattctcaacatctcagaccactggatccgcatgcgctcccaggaggggcggcctgtgcaggtgattggggctctgattggcaagcaggagggccgaaatatcgaggtgatgaactcctttgagctgctgtcccacaccgtggaagagaagattatcattgacaaggaatattattacaccaaggaggagcagtttaaacaggtgttcaaggagctggagtttctgggttggtataccacaggggggccacctgacccctcggacatccacgtccataagcaggtgtgtgagatcatcgagagccccctctttctgaagttgaaccctatgaccaagcacacagatcttcctgtcagcgtttttgagtctgtcattgatataatcaatggagaggtaataccctacccttcaaccctcagatcctgctcttggcctctttcctgcttttgattctccctttgtgggttaccttgccctgtaggccacaatgctgtttgctgagctgacctacactctggccacagaggaagcggaacgcattggtgtagaccacgtagcccgaatgacagcaacaggcagtggagagaactccactgtggctgaacacctgatagcacagcacagcgccatcaagatgctgcacagccgcgtcaagctcatcttggagtacgtcaaggcctctgaagcgggagaggtcccctttaatcatgagatcctgcgggaggcctatgctctgtgtcactgtctcccggtgctcagcacagacaagttcaagacagatttttatgatcaatgcaacgacgtggggctcatggcctacctcggcaccatcaccaaaacgtgcaacaccatgaaccagtttgtgaacaagttcaatgtcctctacgaccgacaaggcatcggcaggagaatgcgcgggctctttttctgatgagggtacttgaagggctgatggacaggggtcaggcaactatcccaaaggggagggcactacacttccttgagagaaaccgctgtcattaataaaaggggagcagcccctgagcaccc

SEQ ID NO: 41278 - DNA, 1094 bp, Homo sapiens
aggaagggggcggggccgaggctggcgggcgcggggaaaatggcggcggcggcggcggcggctgcagctacgaacgggaccggaggaagcagcgggatggaggtggatgcagcagtagtccccagcgtgatggcctgcggagtgactgggagtgtttccgtcgctctccatccccttgtcattctcaacatctcagaccactggatccgcatgcgctcccaggaggggcggcctgtgcaggtgattggggctctgattggcaagcaggagggccgaaatatcgaggtgatgaactcctttgagctgctgtcccacaccgtggaagagaagattatcattgacaaggaatattattacaccaaggaggagcagtttaaacaggtgttcaaggagctggagtttctgggttggtataccacaggggggccacctgacccctcggacatccacgtccataagcaggtgtgtgagatcatcgagagccccctctttctgaagttgaaccctatgaccaagcacacagatgccacaatgctgtttgctgagctgacctacactctggccacagaggaagcggaacgcattggtgtagaccacgtagcccgaatgacagcaacaggcagtggagagaactccactgtggctgaacacctgatagcacagcacagcgccatcaagatgctgcacagccgcgtcaagctcatcttggagtacgtcaaggcctctgaagcgggagaggtcccctttaatcatgagatcctgcgggaggcctatgctctgtgtcactgtctcccggtgctcagcacagacaagttcaagacagatttttatgatcaatgcaacgacgtggggctcatggcctacctcggcaccatcaccaaaacgtgcaacaccatgaaccagtttgtgaacaagttcaatgtcctctacgaccgacaaggcatcggcaggagaatgcgcgggctctttttctgatgagggtacttgaagggctgatggacaggggtcaggcaactatcccaaaggggagggcactacacttccttgagagaaaccgctgtcattaataaaaggggagcagcccctgagcaccc

SEQ ID NO: 41279 - DNA, 911 bp, Homo sapiens
aggaagggggcggggccgaggctggcgggcgcggggaaaatggcggcggcggcggcggcggctgcagctacgaacgggaccggaggaagcagcgggatggaggtggatgcagcagtagtccccagcgtgatggcctgcggagtgactgggagtgtttccgtcgctctccatccccttgtcattctcaacatctcagaccactggatccgcatgcgctcccaggaggggcggcctgtgcaggtgattggggctctgattggcaagcaggagggccgaaatatcgaggtgatgaactcctttgagctgctgtcccacaccgtggaagagaagattatcattgacaaggaatattattacaccaaggaggagcagtttaaacaggtgttcaaggagctggagtttctgggttggtataccacaggggggccacctgacccctcggacatccacgtccataagcaggtgtgtgagatcatcgagagccccctctttctgaagttgaaccctatgaccaagcacacagatcttcctgtcagcgtttttgagtctgtcattgatataatcaatggagaggccacaatgctgtttgctgagctgacctacactctggccacagaggaagcggaacgcattggtgtagaccacgtagcccgaatgacagcaacaggcagtggagagaactccactgtggctgaacacctgatagcacagcacagcgccatcaagatgctgcacagccgcgtcaagctcatcttggagtacgtcaaggcctctgaagcgggtacgtgtccggccacgtggccggacacgtatctgaacacacaatagactaagacccaaagctgggattagataccccactatgcttagccctaaacctcaacagttagacaacaaaactgtctcgccag

SEQ ID NO: 41280 - DNA, 1041 bp, Homo sapiens
gtttaaactgctcctccttggtgtaataatattccttgtcaatgaggagcagtttaaacaggtgttcaaggagctggagtttctgggttggtataccacaggggggccacctgacccctcggacatccacgtccataagcaggtgtgtgagatcatcgagagccccctctttctgaagttgaaccctatgaccaagcacacagatcttcctgtcagcgtttttgagtctgtcattgatataatcaatggagaggccacaatgctgtttgctgagctgacctacactctggccacagaggaagcggaacgcattggtgtagaccacgtagcccgaatgacagcaacaggcagtggagagaactccactgtggctgaacacctgatagcacagcacagcgccatcaagatgctgcacagccgcgtcaagctcatcttggagtacgtcaaggcctctgaagcgggagaggtcccctttaatcatgagatcctgcgggaggcctatgctctgtgtcactgtctcccggtgctcagcacagacaagttcaagacagatttttatgatcaatgcaacgacgtggggctcatggcctacctcggcaccatcaccaaaacgtgcaacaccatgaaccagtttgtgaacaagttcaatgtcctctacgaccgacaaggcatcggcaggcaactatcccaaaggggagggcactacacttccttgagagaaaccgctgtcattaataaaaggggagcagcccctgagcacccctgctggtggctctgtcctctgttaggcaccacactggttggtcaacttggatgttcatcgaggctcattctggccttgctcagaagcccttctgatgctcttcagtgagggaggcactaccatttgaagtgaccccatgtcagtcacatggactggtctttagcaaagtccaaggctgcctgcttccacctaagtggtctctgttctacactttaatgtcaccctctacatcatcttacctagcccacccaaccttataaacatgataattgactact

SEQ ID NO: 41281 - DNA, 663 bp, Homo sapiens
tgaggttgcagtcagatggtggctgtggctgcgaccatctcaaaggcttttcactcacatacctgttgcctggtctgggaagactcaagcagtttggggctgggacagctgcagttctccgtcatctgtttatgtgtacattttccatgtgatctctccaatgtggtgccttctgggttactgcactaagtataggttgactcagggctcccacagcgcttgtcccaaaagagaaccaagtagaagccattttgcctttctgactgccccttggaagtcacacagcatctgccacattccgttggttgaggcaggtgggaaggtcactctaggtacaagagaacatagaccccatgtctcgatagaggagtgttaatatcactttgtaagaaggtcatgtgggatgagatatatattggtgctatctttggaaaatacagtctgctacaagtaaaacccgttcagaattctaattggattttttgaagaaatcttatttttaaatgcatttggattacctaagttaaacttcagaaagaagagaaaagggaacttttaagcttctaagccatagtactaaaagcaaatgatgtctgcgcaaaaacaggtaatagacaaatgaaatagaataatgatctcagagaaagacccatatacatacgg

SEQ ID NO: 41282 - DNA, 428 bp, Homo sapiens
tattaagggagaggcttgtgtcttttttcccaagcaaagccaaatagcattcaatgagagttcactttggtgatgtttaatgaaaatctaactcagatagaggcctcactggaatactccatgaacagaaatgtaatctgggcaaaaccctgcaggctttatcctgggaaatgtaataaaaaaaaatcagaatattgtctctattgctgaatcagtagcctggaagtcactgcagaagttttacctgtgggaggctatgggaaccctcttgtgtcatgtgctctcaaatgtgaatgagcgggccaagaactaagaatattcaaaagattttaaatgtccaaataggcagttctggaaatacctcaacattgtttggatattacatttgacatgaaataaaaaggcatatgaaatactttgaaaaaaat

SEQ ID NO: 41283 - DNA, 396 bp, Homo sapiens
tttatttatttatttctcgagatagagtcttgttctgttgcccagactggagtggagtgcagtggtatgatctcggctcactgcagcctctgcctcccaggttcaagcaattctcctgcctttgcctcccaagtagctgggattacagacatgcgccaccacgcccggctaatttttgtgtttttagtagagacggggtttcaccatgttggccaggctggtcttgaacttctgacctcatgatccaccggcctcagcctcccaaagtgctgggattacaggcataagccactgctcccagcattaggcaatcccatttaaaatagtatttaaaaatacttaggaatgaatctaaccaaaaaggtgaaagatctgaaaactataatacattgatga

SEQ ID NO: 41284 - DNA, 1115 bp, Homo sapiens
tagaaaggtagagccagtcttacctactgtagaaaatgttaggaaggcagccaggcacagggtgataaaaccaatgagatgatcagggctaagaacagtaatcaggttttccacatcttgctggtgttggcataagccaggaaagtttcagtgtggccacatggggtattttctaataattaaaaactcgtcttcattctctcttcttggttacattcctatcccatgcgtcccacattccatgaacctttcttcctctagaccactctcctatacgtgtggacacctccccaagaaagagcatgtcagaaaggaagtggtctttgatttatgaccttgggctgtgatttgggacagatggtctcaagagaaacagctggaaactgccaccacagcatctctttgaggacccccatggattgctgtgcgcagaggagaccccatgggtaccactcaggctgccaatggccccacacagtctctacctttcctggggagctacggagcaggctctgggtttggcattttgcttctgtccctcgagtgaaatgtgcctctgcttcatttctggaagatcgggtttgtgatttttgtgattctgctttagcccaggattcgagggatcatgtccacatttgtaggccatccagggagcagagagaaacttttagggccgtgataaagacaagccaagtggaaaatagcctgtgccctcattggcacacctggtgtctttatttccattagccctgattgatcaagcgttgctggtctgtgggcacttcacgctcccagagagaccagattggagctgtcctgttgaatctggcctgtaccagatcatcactggagagtgggagggggcgtcttgttagattcctaggtaacccctgtccccatttctaacatatcactttccagtatttcccaagagcctgaattaatagttaactagctgctggaaatcaaaagttagatcttgagaatactaagttgataagtcaggcttggccagtatccatatgctgcatccacagcaaatagagtggccatttattgggcacagtctctccatggcgggtgtgcaatctgaacccacaggagctgttttgctc

SEQ ID NO: 41285 - DNA, 569 bp, Homo sapiens
acgtggtgccgctgagcttggaccccgaccagaagatagagattgaaacgatgaggaaaacgaatgccgtaatccccgctggacgctaactgcagggaacatggaggagacatatttccacctatttctctccataagtataaaagaccataaaagaccatctagggacttcagaacccaaataatgacacaatgatgagaaaggggaggctcagagaggggaagtaactgctgcatagtcacacagctggagagtgacaaggtccatgttcaaaccaagggctgatgccaaagtccaagcttgaaccacactgcaatgctgcccatttgtgcactattccatctgcgtatccagcagcaaaatacaattctgctcagaataatgaacctaatgttctgaaggcaccagaaggttgtggaagtattgacctatctctagttagcatctgctcaccaggacccctgagactgtggagggggtaactcagcagaaggaccagggctaacagggactgaatccttaccacataccagggcccgttccaaacactttgcatgttttaaattgc

SEQ ID NO: 41286 - DNA, 499 bp, Homo sapiens
aagcactgctgcatgttgaactggtgtggccgtggtttagtgacctaagccctgaatagttagacgttctggtcgctgatgacctaagaaaggagaagagttaattcaaacattctgaagagaaagaggaaggaaaatacattctgtggcagcggagactgccagaaaagccaatgagctgatgacctgagaaaacaagcagggctctaggggggcaatgccagtccaagaaacattacatcctgctaaaattagaacagataagcttacctcctagtacagagtcttcaggatttaggttatcattgagggctgacctgctccacaggtagtgaaagagaaggattagtttgtacagagtgcaggattgtgtgatgatgaaagagattaagttacagtttccccttactattttctattattgttccatattttgtctgtgagttttctcttctattttaatgtaaacaataataataaaggtcctcactccctgtaa

SEQ ID NO: 41287 - DNA, 372 bp, Homo sapiens
gttttaaagaaaatttatgctggtggtttgcagaaagttgacatatatcctagggttcccttgtcagagggcagcagggtccccatgggttcacatcgttgcctggacaaggagtctttgtaccctagtggtgcctgggttgtcgcagggatggggtaactcatttattcacactctttctcctttcctgtttccttcaaagataccctggtcctagttgactctactttactgttcaaaattcagctcaacatatgtcaagctgtacgttcttaaactcaaggaaacagaaaggttataaccccgtggtttccaagcctggcttttcatcagagtctcttggtgaacttttagaaaatccatattcttgcc

SEQ ID NO: 41288 - DNA, 452 bp, Homo sapiens
gagtgggctactgaaaggaagcattgatcttgagtgttggagaagagaagaatgccttcactcttaggctatgttatgatgtgtgcacacttgggctaagacttccccaggccagaaaaaagtaaaaactccataagggagtgaacggcattttcaggaggacagacaagtcttgaaaactttgtatccccacagcaaagtggagagaactcagaacctcagaaagccatcagcaagtagtggtgctagttagctctagattaaactgctctgcaactgcttcaagaaattttcaagccattcttgaaaaaaccaaatgaatgtatagaacccccaaaatgaaccagatgatgtctagcattctttggggaaaacaaccaaaactgttactcaacaattcaagctgtccaggcgtggcggttcatgactgtaatctcagcactttcggaagc

SEQ ID NO: 41289 - DNA, 139 bp, Homo sapiens
atgaattaataaaaactatcatcattttgtcttatgagaggaacacaggtccagctccctgacagaatatcaaattaatggcaataatttcataccattaattggaaattaaattcataatgattaatacataaaaaca

SEQ ID NO: 41290 - DNA, 503 bp, Homo sapiens
tgaattgtgtcttcataaaattcatatgttgaagccctaacccccaatgtgactatatttggagatagggcctttaaggaggtaattaaggttaaatgtggccatcaggggcaaggtcctaatccaatagggctggtgtcctcagaagaagaggagacaccaggtatgcagagcacagagaaaaggccacgtgaggacacggtgaaaagttgaccatctgcaagccaaggagagaggcctcaggagaaaccaggaacaccttgatgttgtacttctagcctgcagaattgtgagaaaattaatttctgttgtttaagccactgtctgtggtattttgttacggtagccctagaagactagtacaaggaaggggcacctaattttccgagagcctgaccaccagccccttctgttctgtccttccttctaacacctgcttcccctgattaccttaaatcacatacctacctccttggagatgtacctgatttcttcctaatctt

SEQ ID NO: 41291 - DNA, 486 bp, Homo sapiens
catcggctattattatatcactgattattattattatccatgctggggtatagagtgtcagggcagagccctttcctctgaatgctttgtaaacatcagtccgtcttcttttatttatttatttatttattttggagacagggtctcactatgttgcccaggctggagtgcagtggcacaatctcggctcactgcaacctctgcctcatggtttcaagtgattctcctgcctcagcctcccgagtgtaggtgggattacaggtgcctgccaccatgcccggctaattttttgtattttatattttttagtagagatggggtttctccatgttagccaggctggtctcgaactcctgacctcaagtgatctgcccacctcagcctcccaaaatgtagggattacaggcgtgagccatcgcgcccggccttttttctattatattttatttccctattatttgcatatggggctactggatctgttct

SEQ ID NO: 41292 - DNA, 459 bp, Homo sapiens
gcaggtaagatttgctaacactcacagtcctctctacaccaccaggtgatcccaaggtaggtcttaggtcttcagagcccaagtcaaacagagcactgaagaggtaatgcgagccaatgaggcccaggggaaagtcacttagtccttataggttgacacctgccaaggagtttgtaaagcccactgcatgataaagacagtctcagaagccatcactggcataaagtgggatgtgtacttcctggcccttgagcttagctccaccagtggtagtcaaaggcagggaagcagaaagagaagaacaactcttgcagtggctgggctgctgccagggcaggcagtgggggtcgtggggaagggaggtttcacagtagagactgttctggtaagttttcctagcatagcagccagggttgcaaaaacgcaaactgctttgacttttcccttccctaaagtttt

SEQ ID NO: 41293 - DNA, 2708 bp, Homo sapiens
cccgtgccagcttgctcaggccctcagtcccagacgggcttttcccagagagctaaaagagaagggccagagaatgtcgtcccagccagcagggaaccagacctcccccggggccacagaggactactcctatggcagctggtacatcgatgagccccaggggggcgaggagctccagccagagggggaagtgccctcctgccacaccagcataccacccggcctgtaccacgcctgcctggcctcgctgtcaatccttgtgctgctgctcctggccatgctggtgaggcgccgccagctctggcctgactgtgtgcgtggcaggcccggcctgcccagccctgtggatttcttggctggggacaggccccgggcagtgcctgctgctgttttcatggtcctcctgagctccctgtgtttgctgctccccgacgaggacgcattgcccttcctgactctcgcctcagcacccagccaagatgggaaaactgaggctccaagaggggcctggaagatactgggactgttctattatgctgccctctactaccctctggctgcctgtgccacggctggccacacagctgcacacctgctcggcagcacgctgtcctgggcccaccttggggtccaggtctggcagagggcagagtgtccccaggtgcccaagatctacaagtactactccctgctggcctccctgcctctcctgctgggcctcggattcctgagcctttggtaccctgtgcagctggtgagaagcttcagccgtaggacaggagcaggctccaaggggctgcagagcagctactctgaggaatatctgaggaacctcctttgcaggaagaagctgggaagcagctaccacacctccaagcatggcttcctgtcctgggcccgcgtctgcttgagacactgcatctacactccacagccaggattccatctcccgctgaagctggtgctttcagctacactgacagggacggccatttaccaggtggccctgctgctgctggtgggcgtggtacccactatccagaaggtgagggcaggggtcaccacggatgtctcctacctgctggccggctttggaatcgtgctctccgaggacaagcaggaggtggtggagctggtgaagcaccatctgtgggctctggaagtgtgctacatctcagccttggtcttgtcctgcttactcaccttcctggtcctgatgcgctcactggtgacacacaggaccaaccttcgagctctgcaccgaggagctgccctggacttgagtcccttgcatcggagtccccatccctcccgccaagccatattctgttggatgagcttcagtgcctaccagacagcctttatctgccttgggctcctggtgcagcagatcatcttcttcctgggaaccacggccctggccttcctggtgctcatgcctgtgctccatggcaggaacctcctgctcttccgttccctggagtcctcgtggcccttctggctgactttggccctggctgtgatcctgcagaacatggcagcccattgggtcttcctggagactcatgatggacacccacagctgaccaaccggcgagtgctctatgcagccacctttcttctcttccccctcaatgtgctggtgggtgccatggtggccacctggcgagtgctcctctctgccctctacaacgccatccaccttggccagatggacctcagcctgctgccaccgagagccgccactctcgaccccggctactacacgtaccgaaacttcttgaagattgaagtcagccagtcgcatccagccatgacagccttctgctccctgctcctgcaagcgcagagcctcctacccaggaccatggcagccccccaggacagcctcagaccaggggaggaagacgaagggatgcagctgctacagacaaaggactccatggccaagggagctaggcccggggccagccgcggcagggctcgctggggtctggcctacacgctgctgcacaacccaaccctgcaggtcttccgcaagacggccctgttgggtgccaatggtgcccagccctgagggcagggaaggtcaacccacctgcccatctgtgctgaggcatgttcctgcctaccatcctcctccctccccggctctcctcccagcatcacaccagccatgcagccagcaggtcctccggatcactgtggttgggtggaggtctgtctgcactgggagcctcaggagggctctgctccacccacttggctatgggagagccagcaggggttctggagaaaaaaactggtgggttagggccttggtccaggagccagttgagccagggcagccacatccaggcgtctccctaccctggctctgccatcagccttgaagggcctcgatgaagccttctctggaaccactccagcccagctccacctcagccttggccttcacgctgtggaagcagccaaggcacttcctcaccccctcagcgccacggacctctctggggagtggccggaaagctcccgggcctctggcctgcagggcagcccaagtcatgactcagaccaggtcccacactgagctgcccacactcgagagccagatatttttgtagtttttatgcctttggctattatgaaagaggttagtgtgttccctgcaataaacttgttcctgagaaactgtcaaaaaagcaaaa

SEQ ID NO: 41294 - DNA, 2793 bp, Homo sapiens
cacaaccagccacccctctaggatcccagcccagctggtgctgggctcagaggagaaggccccgtgttgggagcaccctgcttgcctggagggacaagtttccgggagagatcaataaaggaaaggaaagagacaaggaagggagaggtcaggagagcgcttgattggaggagaagggccagagaatgtcgtcccagccagcagggaaccagacctcccccggggccacagaggactactcctatggcagctggtacatcgatgagccccaggggggcgaggagctccagccagagggggaagtgccctcctgccacaccagcataccacccggcctgtaccacgcctgcctggcctcgctgtcaatccttgtgctgctgctcctggccatgctggtgaggcgccgccagctctggcctgactgtgtgcgtggcaggcccggcctgcccaggccccgggcagtgcctgctgctgttttcatggtcctcctgagctccctgtgtttgctgctccccgacgaggacgcattgcccttcctgactctcgcctcagcacccagccaagatgggaaaactgaggctccaagaggggcctggaagatactgggactgttctattatgctgccctctactaccctctggctgcctgtgccacggctggccacacagctgcacacctgctcggcagcacgctgtcctgggcccaccttggggtccaggtctggcagagggcagagtgtccccaggtgcccaagatctacaagtactactccctgctggcctccctgcctctcctgctgggcctcggattcctgagcctttggtaccctgtgcagctggtgagaagcttcagccgtaggacaggagcaggctccaaggggctgcagagcagctactctgaggaatatctgaggaacctcctttgcaggaagaagctgggaagcagctaccacacctccaagcatggcttcctgtcctgggcccgcgtctgcttgagacactgcatctacactccacagccaggattccatctcccgctgaagctggtgctttcagctacactgacagggacggccatttaccaggtggccctgctgctgctggtgggcgtggtacccactatccagaaggtgagggcaggggtcaccacggatgtctcctacctgctggccggctttggaatcgtgctctccgaggacaagcaggaggtggtggagctggtgaagcaccatctgtgggctctggaagtgtgctacatctcagccttggtcttgtcctgcttactcaccttcctggtcctgatgcgctcactggtgacacacaggaccaaccttcgagctctgcaccgaggagctgccctggacttgagtcccttgcatcggagtccccatccctcccgccaagccatattctgttggatgagcttcagtgcctaccagacagcctttatctgccttgggctcctggtgcagcagatcatcttcttcctgggaaccacggccctggccttcctggtgctcatgcctgtgctccatggcaggaacctcctgctcttccgttccctggagtcctcgtggcccttctggctgactttggccctggctgtgatcctgcagaacatggcagcccattgggtcttcctggagactcatgatggacacccacagctgaccaaccggcgagtgctctatgcagccacctttcttctcttccccctcaatgtgctggtgggtgccatggtggccacctggcgagtgctcctctctgccctctacaacgccatccaccttggccagatggacctcagcctgctgccaccgagagccgccactctcgaccccggctactacacgtaccgaaacttcttgaagattgaagtcagccagtcgcatccagccatgacagccttctgctccctgctcctgcaagcgcagagcctcctacccaggaccatggcagccccccaggacagcctcagaccaggggaggaagacgaagggatgcagctgctacagacaaaggactccatggccaagggagctaggcccggggccagccgcggcagggctcgctggggtctggcctacacgctgctgcacaacccaaccctgcaggtcttccgcaagacggccctgttgggtgccaatggtgcccagccctgagggcagggaaggtcaacccacctgcccatctgtgctgaggcatgttcctgcctaccatcctcctccctccccggctctcctcccagcatcacaccagccatgcagccagcaggtcctccggatcactgtggttgggtggaggtctgtctgcactgggagcctcaggagggctctgctccacccacttggctatgggagagccagcaggggttctggagaaaaaaactggtgggttagggccttggtccaggagccagttgagccagggcagccacatccaggcgtctccctaccctggctctgccatcagccttgaagggcctcgatgaagccttctctggaaccactccagcccagctccacctcagccttggccttcacgctgtggaagcagccaaggcacttcctcaccccctcagcgccacggacctctctggggagtggccggaaagctcccgggcctctggcctgcagggcagcccaagtcatgactcagaccaggtcccacactgagctgcccacactcgagagccagatatttttgtagtttttatgcctttggctattatgaaagaggttagtgtgttccctgcaataaacttgttcctgagaaactgtcaaaaaagcaaaa

SEQ ID NO: 41295 - DNA, 1126 bp, Homo sapiens
ggccagaaaggggcaggctgaggctgggggaggggctcaagggagcccagctgggagggcccaggcaggcagtgcggagctggccgtgggctgcctaccctttcatctctgcaactccttcctccctgggcctcccttctggagaagggccagagaatgtcgtcccagccagcagggaaccagacctcccccggggccacagaggactactcctatggcagctggtacatcgatgagccccaggggggcgaggagctccagccagagggggaagtgccctcctgccacaccagcataccacccggcctgtaccacgcctgcctggcctcgctgtcaatccttgtgctgctgctcctggccatgctggtgaggcgccgccagctctggcctgactgtgtgcgtggcaggcccggcctgcccagccctgtggatttcttggctggggacaggccccgggcagtgcctgctgctgttttcatggtcctcctgagctccctgtgtttgctgctccccgacgaggacgcattgcccttcctgactctcgcctcagcacccagccaagatgggaaaactgaggctccaagaggtaacttgcccaagatcacagagttgagactagtcagagcctggatttgaacctagtgttcttgcccactgaacgtgctgaagggcttggaagctggagaccgaagagaggcctgggtgggctcactgcaggccccatgtctgcccctccagcatgggtctctctgcttgtttcaccttccaggggcctggaagatactgggactgttctattatgctgccctctactaccctctggctgcctgtgccacggctggccacacagctgcacacctgctcggcagcacgctgtcctgggcccaccttggggtccaggtctggcagagggcagagtgtccccaggtgcccaaggtaaccgctgatcacaatggcctagggcagaggggcgcacagagcaacctactcaaaccacagtgcctcctttgagctctgattctatgatgggccgccctgcagccttccattgtgcatgggattccatgccttcaaacatgtgccccttccaagcttggctgctctgcaggagaggcagggaacaagg

SEQ ID NO: 41296 - DNA, 218 bp, Homo sapiens
tcgctattcatcggcacctcgctattcatcggcacctggccacacagctgcacacctgctcggcagcacgctgtcctgggcccaccttggggtccaggtctggcagagggcagagtgtccccaggtgcccaagatgaatagcgaggtgccgatgaatagcgaggtgccagatgaatagcgaggtgccgatgaatagcgaagtgccgatgtatacgaag

SEQ ID NO: 41297 - DNA, 2791 bp, Homo sapiens
ggccagaaaggggcaggctgaggctgggggaggggctcaagggagcccagctgggagggcccaggcaggcagtgcggagctggccgtgggctgcctaccctttcatctctgcaactccttcctccctgggcctcccttctggagaagggccagagaatgtcgtcccagccagcagggaaccagacctcccccggggccacagaggactactcctatggcagctggtacatcgatgagccccaggggggcgaggagctccagccagagggggaagtgccctcctgccacaccagcataccacccggcctgtaccacgcctgcctggcctcgctgtcaatccttgtgctgctgctcctggccatgctggtgaggcgccgccagctctggcctgactgtgtgcgtggcaggcccggcctgcccagccctgtggatttcttggctggggacaggccccgggcagtgcctgctgctgttttcatggtcctcctgagctccctgtgtttgctgctccccgacgaggacgcattgcccttcctgactctcgcctcagcacccagccaagatgggaaaactgaggctccaagaggggcctggaagatactgggactgttctattatgctgccctctactaccctctggctgcctgtgccacggctggccacacagctgcacacctgctcggcagcacgctgtcctgggcccaccttggggtccaggtctggcagagggcagagtgtccccaggtgcccaagatctacaagtactactccctgctggcctccctgcctctcctgctgggcctcggattcctgagcctttggtaccctgtgcagctggtgagaagcttcagccgtaggacaggagcaggctccaaggggctgcagagcagctactctgaggaatatctgaggaacctcctttgcaggaagaagctgggaagcagctaccacacctccaagcatggcttcctgtcctgggcccgcgtctgcttgagacactgcatctacactccacagccaggattccatctcccgctgaagctggtgctttcagctacactgacagggacggccatttaccaggtggccctgctgctgctggtgggcgtggtacccactatccagaaggtgagggcaggggtcaccacggatgtctcctacctgctggccggctttggaatcgtgctctccgaggacaagcaggaggtggtggagctggtgaagcaccatctgtgggctctggaagtgtgctacatctcagccttggtcttgtcctgcttactcaccttcctggtcctgatgcgctcactggtgacacacaggaccaaccttcgagctctgcaccgaggagctgccctggacttgagtcccttgcatcggagtccccatccctcccgccaagccatattctgttggatgagcttcagtgcctaccagacagcctttatctgccttgggctcctggtgcagcagatcatcttcttcctgggaaccacggccctggccttcctggtgctcatgcctgtgctccatggcaggaacctcctgctcttccgttccctggagtcctcgtggcccttctggctgactttggccctggctgtgatcctgcagaacatggcagcccattgggtcttcctggagactcatgatggacacccacagctgaccaaccggcgagtgctctatgcagccacctttcttctcttccccctcaatgtgctggtgggtgccatggtggccacctggcgagtgctcctctctgccctctacaacgccatccaccttggccagatggacctcagcctgctgccaccgagagccgccactctcgaccccggctactacacgtaccgaaacttcttgaagattgaagtcagccagtcgcatccagccatgacagccttctgctccctgctcctgcaagcgcagagcctcctacccaggaccatggcagccccccaggacagcctcagaccaggggaggaagacgaagggatgcagctgctacagacaaaggactccatggccaagggagctaggcccggggccagccgcggcagggctcgctggggtctggcctacacgctgctgcacaacccaaccctgcaggtcttccgcaagacggccctgttgggtgccaatggtgcccagccctgagggcagggaaggtcaacccacctgcccatctgtgctgaggcatgttcctgcctaccatcctcctccctccccggctctcctcccagcatcacaccagccatgcagccagcaggtcctccggatcactgtggttgggtggaggtctgtctgcactgggagcctcaggagggctctgctccacccacttggctatgggagagccagcaggggttctggagaaaaaaactggtgggttagggccttggtccaggagccagttgagccagggcagccacatccaggcgtctccctaccctggctctgccatcagccttgaagggcctcgatgaagccttctctggaaccactccagcccagctccacctcagccttggccttcacgctgtggaagcagccaaggcacttcctcaccccctcagcgccacggacctctctggggagtggccggaaagctcccgggcctctggcctgcagggcagcccaagtcatgactcagaccaggtcccacactgagctgcccacactcgagagccagatatttttgtagtttttatgcctttggctattatgaaagaggttagtgtgttccctgcaataaacttgttcctgagaaactgtcaaaaaagcaaaa

SEQ ID NO: 41298 - DNA, 1594 bp, Homo sapiens
atgccaggttggatggaggtcccacagcaatagaagcagcaacagcaggtgtgctacatctcagccttggtcttgtcctgcttactcaccttcctggtcctgatgcgctcactggtgacacacaggaccaaccttcgagctctgcaccgaggagctgccctggacttgagtcccttgcatcggagtccccatccctcccgccaagccatattctgttggatgagcttcagtgcctaccagacagcctttatctgccttgggctcctggtgcagcagatcatcttcttcctgggaaccacggccctggccttcctggtgctcatgcctgtgctccatggcaggaacctcctgctcttccgttccctggagtcctcgtggcccttctggctgactttggccctggctgtgatcctgcagaacatggcagcccattgggtcttcctggagactcatgatggacacccacagctgaccaaccggcgagtgctctatgcagccacctttcttctcttccccctcaatgtgctggtgggtgccatggtggccacctggcgagtgctcctctctgccctctacaacgccatccaccttggccagatggacctcagcctgctgccaccgagagccgccactctcgaccccggctactacacgtaccgaaacttcttgaagattgaagtcagccagtcgcatccagccatgacagccttctgctccctgctcctgcaagcgcagagcctcctacccaggaccatggcagccccccaggacagcctcagaccaggggaggaagacgaagggatgcagctgctacagacaaaggactccatggccaagggagctaggcccggggccagccgcggcagggctcgctggggtctggcctacacgctgctgcacaacccaaccctgcaggtcttccgcaagacggccctgttgggtgccaatggtgcccagccctgagggcagggaaggtcaacccacctgcccatctgtgctgaggcatgttcctgcctaccatcctcctccctccccggctctcctcccagcatcacaccagccatgcagccagcaggtcctccggatcactgtggttgggtggaggtctgtctgcactgggagcctcaggagggctctgctccacccacttggctatgggagagccagcaggggttctggagaaaaaaactggtgggttagggccttggtccaggagccagttgagccagggcagccacatccaggcgtctccctaccctggctctgccatcagccttgaagggcctcgatgaagccttctctggaaccactccagcccagctccacctcagccttggccttcacgctgtggaagcagccaaggcacttcctcaccccctcagcgccacggacctctctggggagtggccggaaagctcccgggcctctggcctgcagggcagcccaagtcatgactcagaccaggtcccacactgagctgcccacactcgagagccagatatttttgtagtttttatgcctttggctattatgaaagaggttagtgtgttccctgcaataaacttgttcctgagaaactgtcaaaaaagcaaaa

SEQ ID NO: 41299 - DNA, 1383 bp, Homo sapiens
aactacggctaggtgcgggtcgggtgttaatcggccgaggtctgctcgggctcctggtgcagcagatcatcttcttcctgggaaccacggccctggccttcctggtgctcatgcctgtgctccatggcaggaacctcctgctcttccgttccctggagtcctcgtggcccttctggctgactttggccctggctgtgatcctgcagaacatggcagcccattgggtcttcctggagactcatgatggacacccacagctgaccaaccggcgagtgctctatgcagccacctttcttctcttccccctcaatgtgctggtgggtgccatggtggccacctggcgagtgctcctctctgccctctacaacgccatccaccttggccagatggacctcagcctgctgccaccgagagccgccactctcgaccccggctactacacgtaccgaaacttcttgaagattgaagtcagccagtcgcatccagccatgacagccttctgctccctgctcctgcaagcgcagagcctcctacccaggaccatggcagccccccaggacagcctcagaccaggggaggaagacgaagggatgcagctgctacagacaaaggactccatggccaagggagctaggcccggggccagccgcggcagggctcgctggggtctggcctacacgctgctgcacaacccaaccctgcaggtcttccgcaagacggccctgttgggtgccaatggtgcccagccctgagggcagggaaggtcaacccacctgcccatctgtgctgaggcatgttcctgcctaccatcctcctccctccccggctctcctcccagcatcacaccagccatgcagccagcaggtcctccggatcactgtggttgggtggaggtctgtctgcactgggagcctcaggagggctctgctccacccacttggctatgggagagccagcaggggttctggagaaaaaaactggtgggttagggccttggtccaggagccagttgagccagggcagccacatccaggcgtctccctaccctggctctgccatcagccttgaagggcctcgatgaagccttctctggaaccactccagcccagctccacctcagccttggccttcacgctgtggaagcagccaaggcacttcctcaccccctcagcgccacggacctctctggggagtggccggaaagctcccgggcctctggcctgcagggcagcccaagtcatgactcagaccaggtcccacactgagctgcccacactcgagagccagatatttttgtagtttttatgcctttggctattatgaaagaggttagtgtgttccctgcaataaacttgttcctgagaaactgtcaaaaaagcaaaa

SEQ ID NO: 41300 - DNA, 1933 bp, Homo sapiens
cccgtgccagcttgctcaggccctcagtcccagacgggcttttcccagagagctaaaagagaagggccagagaatgtcgtcccagccagcagggaaccagacctcccccggggccacagaggactactcctatggcagctggtacatcgatgagccccaggggggcgaggagctccagccagagggggaagtgccctcctgccacaccagcataccacccggcctgtaccacgcctgcctggcctcgctgtcaatccttgtgctgctgctcctggccatgctggtgaggcgccgccagctctggcctgactgtgtgcgtggcaggcccggcctgcccagccctgtggatttcttggctggggacaggccccgggcagtgcctgctgctgttttcatggtcctcctgagctccctgtgtttgctgctccccgacgaggacgcattgcccttcctgactctcgcctcagcacccagccaagatgggaaaactgaggctccaagaggggcctggaagatactgggactgttctattatgctgccctctactaccctctggctgcctgtgccacggctggccacacagctgcacacctgctcggcagcacgctgtcctgggcccaccttggggtccaggtctggcagagggcagagtgtccccaggtgcccaagatctacaagtactactccctgctggcctccctgcctctcctgctgggcctcggattcctgagcctttggtaccctgtgcagctggtgagaagcttcagccgtaggacaggagcaggctccaaggggctgcagagcagctactctgaggaatatctgaggaacctcctttgcaggaagaagctgggaagcagctaccacacctccaagcatggcttcctgtcctgggcccgcgtctgcttgagacactgcatctacactccacagccaggattccatctcccgctgaagctggtgctttcagctacactgacagggacggccatttaccaggtggccctgctgctgctggtgggcgtggtacccactatccagaaggtgagggcaggggtcaccacggatgtctcctacctgctggccggctttggaatcgtgctctccgaggacaagcaggaggtggtggagctggtgaagcaccatctgtgggctctggaagtgtgctacatctcagccttggtcttgtcctgcttactcaccttcctggtcctgatgcgctcactggtgacacacaggaccaaccttcgagctctgcaccgaggagctgccctggacttgagtcccttgcatcggagtccccatccctcccgccaagccatattctgttggatgagcttcagtgcctaccagacagcctttatctgccttggtgagcctcccttgcccgccacacccagccttggcctgggcctcccctcagacactggcctcagttggggagaagagtgctcagcaagtactgccctcagagtttgtctgggaatgctctggggcagcagcaagaaggagggacccccctgccttccctgcccttaagaagcttattcaggatgggggtacaggagccctcgggaaattgagtgtgtaccctccacatggagatgaaccctgggtgccaccaagtattcacatgggggtggacccaggtctggaggtgtcaaattcaaaatggtacattcctggctgggctcagtggctcacacctgtaatcccagcactttgggaggctgaggcaggtggatcacgaagtcaggagatgaagaccagcctggccaacatggtgagaccccgtctctactaaaaatacaaaaattagccgggtatggtggtgtgcacctgcagttccagctattcgggaggatgaggcaggagaatcgcttgaacccaggaggtggaggttgcagtgagccgagattgcacactgcgctc

SEQ ID NO: 41301 - DNA, 437 bp, Homo sapiens
gggttggctgggtgtttgctgagtgactcacagaaagtccgtctctctcagggatgcagctgctacagacaaaggactccatggccaagggagctaggcccggggccagccgcggcagggctcgctggggtctggcctacacgctgctgcacaacccaaccctgcaggtcttccgcaagacggccctgttgggtgccaatggtgcccagccctgagggcagggaaggtcaacccacctgcccatctgtgctgaggcatgttcctgcctaccatcctcctccctccccggctctcctcccagcatcacaccagccatgcagccagcaggtcctccggatcactgtggttgggtggaggtctgtctgcactgggagcctcaggagggctctgctccacccacttggctatgggagagccagcaggggttctggagaaaa

SEQ ID NO: 41302 - DNA, 854 bp, Homo sapiens
tcaggctaggtagagcctggtgttaagtcggtcgaggggtggccctgctgctgctggtgggcgtggtacccactatccagaaggtgagggcaggggtcaccacggatgtctcctacctgctggccggctttggaatcgtgctctccgaggacaagcaggaggtggtggagctggtgaagcaccatctgtgggctctggaagtgtgctacatctcagccttggtcttgtcctgcttactcaccttcctggtcctgatgcgctcactggtgacacacaggaccaaccttcgagctctgcaccgaggagctgccctggacttgagtcccttgcatcggagtccccatccctcccgccaagccatattctgttggatgagcttcagtgcctaccagacagcctttatctgccttgggctcctggtgcagcagatcatcttcttcctgggaaccacggccctggccttcctggtgctcatgcctgtgctccatggcaggaacctcctgctcttccgttccctggagtcctcgtggcccttctggctgactttggccctggctgtgatcctgcagaacatggcagcccattgggtcttcctggagactcatgatggacacccacagctgaccaaccggcgagtgctctatgcagccacctttcttctcttccccctcaatgtgctggtgggtgccatggtggccacctggcgagtgctcctctctgccctctacaacgccatccaccttggccagatggacctcagcctgctgccaccgagagccgccactctcgaccccgtataaagcccgagatcttgaaatgagtgcaccttcaacataactcttccgactctgaga

SEQ ID NO: 41303 - DNA, 2820 bp, Homo sapiens
cacaaccagccacccctctaggatcccagcccagctggtgctgggctcagaggagaaggccccgtgttgggagcaccctgcttgcctggagggacaagtttccgggagagatcaataaaggaaaggaaagagacaaggaagggagaggtcaggagagcgcttgattggaggagaagggccagagaatgtcgtcccagccagcagggaaccagacctcccccggggccacagaggactactcctatggcagctggtacatcgatgagccccaggggggcgaggagctccagccagagggggaagtgccctcctgccacaccagcataccacccggcctgtaccacgcctgcctggcctcgctgtcaatccttgtgctgctgctcctggccatgctggtgaggcgccgccagctctggcctgactgtgtgcgtggcaggcccggcctgcccagccctgtggatttcttggctggggacaggccccgggcagtgcctgctgctgttttcatggtcctcctgagctccctgtgtttgctgctccccgacgaggacgcattgcccttcctgactctcgcctcagcacccagccaagatgggaaaactgaggctccaagaggggcctggaagatactgggactgttctattatgctgccctctactaccctctggctgcctgtgccacggctggccacacagctgcacacctgctcggcagcacgctgtcctgggcccaccttggggtccaggtctggcagagggcagagtgtccccaggtgcccaagatctacaagtactactccctgctggcctccctgcctctcctgctgggcctcggattcctgagcctttggtaccctgtgcagctggtgagaagcttcagccgtaggacaggagcaggctccaaggggctgcagagcagctactctgaggaatatctgaggaacctcctttgcaggaagaagctgggaagcagctaccacacctccaagcatggcttcctgtcctgggcccgcgtctgcttgagacactgcatctacactccacagccaggattccatctcccgctgaagctggtgctttcagctacactgacagggacggccatttaccaggtggccctgctgctgctggtgggcgtggtacccactatccagaaggtgagggcaggggtcaccacggatgtctcctacctgctggccggctttggaatcgtgctctccgaggacaagcaggaggtggtggagctggtgaagcaccatctgtgggctctggaagtgtgctacatctcagccttggtcttgtcctgcttactcaccttcctggtcctgatgcgctcactggtgacacacaggaccaaccttcgagctctgcaccgaggagctgccctggacttgagtcccttgcatcggagtccccatccctcccgccaagccatattctgttggatgagcttcagtgcctaccagacagcctttatctgccttgggctcctggtgcagcagatcatcttcttcctgggaaccacggccctggccttcctggtgctcatgcctgtgctccatggcaggaacctcctgctcttccgttccctggagtcctcgtggcccttctggctgactttggccctggctgtgatcctgcagaacatggcagcccattgggtcttcctggagactcatgatggacacccacagctgaccaaccggcgagtgctctatgcagccacctttcttctcttccccctcaatgtgctggtgggtgccatggtggccacctggcgagtgctcctctctgccctctacaacgccatccaccttggccagatggacctcagcctgctgccaccgagagccgccactctcgaccccggctactacacgtaccgaaacttcttgaagattgaagtcagccagtcgcatccagccatgacagccttctgctccctgctcctgcaagcgcagagcctcctacccaggaccatggcagccccccaggacagcctcagaccaggggaggaagacgaagggatgcagctgctacagacaaaggactccatggccaagggagctaggcccggggccagccgcggcagggctcgctggggtctggcctacacgctgctgcacaacccaaccctgcaggtcttccgcaagacggccctgttgggtgccaatggtgcccagccctgagggcagggaaggtcaacccacctgcccatctgtgctgaggcatgttcctgcctaccatcctcctccctccccggctctcctcccagcatcacaccagccatgcagccagcaggtcctccggatcactgtggttgggtggaggtctgtctgcactgggagcctcaggagggctctgctccacccacttggctatgggagagccagcaggggttctggagaaaaaaactggtgggttagggccttggtccaggagccagttgagccagggcagccacatccaggcgtctccctaccctggctctgccatcagccttgaagggcctcgatgaagccttctctggaaccactccagcccagctccacctcagccttggccttcacgctgtggaagcagccaaggcacttcctcaccccctcagcgccacggacctctctggggagtggccggaaagctcccgggcctctggcctgcagggcagcccaagtcatgactcagaccaggtcccacactgagctgcccacactcgagagccagatatttttgtagtttttatgcctttggctattatgaaagaggttagtgtgttccctgcaataaacttgttcctgagaaactgtcaaaaaagcaaaa

SEQ ID NO: 41304 - DNA, 2694 bp, Homo sapiens
gggcgggcagggcttgggagctctggggcaggcgctgaaggcaggagaagggccagagaatgtcgtcccagccagcagggaaccagacctcccccggggccacagaggactactcctatggcagctggtacatcgatgagccccaggggggcgaggagctccagccagagggggaagtgccctcctgccacaccagcataccacccggcctgtaccacgcctgcctggcctcgctgtcaatccttgtgctgctgctcctggccatgctggtgaggcgccgccagctctggcctgactgtgtgcgtggcaggcccggcctgcccagccctgtggatttcttggctggggacaggccccgggcagtgcctgctgctgttttcatggtcctcctgagctccctgtgtttgctgctccccgacgaggacgcattgcccttcctgactctcgcctcagcacccagccaagatgggaaaactgaggctccaagaggggcctggaagatactgggactgttctattatgctgccctctactaccctctggctgcctgtgccacggctggccacacagctgcacacctgctcggcagcacgctgtcctgggcccaccttggggtccaggtctggcagagggcagagtgtccccaggtgcccaagatctacaagtactactccctgctggcctccctgcctctcctgctgggcctcggattcctgagcctttggtaccctgtgcagctggtgagaagcttcagccgtaggacaggagcaggctccaaggggctgcagagcagctactctgaggaatatctgaggaacctcctttgcaggaagaagctgggaagcagctaccacacctccaagcatggcttcctgtcctgggcccgcgtctgcttgagacactgcatctacactccacagccaggattccatctcccgctgaagctggtgctttcagctacactgacagggacggccatttaccaggtggccctgctgctgctggtgggcgtggtacccactatccagaaggtgagggcaggggtcaccacggatgtctcctacctgctggccggctttggaatcgtgctctccgaggacaagcaggaggtggtggagctggtgaagcaccatctgtgggctctggaagtgtgctacatctcagccttggtcttgtcctgcttactcaccttcctggtcctgatgcgctcactggtgacacacaggaccaaccttcgagctctgcaccgaggagctgccctggacttgagtcccttgcatcggagtccccatccctcccgccaagccatattctgttggatgagcttcagtgcctaccagacagcctttatctgccttgggctcctggtgcagcagatcatcttcttcctgggaaccacggccctggccttcctggtgctcatgcctgtgctccatggcaggaacctcctgctcttccgttccctggagtcctcgtggcccttctggctgactttggccctggctgtgatcctgcagaacatggcagcccattgggtcttcctggagactcatgatggacacccacagctgaccaaccggcgagtgctctatgcagccacctttcttctcttccccctcaatgtgctggtgggtgccatggtggccacctggcgagtgctcctctctgccctctacaacgccatccaccttggccagatggacctcagcctgctgccaccgagagccgccactctcgaccccggctactacacgtaccgaaacttcttgaagattgaagtcagccagtcgcatccagccatgacagccttctgctccctgctcctgcaagcgcagagcctcctacccaggaccatggcagccccccaggacagcctcagaccaggggaggaagacgaagggatgcagctgctacagacaaaggactccatggccaagggagctaggcccggggccagccgcggcagggctcgctggggtctggcctacacgctgctgcacaacccaaccctgcaggtcttccgcaagacggccctgttgggtgccaatggtgcccagccctgagggcagggaaggtcaacccacctgcccatctgtgctgaggcatgttcctgcctaccatcctcctccctccccggctctcctcccagcatcacaccagccatgcagccagcaggtcctccggatcactgtggttgggtggaggtctgtctgcactgggagcctcaggagggctctgctccacccacttggctatgggagagccagcaggggttctggagaaaaaaactggtgggttagggccttggtccaggagccagttgagccagggcagccacatccaggcgtctccctaccctggctctgccatcagccttgaagggcctcgatgaagccttctctggaaccactccagcccagctccacctcagccttggccttcacgctgtggaagcagccaaggcacttcctcaccccctcagcgccacggacctctctggggagtggccggaaagctcccgggcctctggcctgcagggcagcccaagtcatgactcagaccaggtcccacactgagctgcccacactcgagagccagatatttttgtagtttttatgcctttggctattatgaaagaggttagtgtgttccctgcaataaacttgttcctgagaaactgtcaaaaaagcaaaa

SEQ ID NO: 41305 - DNA, 3026 bp, Homo sapiens
cccgtgccagcttgctcaggccctcagtcccagacgggcttttcccagagagctaaaagtaagaaagtaaccttcaggattaaagagaaatgtttctttgtttgggttttccgtctttctttctttttttttctcttttaagcctcttttcacatctgtagtggctttttttttctctcgcctggggtcaaaggagaagggccagagaatgtcgtcccagccagcagggaaccagacctcccccggggccacagaggactactcctatggcagctggtacatcgatgagccccaggggggcgaggagctccagccagagggggaagtgccctcctgccacaccagcataccacccggcctgtaccacgcctgcctggcctcgctgtcaatccttgtgctgctgctcctggccatgctggtgaggcgccgccagctctggcctgactgtgtgcgtggcaggcccggcctgcccagccctgtggatttcttggctggggacaggccccgggcagtgcctgctgctgttttcatggtcctcctgagctccctgtgtttgctgctccccgacgaggacgcattgcccttcctgactctcgcctcagcacccagccaagatgggaaaactgaggctccaagaggtaacttgcccaagatcacagagttgagactagtcagagcctggatttgaacctagtgttcttgcccactgaacgtgctgaagggcttggaagctggagaccgaagagaggcctgggtgggctcactgcaggccccatgtctgcccctccagcatgggtctctctgcttgtttcaccttccaggggcctggaagatactgggactgttctattatgctgccctctactaccctctggctgcctgtgccacggctggccacacagctgcacacctgctcggcagcacgctgtcctgggcccaccttggggtccaggtctggcagagggcagagtgtccccaggtgcccaagatctacaagtactactccctgctggcctccctgcctctcctgctgggcctcggattcctgagcctttggtaccctgtgcagctggtgagaagcttcagccgtaggacaggagcaggctccaaggggctgcagagcagctactctgaggaatatctgaggaacctcctttgcaggaagaagctgggaagcagctaccacacctccaagcatggcttcctgtcctgggcccgcgtctgcttgagacactgcatctacactccacagccaggattccatctcccgctgaagctggtgctttcagctacactgacagggacggccatttaccaggtggccctgctgctgctggtgggcgtggtacccactatccagaaggtgagggcaggggtcaccacggatgtctcctacctgctggccggctttggaatcgtgctctccgaggacaagcaggaggtggtggagctggtgaagcaccatctgtgggctctggaagtgtgctacatctcagccttggtcttgtcctgcttactcaccttcctggtcctgatgcgctcactggtgacacacaggaccaaccttcgagctctgcaccgaggagctgccctggacttgagtcccttgcatcggagtccccatccctcccgccaagccatattctgttggatgagcttcagtgcctaccagacagcctttatctgccttgggctcctggtgcagcagatcatcttcttcctgggaaccacggccctggccttcctggtgctcatgcctgtgctccatggcaggaacctcctgctcttccgttccctggagtcctcgtggcccttctggctgactttggccctggctgtgatcctgcagaacatggcagcccattgggtcttcctggagactcatgatggacacccacagctgaccaaccggcgagtgctctatgcagccacctttcttctcttccccctcaatgtgctggtgggtgccatggtggccacctggcgagtgctcctctctgccctctacaacgccatccaccttggccagatggacctcagcctgctgccaccgagagccgccactctcgaccccggctactacacgtaccgaaacttcttgaagattgaagtcagccagtcgcatccagccatgacagccttctgctccctgctcctgcaagcgcagagcctcctacccaggaccatggcagccccccaggacagcctcagaccaggggaggaagacgaagggatgcagctgctacagacaaaggactccatggccaagggagctaggcccggggccagccgcggcagggctcgctggggtctggcctacacgctgctgcacaacccaaccctgcaggtcttccgcaagacggccctgttgggtgccaatggtgcccagccctgagggcagggaaggtcaacccacctgcccatctgtgctgaggcatgttcctgcctaccatcctcctccctccccggctctcctcccagcatcacaccagccatgcagccagcaggtcctccggatcactgtggttgggtggaggtctgtctgcactgggagcctcaggagggctctgctccacccacttggctatgggagagccagcaggggttctggagaaaaaaactggtgggttagggccttggtccaggagccagttgagccagggcagccacatccaggcgtctccctaccctggctctgccatcagccttgaagggcctcgatgaagccttctctggaaccactccagcccagctccacctcagccttggccttcacgctgtggaagcagccaaggcacttcctcaccccctcagcgccacggacctctctggggagtggccggaaagctcccgggcctctggcctgcagggcagcccaagtcatgactcagaccaggtcccacactgagctgcccacactcgagagccagatatttttgtagtttttatgcctttggctattatgaaagaggttagtgtgttccctgcaataaacttgttcctgagaaactgtcaaaaaagcaaaa

SEQ ID NO: 41306 - DNA, 616 bp, Homo sapiens
agaggtaccagacacctcctcttcataatatccaagctaaaaactacaaaaatatctggctctcctcccagcatcacaccagccatgcagccagcaggtcctccggatcactgtggttgggtggaggtctgtctgcactgggagcctcaggagggctctgctccacccacttggctatgggagagccagcaggggttctggagaaaaaaactggtgggttagggccttggtccaggagccagttgagccagggcagccacatccaggcgtctccctaccctggctctgccatcagccttgaagggcctcgatgaagccttctctggaaccactccagcccagctccacctcagccttggccttcacgctgtggaagcagccaaggcacttcctcaccccctcagcgccacggacctctctggggagtggccggaaagctcccgggcctctggcctgcagggcagcccaagtcatgactcagaccaggtcccacactgagctgcccacactcgagagccagatatttttgtagtttttatgcctttggctattatgaaagaggttagtgtgttccctgcaataaacttgttcctgagaaactgtcaaaaaagcaaaa

SEQ ID NO: 41307 - DNA, 1188 bp, Homo sapiens
cacaaccagccacccctctaggatcccagcccagctggtgctgggctcagaggagaaggccccgtgttgggagcaccctgcttgcctggagggacaagtttccgggagagatcaataaaggaaaggaaagagacaaggaagggagaggtcaggagagcgcttgattggaggagaagggccagagaatgtcgtcccagccagcagggaaccagacctcccccggggccacagaggactactcctatggcagctggtacatcgatgagccccaggggggcgaggagctccagccagagggggaagtgccctcctgccacaccagcataccacccggcctgtaccacgcctgcctggcctcgctgtcaatccttgtgctgctgctcctggccatgctggtgaggcgccgccagctctggcctgactgtgtgcgtggcaggcccggcctgcccagccctgtggatttcttggctggggacaggccccgggcagtgcctgctgctgttttcatggtcctcctgagctccctgtgtttgctgctccccgacgaggacgcattgcccttcctgactctcgcctcagcacccagccaagatgggaaaactgaggctccaagaggggcctggaagatactgggactgttctattatgctgccctctactaccctctggctgcctgtgccacggctggccacacagctgcacacctgctcggcagcacgctgtcctgggcccaccttggggtccaggtctggcagagggcagagtgtccccaggtgcccaagatctacaagtactactccctgctggcctccctgcctctcctgctgggcctcggattcctgagcctttggtaccctgtgcagctggtgagaagcttcagccgtaggacaggagcaggctccaagggtgcagagcagtactctgaggaatatccgagggaacctcctttgacgggaacaggtggggaagaagttacccaactccaagaatggctcctggctggggcccgcgctggctgaggacctgcgtctacattcccacgacagagtccacttccagggaagctggtgttcatctcactcgacaggagaggcgctacaacaggggccacagccgggggggggcgtcaccaacacaagaggggggggagccacgcaggtgctcactagcgcagcgcaggtccgaacg

SEQ ID NO: 41308 - DNA, 449 bp, Homo sapiens
gtcccctccttttctttagttatttcaccactaagtcatgacttcctgttagaggcttccagttctggcagtatttggttcctatttcacaagaagccagtctgttacattgtggcttttagtgctaacaagaaatcagtggtttagggtctttggccaggagaacagtgtaattagaagttaaactgaggtttaaacagtaatttaaccccacccaaattttcacaccaaatgagaattctaacatcaccttgccaaaaaaaaggtacactcttcaaagtgttagcccctaaaatgttagactgatcaacattgtaagtaaatataagagatgaaagttattgtcagataattacctccaggacagataactgactcggaaagtctttagatttgagatctcttgagctatgacccttataccaaattaggtaaagagcttacggtac

SEQ ID NO: 41309 - DNA, 562 bp, Homo sapiens
ggccgcggaagcagggagcacgggcgggcgccgggcttgccaccatcgccatcttgcagcgcccgcgtcctgggccggcccgagccgctgcgcggagcctctctttccctcgacccggctgcaaaggcagagtccgtgcgcctgagccccgggccgagactggagcgttctctggcggcctccaagggcgccggtgtctggaagcccggcctgggccagatcccttttgctgtcgtctccgtgattgccgggacagaattcccttccagtggggaaaagggaaggcggtcgcgcccttcccggtgccctgagtggggaggtgaaaccctgagagttggggcaagagggcctggagctagggccgaggcggcgggtgcgcagggtgttccgttgagcccgagccccccctcccccctccccggcctctccaccgtttctgtaggagcgcggcagggagcacacgtccctcgggaagaaaacggcgctggcggctgggcccgcaccgcggccgtcctcgctgagctcctagcgcgtggcctttgcgcgtctgtgtacccgtctg

SEQ ID NO: 41310 - DNA, 2344 bp, Homo sapiens
ggtcttgcgcatgcgcgggccgctgcgtgtgcgcgagcgccgcagtctgctctccccgcccgcggcccgtgcagtaagactttgaccccgacgcaggcttcagtgattgccgcggatcagaagcctgagcactttggctcgagacaattaaggacgtgggatgaggctccgagacaggacgcggttctgcctggggatcctgaagataaaaagctttgaaaagtcgaattcatggtcgtggaagctgagcccatattaagagatgtcaggcgtccgacctccgatcatgaacgggcccctgcacccgcggcccctggtggcattgctggatggccgggactgcacagtggagatgcccatcctgaaggacgtggccactgtggccttctgcgacgcgcagtccacgcaggagatccatgagaaggtcctgaacgaggctgtgggggccctgatgtaccacaccatcactctcaccagggaggacctggagaagttcaaagccctccgcatcatcgtccggattggcagtggttttgacaacatcgacatcaagtcggccggggatttaggcattgccgtctgcaacgtgcccgcggcgtctgtggaggagacggccgactcgacgctgtgccacatcctgaacctgtaccggcgggccacctggctgcaccaggcgctgcgggagggcacacgagtccagagcgtcgagcagatccgcgaggtggcgtccggcgctgccaggatccgcggggagaccttgggcatcatcggacttggtcgcgtggggcaggcagtggcgctgcgggccaaggccttcggcttcaacgtgctcttctacgacccttacttgtcggatggcgtggagcgggcgctggggctgcagcgtgtcagcaccctgcaggacctgctcttccacagcgactgcgtgaccctgcactgcggcctcaacgagcacaaccaccacctcatcaacgacttcaccgtcaagcagatgagacaaggggccttcctggtgaacacagcccggggtggcctggtggatgagaaggcgctggcccaggccctgaaggagggccggatccgcggcgcggccctggatgtgcacgagtcggaacccttcagctttagccagggccctctgaaggatgcacccaacctcatctgcaccccccatgctgcatggtacagcgagcaggcatccatcgagatgcgagaggaggcggcacgggagatccgcagagccatcacaggccggatcccagacagcctgaagaactgtgtcaacaaggaccatctgacagccgccacccactgggccagcatggaccccgccgtcgtgcaccctgagctcaatggggctgcctataggtaccctccgggcgtggtgggcgtggcccccactggcatcccagctgctgtggaaggtatcgtccccagcgccatgtccctgtcccacggcctgccccctgtggcccacccgccccacgccccttctcctggccaaaccgtcaagcccgaggcggatagagaccacgccagtgaccagttgtagcccgggaggagctctccagcctcggcgcctgggcagagggcccggaaaccctcggaccagagtgtgtggaggaggcatctgtgtggtggccctggcactgcagagactggtccgggctgtcaggaggcgggagggggcagcgctgggcctcgtgtcgcttgtcgtcgtccgtcctgtgggcgctctgccctgtgtccttcgcgttcctcgttaagcagaagaagtcagtagttattctcccatgaacgttcttgtctgtgtacagtttttagaacattacaaaggatctgtttgcttagctgtcaacaaaaagaaaacctgaaggagcatttggaagtcaatttgaggtttttttttttggtttttttttttttgtatgttggaacgtgccccagaatgaggcagttggcaaacttctcaggacaatgaatccttcccgtttttctttttatgccacacagtgcattgttttttctacctgcttgtcttatttttagaataatttagaaaaacaaaacaaaggctgtttttcctaattttggcatgaacccccccttgttccaaatgaagacggcatcacgaagcagctccaaaaggaaaagcttgggcggtgcccagcgtgcccgctgcccatcgacgtctgtcctggggacgtggagggtggcagcgtccccgcctgcaccagtgccgtcctgctgatgtggtaggctagcaatattttggttaaaatcatgtttgtgactgtaaccatttgtatgaattattttaaagaaataaaaatcctggaaagag

SEQ ID NO: 41311 - DNA, 2527 bp, Homo sapiens
gcagagcctttccgcagtttccctgcccacagcacacaccctgtgccctccgccccctggttcttggacactggggacatctggatgcggctagagcctgtgggggtggccgcagccctgggggactgttcccaggagtaggcctcggggccacaggggcgcggcctcgggcctggcactgcaacctcagggtgagcgcccttcgtgtgtgcggcaggagccggggcccctggctgtcagcaggcccccgagtccagtaagactttgaccccgacgcaggcttcagtgattgccgcggatcagaagcctgagcactttggctcgagacaattaaggacgtgggatgaggctccgagacaggacgcggttctgcctggggatcctgaagataaaaagctttgaaaagtcgaattcatggtcgtggaagctgagcccatattaagagatgtcaggcgtccgacctccgatcatgaacgggcccctgcacccgcggcccctggtggcattgctggatggccgggactgcacagtggagatgcccatcctgaaggacgtggccactgtggccttctgcgacgcgcagtccacgcaggagatccatgagaaggtcctgaacgaggctgtgggggccctgatgtaccacaccatcactctcaccagggaggacctggagaagttcaaagccctccgcatcatcgtccggattggcagtggttttgacaacatcgacatcaagtcggccggggatttaggcattgccgtctgcaacgtgcccgcggcgtctgtggaggagacggccgactcgacgctgtgccacatcctgaacctgtaccggcgggccacctggctgcaccaggcgctgcgggagggcacacgagtccagagcgtcgagcagatccgcgaggtggcgtccggcgctgccaggatccgcggggagaccttgggcatcatcggacttggtcgcgtggggcaggcagtggcgctgcgggccaaggccttcggcttcaacgtgctcttctacgacccttacttgtcggatggcgtggagcgggcgctggggctgcagcgtgtcagcaccctgcaggacctgctcttccacagcgactgcgtgaccctgcactgcggcctcaacgagcacaaccaccacctcatcaacgacttcaccgtcaagcagatgagacaaggggccttcctggtgaacacagcccggggtggcctggtggatgagaaggcgctggcccaggccctgaaggagggccggatccgcggcgcggccctggatgtgcacgagtcggaacccttcagctttagccagggccctctgaaggatgcacccaacctcatctgcaccccccatgctgcatggtacagcgagcaggcatccatcgagatgcgagaggaggcggcacgggagatccgcagagccatcacaggccggatcccagacagcctgaagaactgtgtcaacaaggaccatctgacagccgccacccactgggccagcatggaccccgccgtcgtgcaccctgagctcaatggggctgcctataggtaccctccgggcgtggtgggcgtggcccccactggcatcccagctgctgtggaaggtatcgtccccagcgccatgtccctgtcccacggcctgccccctgtggcccacccgccccacgccccttctcctggccaaaccgtcaagcccgaggcggatagagaccacgccagtgaccagttgtagcccgggaggagctctccagcctcggcgcctgggcagagggcccggaaaccctcggaccagagtgtgtggaggaggcatctgtgtggtggccctggcactgcagagactggtccgggctgtcaggaggcgggagggggcagcgctgggcctcgtgtcgcttgtcgtcgtccgtcctgtgggcgctctgccctgtgtccttcgcgttcctcgttaagcagaagaagtcagtagttattctcccatgaacgttcttgtctgtgtacagtttttagaacattacaaaggatctgtttgcttagctgtcaacaaaaagaaaacctgaaggagcatttggaagtcaatttgaggtttttttttttggtttttttttttttgtatgttggaacgtgccccagaatgaggcagttggcaaacttctcaggacaatgaatccttcccgtttttctttttatgccacacagtgcattgttttttctacctgcttgtcttatttttagaataatttagaaaaacaaaacaaaggctgtttttcctaattttggcatgaacccccccttgttccaaatgaagacggcatcacgaagcagctccaaaaggaaaagcttgggcggtgcccagcgtgcccgctgcccatcgacgtctgtcctggggacgtggagggtggcagcgtccccgcctgcaccagtgccgtcctgctgatgtggtaggctagcaatattttggttaaaatcatgtttgtgactgtaaccatttgtatgaattattttaaagaaataaaaatcctggaaagag

SEQ ID NO: 41312 - DNA, 2430 bp, Homo sapiens
ggccgccccacgcgccgggctcgcggcggcgcagcgcgccggagtggtcggggcccgcggccgctcgcgcctctcgatgggcagctcgcacttgctcaacaagggcctgccgcttgtaagactttgaccccgacgcaggcttcagtgattgccgcggatcagaagcctgagcactttggctcgagacaattaaggacgtgggatgaggctccgagacaggacgcggttctgcctggggatcctgaagataaaaagctttgaaaagtcgaattcatggtcgtggaagctgagcccatattaagagatgtcaggcgtccgacctccgatcatgaacgggcccctgcacccgcggcccctggtggcattgctggatggccgggactgcacagtggagatgcccatcctgaaggacgtggccactgtggccttctgcgacgcgcagtccacgcaggagatccatgagaaggtcctgaacgaggctgtgggggccctgatgtaccacaccatcactctcaccagggaggacctggagaagttcaaagccctccgcatcatcgtccggattggcagtggttttgacaacatcgacatcaagtcggccggggatttaggcattgccgtctgcaacgtgcccgcggcgtctgtggaggagacggccgactcgacgctgtgccacatcctgaacctgtaccggcgggccacctggctgcaccaggcgctgcgggagggcacacgagtccagagcgtcgagcagatccgcgaggtggcgtccggcgctgccaggatccgcggggagaccttgggcatcatcggacttggtcgcgtggggcaggcagtggcgctgcgggccaaggccttcggcttcaacgtgctcttctacgacccttacttgtcggatggcgtggagcgggcgctggggctgcagcgtgtcagcaccctgcaggacctgctcttccacagcgactgcgtgaccctgcactgcggcctcaacgagcacaaccaccacctcatcaacgacttcaccgtcaagcagatgagacaaggggccttcctggtgaacacagcccggggtggcctggtggatgagaaggcgctggcccaggccctgaaggagggccggatccgcggcgcggccctggatgtgcacgagtcggaacccttcagctttagccagggccctctgaaggatgcacccaacctcatctgcaccccccatgctgcatggtacagcgagcaggcatccatcgagatgcgagaggaggcggcacgggagatccgcagagccatcacaggccggatcccagacagcctgaagaactgtgtcaacaaggaccatctgacagccgccacccactgggccagcatggaccccgccgtcgtgcaccctgagctcaatggggctgcctataggtaccctccgggcgtggtgggcgtggcccccactggcatcccagctgctgtggaaggtatcgtccccagcgccatgtccctgtcccacggcctgccccctgtggcccacccgccccacgccccttctcctggccaaaccgtcaagcccgaggcggatagagaccacgccagtgaccagttgtagcccgggaggagctctccagcctcggcgcctgggcagagggcccggaaaccctcggaccagagtgtgtggaggaggcatctgtgtggtggccctggcactgcagagactggtccgggctgtcaggaggcgggagggggcagcgctgggcctcgtgtcgcttgtcgtcgtccgtcctgtgggcgctctgccctgtgtccttcgcgttcctcgttaagcagaagaagtcagtagttattctcccatgaacgttcttgtctgtgtacagtttttagaacattacaaaggatctgtttgcttagctgtcaacaaaaagaaaacctgaaggagcatttggaagtcaatttgaggtttttttttttggtttttttttttttgtatgttggaacgtgccccagaatgaggcagttggcaaacttctcaggacaatgaatccttcccgtttttctttttatgccacacagtgcattgttttttctacctgcttgtcttatttttagaataatttagaaaaacaaaacaaaggctgtttttcctaattttggcatgaacccccccttgttccaaatgaagacggcatcacgaagcagctccaaaaggaaaagcttgggcggtgcccagcgtgcccgctgcccatcgacgtctgtcctggggacgtggagggtggcagcgtccccgcctgcaccagtgccgtcctgctgatgtggtaggctagcaatattttggttaaaatcatgtttgtgactgtaaccatttgtatgaattattttaaagaaataaaaatcctggaaagagaaaaaaaaaacaaaccaatgtgcaacactttaagtcaatagaaa

SEQ ID NO: 41313 - DNA, 2385 bp, Homo sapiens
  misc_feature (44)..(44): n is a, c, g, or t
  misc_feature (46)..(46): n is a, c, g, or t
tcgactggtgcagactcagcacatgtgcgtcatattacggtgcncntcgccgctgtgtcaaggactcgtgagccccggagcgcaggctttcagatgagttgcacgcgcgactcacgaagacctagagtcactttgtggtcttccgagaccaaattatagggacagctgggtactgagcgcgtcctgacgacacggcacgcaggattcatgcgctgggggcatctcctgaacgataataatagcgtttgtaataagtctgaatttcattggtctgtgtgaagcctgagcctcatattaatgaagatgtcaggcgtccgacctccgatcatgaacgggcccctgcacccgcggcccctggtggcattgctggatggccgggactgcacagtggagatgcccatcctgaaggacgtggccactgtggccttctgcgacgcgcagtccacgcaggagatccatgagaaggtcctgaacgaggctgtgggggccctgatgtaccacaccatcactctcaccagggaggacctggagaagttcaaagccctccgcatcatcgtccggattggcagtggttttgacaacatcgacatcaagtcggccggggatttaggcattgccgtctgcaacgtgcccgcggcgtctgtggaggagacggccgactcgacgctgtgccacatcctgaacctgtaccggcgggccacctggctgcaccaggcgctgcgggagggcacacgagtccagagcgtcgagcagatccgcgaggtggcgtccggcgctgccaggatccgcggggagaccttgggcatcatcggacttggtcgcgtggggcaggcagtggcgctgcgggccaaggccttcggcttcaacgtgctcttctacgacccttacttgtcggatggcgtggagcgggcgctggggctgcagcgtgtcagcaccctgcaggacctgctcttccacagcgactgcgtgaccctgcactgcggcctcaacgagcacaaccaccacctcatcaacgacttcaccgtcaagcagatgagacaaggggccttcctggtgaacacagcccggggtggcctggtggatgagaaggcgctggcccaggccctgaaggagggccggatccgcggcgcggccctggatgtgcacgagtcggaacccttcagctttagccagggccctctgaaggatgcacccaacctcatctgcaccccccatgctgcatggtacagcgagcaggcatccatcgagatgcgagaggaggcggcacgggagatccgcagagccatcacaggccggatcccagacagcctgaagaactgtgtcaacaaggaccatctgacagccgccacccactgggccagcatggaccccgccgtcgtgcaccctgagctcaatggggctgcctataggtaccctccgggcgtggtgggcgtggcccccactggcatcccagctgctgtggaaggtatcgtccccagcgccatgtccctgtcccacggcctgccccctgtggcccacccgccccacgccccttctcctggccaaaccgtcaagcccgaggcggatagagaccacgccagtgaccagttgtagcccgggaggagctctccagcctcggcgcctgggcagagggcccggaaaccctcggaccagagtgtgtggaggaggcatctgtgtggtggccctggcactgcagagactggtccgggctgtcaggaggcgggagggggcagcgctgggcctcgtgtcgcttgtcgtcgtccgtcctgtgggcgctctgccctgtgtccttcgcgttcctcgttaagcagaagaagtcagtagttattctcccatgaacgttcttgtctgtgtacagtttttagaacattacaaaggatctgtttgcttagctgtcaacaaaaagaaaacctgaaggagcatttggaagtcaatttgaggtttttttttttggtttttttttttttgtatgttggaacgtgccccagaatgaggcagttggcaaacttctcaggacaatgaatccttcccgtttttctttttatgccacacagtgcattgttttttctacctgcttgtcttatttttagaataatttagaaaaacaaaacaaaggctgtttttcctaattttggcatgaacccccccttgttccaaatgaagacggcatcacgaagcagctccaaaaggaaaagcttgggcggtgcccagcgtgcccgctgcccatcgacgtctgtcctggggacgtggagggtggcagcgtccccgcctgcaccagtgccgtcctgctgatgtggtaggctagcaatattttggttaaaatcatgtttgtgactgtaaccatttgtatgaattattttaaagaaataaaaatcctggaaagag

SEQ ID NO: 41314 - DNA, 2507 bp, Homo sapiens
ggccgcggaagcagggagcacgggcgggcgccgggcttgccaccatcgccatcttgcagcgcccgcgtcctgggccggcccgagccgctgcgcggagcctctctttccctcgacccggctgcaaaggcagagtccgtgcgcctgagccccgggccgagactggagcgttctctggcggcctccaagggcgccggtgtctggaagcccggcctgggccagatcccttttgctgtcgtctccgtgattgccgggacagaattcccttccagtggggaaaagtaagactttgaccccgacgcaggcttcagtgattgccgcggatcagaagcctgagcactttggctcgagacaattaaggacgtgggatgaggctccgagacaggacgcggttctgcctggggatcctgaagataaaaagctttgaaaagtcgaattcatggtcgtggaagctgagcccatattaagagatgtcaggcgtccgacctccgatcatgaacgggccctgcacagtggagatgcccatcctgaaggacgtggccactgtggccttctgcgacgcgcagtccacgcaggagatccatgagaaggtcctgaacgaggctgtgggggccctgatgtaccacaccatcactctcaccagggaggacctggagaagttcaaagccctccgcatcatcgtccggattggcagtggttttgacaacatcgacatcaagtcggccggggatttaggcattgccgtctgcaacgtgcccgcggcgtctgtggaggagacggccgactcgacgctgtgccacatcctgaacctgtaccggcgggccacctggctgcaccaggcgctgcgggagggcacacgagtccagagcgtcgagcagatccgcgaggtggcgtccggcgctgccaggatccgcggggagaccttgggcatcatcggacttggtcgcgtggggcaggcagtggcgctgcgggccaaggccttcggcttcaacgtgctcttctacgacccttacttgtcggatggcgtggagcgggcgctggggctgcagcgtgtcagcaccctgcaggacctgctcttccacagcgactgcgtgaccctgcactgcggcctcaacgagcacaaccaccacctcatcaacgacttcaccgtcaagcagatgagacaaggggccttcctggtgaacacagcccggggtggcctggtggatgagaaggcgctggcccaggccctgaaggagggccggatccgcggcgcggccctggatgtgcacgagtcggaacccttcagctttagccagggccctctgaaggatgcacccaacctcatctgcaccccccatgctgcatggtacagcgagcaggcatccatcgagatgcgagaggaggcggcacgggagatccgcagagccatcacaggccggatcccagacagcctgaagaactgtgtcaacaaggaccatctgacagccgccacccactgggccagcatggaccccgccgtcgtgcaccctgagctcaatggggctgcctataggtaccctccgggcgtggtgggcgtggcccccactggcatcccagctgctgtggaaggtatcgtccccagcgccatgtccctgtcccacggcctgccccctgtggcccacccgccccacgccccttctcctggccaaaccgtcaagcccgaggcggatagagaccacgccagtgaccagttgtagcccgggaggagctctccagcctcggcgcctgggcagagggcccggaaaccctcggaccagagtgtgtggaggaggcatctgtgtggtggccctggcactgcagagactggtccgggctgtcaggaggcgggagggggcagcgctgggcctcgtgtcgcttgtcgtcgtccgtcctgtgggcgctctgccctgtgtccttcgcgttcctcgttaagcagaagaagtcagtagttattctcccatgaacgttcttgtctgtgtacagtttttagaacattacaaaggatctgtttgcttagctgtcaacaaaaagaaaacctgaaggagcatttggaagtcaatttgaggtttttttttttggtttttttttttttgtatgttggaacgtgccccagaatgaggcagttggcaaacttctcaggacaatgaatccttcccgtttttctttttatgccacacagtgcattgttttttctacctgcttgtcttatttttagaataatttagaaaaacaaaacaaaggctgtttttcctaattttggcatgaacccccccttgttccaaatgaagacggcatcacgaagcagctccaaaaggaaaagcttgggcggtgcccagcgtgcccgctgcccatcgacgtctgtcctggggacgtggagggtggcagcgtccccgcctgcaccagtgccgtcctgctgatgtggtaggctagcaatattttggttaaaatcatgtttgtgactgtaaccatttgtatgaattattttaaagaaataaaaatcctggaaagag

SEQ ID NO: 41315 - DNA, 2417 bp, Homo sapiens
ggccgccccacgcgccgggctcgcggcggcgcagcgcgccggagtggtcggggcccgcggccgctcgcgcctctcgatgggcagctcgcacttgctcaacaagggcctgccgcttgtaagactttgaccccgacgcaggcttcagtgattgccgcggatcagaagcctgagcactttggctcgagacaattaaggacgtgggatgaggctccgagacaggacgcggttctgcctggggatcctgaagataaaaagctttgaaaagtcgaattcatggtcgtggaagctgagcccatattaagagatgtcaggcgtccgacctccgatcatgaacgggcccctgcacccgcggcccctggtggcattgctggatggccgggactgcacagtggagatgcccatcctgaaggacgtggccactgtggccttctgcgacgcgcagtccacgcaggagatccatgagaaggtcctgaacgaggctgtgggggccctgatgtaccacaccatcactctcaccagggaggacctggagaagttcaaagccctccgcatcatcgtccggattggcagtggttttgacaacatcgacatcaagtcggccggggatttaggcattgccgtctgcaacgtgcccgcggcgtctgtggaggagacggccgactcgacgctgtgccacatcctgaacctgtaccggcgggccacctggctgcaccaggcgctgcgggagggcacacgagtccagagcgtcgagcagatccgcgaggtggcgtccggcgctgccaggatccgcggggagaccttgggcatcatcggacttggtcgcgtggggcaggcagtggcgctgcgggccaaggccttcggcttcaacgtgctcttctacgacccttacttgtcggatggcgtggagcgggcgctggggctgcagcgtgtcagcaccctgcaggacctgctcttccacagcgactgcgtgaccctgcactgcggcctcaacgagcacaaccaccacctcatcaacgacttcaccgtcaagcagatgagacaaggggccttcctggtgaacacagcccggggtggcctggtggatgagaaggcgctggcccaggccctgaaggagggccggatccgcggcgcggccctggatgtgcacgagtcggaacccttcagctttagccagggccctctgaaggatgcacccaacctcatctgcaccccccatgctgcatggtacagcgagcaggcatccatcgagatgcgagaggaggcggcacgggagatccgcagagccatcacaggccggatcccagacagcctgaagaactgtgtcaacaaggaccatctgacagccgccacccactgggccagcatggaccccgccgtcgtgcaccctgagctcaatggggctgcctataggtaccctccgggcgtggtgggcgtggcccccactggcatcccagctgctgtggaaggtatcgtccccagcgccatgtccctgtcccacggcctgccccctgtggcccacccgccccacgccccttctcctggccaaaccgtcaagcccgaggcggatagagaccacgccagtgaccagttgtagcccgggaggagctctccagcctcggcgcctgggcagagggcccggaaaccctcggaccagagtgtgtggaggaggcatctgtgtggtggccctggcactgcagagactggtccgggctgtcaggaggcgggagggggcagcgctgggcctcgtgtcgcttgtcgtcgtccgtcctgtgggcgctctgccctgtgtccttcgcgttcctcgttaagcagaagaagtcagtagttattctcccatgaacgttcttgtctgtgtacagtttttagaacattacaaaggatctgtttgcttagctgtcaacaaaaagaaaacctgaaggagcatttggaagtcaatttgaggtttttttttttggtttttttttttttgtatgttggaacgtgccccagaatgaggcagttggcaaacttctcaggacaatgaatccttcccgtttttctttttatgccacacagtgcattgttttttctacctgcttgtcttatttttagaataatttagaaaaacaaaacaaaggctgtttttcctaattttggcatgaacccccccttgttccaaatgaagacggcatcacgaagcagctccaaaaggaaaagcttgggcggtgcccagcgtgcccgctgcccatcgacgtctgtcctggggacgtggagggtggcagcgtccccgcctgcaccagtgccgtcctgctgatgtggtaggctagcaatattttggttaaaatcatgtttgtgactgtaaccatttgtatgaattattttaaagaaataaaaatcctggaaagagaagagccagcgtgcccagcaaatctattctg

SEQ ID NO: 41316 - DNA, 2036 bp, Homo sapiens
ggccgccccacgcgccgggctcgcggcggcgcagcgcgccggagtggtcggggcccgcggccgctcgcgcctctcgatgggcagctcgcacttgctcaacaagggcctgccgcttggtcctgaacgaggctgtgggggccctgatgtaccacaccatcactctcaccagggaggacctggagaagttcaaagccctccgcatcatcgtccggattggcagtggttttgacaacatcgacatcaagtcggccggggatttaggcattgccgtctgcaacgtgcccgcggcgtctgtggaggagacggccgactcgacgctgtgccacatcctgaacctgtaccggcgggccacctggctgcaccaggcgctgcgggagggcacacgagtccagagcgtcgagcagatccgcgaggtggcgtccggcgctgccaggatccgcggggagaccttgggcatcatcggacttggtcgcgtggggcaggcagtggcgctgcgggccaaggccttcggcttcaacgtgctcttctacgacccttacttgtcggatggcgtggagcgggcgctggggctgcagcgtgtcagcaccctgcaggacctgctcttccacagcgactgcgtgaccctgcactgcggcctcaacgagcacaaccaccacctcatcaacgacttcaccgtcaagcagatgagacaaggggccttcctggtgaacacagcccggggtggcctggtggatgagaaggcgctggcccaggccctgaaggagggccggatccgcggcgcggccctggatgtgcacgagtcggaacccttcagctttagccagggccctctgaaggatgcacccaacctcatctgcaccccccatgctgcatggtacagcgagcaggcatccatcgagatgcgagaggaggcggcacgggagatccgcagagccatcacaggccggatcccagacagcctgaagaactgtgtcaacaaggaccatctgacagccgccacccactgggccagcatggaccccgccgtcgtgcaccctgagctcaatggggctgcctataggtaccctccgggcgtggtgggcgtggcccccactggcatcccagctgctgtggaaggtatcgtccccagcgccatgtccctgtcccacggcctgccccctgtggcccacccgccccacgccccttctcctggccaaaccgtcaagcccgaggcggatagagaccacgccagtgaccagttgtagcccgggaggagctctccagcctcggcgcctgggcagagggcccggaaaccctcggaccagagtgtgtggaggaggcatctgtgtggtggccctggcactgcagagactggtccgggctgtcaggaggcgggagggggcagcgctgggcctcgtgtcgcttgtcgtcgtccgtcctgtgggcgctctgccctgtgtccttcgcgttcctcgttaagcagaagaagtcagtagttattctcccatgaacgttcttgtctgtgtacagtttttagaacattacaaaggatctgtttgcttagctgtcaacaaaaagaaaacctgaaggagcatttggaagtcaatttgaggtttttttttttggtttttttttttttgtatgttggaacgtgccccagaatgaggcagttggcaaacttctcaggacaatgaatccttcccgtttttctttttatgccacacagtgcattgttttttctacctgcttgtcttatttttagaataatttagaaaaacaaaacaaaggctgtttttcctaattttggcatgaacccccccttgttccaaatgaagacggcatcacgaagcagctccaaaaggaaaagcttgggcggtgcccagcgtgcccgctgcccatcgacgtctgtcctggggacgtggagggtggcagcgtccccgcctgcaccagtgccgtcctgctgatgtggtaggctagcaatattttggttaaaatcatgtttgtgactgtaaccatttgtatgaattattttaaagaaataaaaatcctggaaagag

SEQ ID NO: 41317 - DNA, 2580 bp, Homo sapiens
ggccgccccacgcgccgggctcgcggcggcgcagcgcgccggagtggtcggggcccgcggccgctcgcgcctctcgatgggcagctcgcacttgctcaacaagggcctgccgcttgtaagactttgaccccgacgcaggcttcagtgattgccgcggatcagaagcctgagcactttggctcgagacaattaaggacgtgggatgaggctccgagacaggacgcggttctgcctggggatcctgaagataaaaagctttgaaaagtcgaattcatggtcgtggaagctgagcccatattaagagatgtcaggcgtccgacctccgatcatgaacgggcccctgcacccgcggcccctggtggcattgctggatggccgggactgcacagtggagatgcccatcctgaaggacgtggccactgtggccttctgcgacgcgcagtccacgcaggagatccatgagaaggtcctgaacgaggctgtgggggccctgatgtaccacaccatcactctcaccagggaggacctggagaagttcaaagccctccgcatcatcgtccggattggcagtggttttgacaacatcgacatcaagtcggccggggatttaggcattgccgtctgcaacgtgcccgcggcgtctgtggaggagacggccgactcgacgctgtgccacatcctgaacctgtaccggcgggccacctggctgcaccaggcgctgcgggagggcacacgagtccagagcgtcgagcagatccgcgaggtggcgtccggcgctgccaggatccgcggggagaccttgggcatcatcggacttggtcgcgtggggcaggcagtggcgctgcgggccaaggccttcggcttcaacgtgctcttctacgacccttacttgtcggatggcgtggagcgggcgctggggctgcagcgtgtcagcaccctgcaggacctgctcttccacagcgactgcgtgaccctgcactgcggcctcaacgagcacaaccaccacctcatcaacgacttcaccgtcaagcagatgagacaaggggccttcctggtgaacacagcccggggtggcctggtggatgagaaggcgctggcccaggccctgaaggagggccggatccgcggcgcggccctggatgtgcacgagtcggaacccttcagctttagccagggccctctgaaggatgcacccaacctcatctgcaccccccatgctgcatggtacagcgagcaggcatccatcgagatgcgagaggaggcggcacgggagatccgcagagccatcacaggccggatcccagacagcctgaagaactgtgtcaacaaggaccatctgacagccgccacccactgggccagcatggaccccgccgtcgtgcaccctgagctcaatggggctgcctataggtaccctccgggcgtggtgggcgtggcccccactggcatcccagctgctgtggaaggtatcgtccccagcgccatgtccctgtcccacggcctgccccctgtggcccacccgccccacgccccttctcctggccaaaccgtcaagcccgaggcggatagagaccacgccagtgaccagttgtagcccgggaggagctctccagcctcggcgcctgggcagagggcccggaaaccctcggaccagagtgtgtggaggaggcatctgtgtggtggccctggcactgcagagactggtccgggctgtcaggaggcgggagggggcagcgctgggcctcgtgtcgcttgtcgtcgtccgtcctgtgggcgctctgccctgtgtccttcgcgttcctcgttaagcagaagaagtcagtagttattctcccatgaacgttcttgtctgtgtacagtttttagaacattacaaaggatctgtttgcttagctgtcaacaaaaagaaaacctgaaggagcatttggaagtcaatttgaggtttttttttttggtttttttttttttgtatgttggaacgtgccccagaatgaggcagttggcaaacttctcaggacaatgaatccttcccgtttttctttttatgccacacagtgcattgttttttctacctgcttgtcttatttttagaataatttagaaaaacaaaacaaaggctgtttttcctaattttggcatgaacccccccttgttccaaatgaagacggcatcacgaagcagctccaaaaggaaaagcttgggcggtgcccagcgtgcccgctgcccatcgacgtctgtcctggggacgtggagggtggcagcgtccccgcctgcaccagtgccgtcctgctgatgtggtaggctagcaatattttggttaaaatcatgtttgtgactgtaaccatttgtatgaattattttaaagaaataaaaatcctggaaagaggtttataaaaataatttgtacttaatcataataaaaaacttcagggggaccctatcccaattcccttatataattcgtttacaattacttgcctcttttacacttgtaactgaaaactcttccttaccaacttatcccgttatcaaactcctgtttccatttctttataccaaaaaccctcaccattccctttc

SEQ ID NO: 41318 - DNA, 2369 bp, Homo sapiens
ggccgccccacgcgccgggctcgcggcggcgcagcgcgccggagtggtcggggcccgcggccgctcgcgcctctcgatgggcagctcgcacttgctcaacaagggcctgccgcttgtaagactttgaccccgacgcaggcttcagtgattgccgcggatcagaagcctgagcactttggctcgagacaattaaggacgtgggatgaggctccgagacaggacgcggttctgcctggggatcctgaagataaaaagctttgaaaagtcgaattcatggtcgtggaagctgagcccatattaagagatgtcaggcgtccgacctccgatcatgaacgggcccctgcacccgcggcccctggtggcattgctggatggccgggactgcacagtggagatgcccatcctgaaggacgtggccactgtggccttctgcgacgcgcagtccacgcaggagatccatgagaaggtcctgaacgaggctgtgggggccctgatgtaccacaccatcactctcaccagggaggacctggagaagttcaaagccctccgcatcatcgtccggattggcagtggttttgacaacatcgacatcaagtcggccggggatttaggcattgccgtctgcaacgtgcccgcggcgtctgtggaggagacggccgactcgacgctgtgccacatcctgaacctgtaccggcgggccacctggctgcaccaggcgctgcgggagggcacacgagtccagagcgtcgagcagatccgcgaggtggcgtccggcgctgccaggatccgcggggagaccttgggcatcatcggacttggtcgcgtggggcaggcagtggcgctgcgggccaaggccttcggcttcaacgtgctcttctacgacccttacttgtcggatggcgtggagcgggcgctggggctgcagcgtgtcagcaccctgcaggacctgctcttccacagcgactgcgtgaccctgcactgcggcctcaacgagcacaaccaccacctcatcaacgacttcaccgtcaagcagatgagacaaggggccttcctggtgaacacagcccggggtggcctggtggatgagaaggcgctggcccaggccctgaaggagggccggatccgcggcgcggccctggatgtgcacgagtcggaacccttcagctttagccagggccctctgaaggatgcacccaacctcatctgcaccccccatgctgcatggtacagcgagcaggcatccatcgagatgcgagaggaggcggcacgggagatccgcagagccatcacaggccggatcccagacagcctgaagaactgtgtcaacaaggaccatctgacagccgccacccactgggccagcatggaccccgccgtcgtgcaccctgagctcaatggggctgcctataggtaccctccgggcgtggtgggcgtggcccccactggcatcccagctgctgtggaaggtatcgtccccagcgccatgtccctgtcccacggcctgccccctgtggcccacccgccccacgccccttctcctggccaaaccgtcaagcccgaggcggatagagaccacgccagtgaccagttgtagcccgggaggagctctccagcctcggcgcctgggcagagggcccggaaaccctcggaccagagtgtgtggaggaggcatctgtgtggtggccctggcactgcagagactggtccgggctgtcaggaggcgggagggggcagcgctgggcctcgtgtcgcttgtcgtcgtccgtcctgtgggcgctctgccctgtgtccttcgcgttcctcgttaagcagaagaagtcagtagttattctcccatgaacgttcttgtctgtgtacagtttttagaacattacaaaggatctgtttgcttagctgtcaacaaaaagaaaacctgaaggagcatttggaagtcaatttgaggtttttttttttggtttttttttttttgtatgttggaacgtgccccagaatgaggcagttggcaaacttctcaggacaatgaatccttcccgtttttctttttatgccacacagtgcattgttttttctacctgcttgtcttatttttagaataatttagaaaaacaaaacaaaggctgtttttcctaattttggcatgaacccccccttgttccaaatgaagacggcatcacgaagcagctccaaaaggaaaagcttgggcggtgcccagcgtgcccgctgcccatcgacgtctgtcctggggacgtggagggtggcagcgtccccgcctgcaccagtgccgtcctgctgatgtggtaggccaccccctccaccctcaacccattttcctagggtttgtgaaataaacttggtatttgtttgggtca

SEQ ID NO: 41319 - DNA, 2241 bp, Homo sapiens
ggccgccccacgcgccgggctcgcggcggcgcagcgcgccggagtggtcggggcccgcggccgctcgcgcctctcgatgggcagctcgcacttgctcaacaagggcctgccgcttgtaagactttgaccccgacgcaggcttcagtgattgccgcggatcagaagcctgagcactttggctcgagacaattaaggacgtgggatgaggctccgagacaggacgcggttctgcctggggatcctgaagataaaaagctttgaaaagtcgaattcatggtcgtggaagctgagcccatattaagagatgtcaggcgtccgacctccgatcatgaacgggcccctgcacccgcggcccctggtggcattgctggatggccgggactgcacagtggagatgcccatcctgaaggacgtggccactgtggccttctgcgacgcgcagtccacgcaggagatccatgagaaggtcctgaacgaggctgtgggggccctgatgtaccacaccatcactctcaccagggaggacctggagaagttcaaagccctccgcatcatcgtccggattggcagtggttttgacaacatcgacatcaagtcggccggggatttaggcattgccgtctgcaacgtgcccgcggcgtctgtggaggagacggccgactcgacgctgtgccacatcctgaacctgtaccggcgggccacctggctgcaccaggcgctgcgggagggcacacgagtccagagcgtcgagcagatccgcgaggtggcgtccggcgctgccaggatccgcggggagaccttgggcatcatcggacttggtcgcgtggggcaggcagtggcgctgcgggccaaggccttcggcttcaacgtgctcttctacgacccttacttgtcggatggcgtggagcgggcgctggggctgcagcgtgtcagcaccctgcaggacctgctcttccacagcgactgcgtgaccctgcactgcggcctcaacgagcacaaccaccacctcatcaacgacttcaccgtcaagcagatgagacaaggggccttcctggtgaacacagcccggggtggcctggtggatgagaaggcgctggcccaggccctgaaggagggccggatccgcggcgcggccctggatgtgcacgagtcggaacccttcagctttagccagggccctctgaaggatgcacccaacctcatctgcaccccccatgctgcatggtacagcgagcaggcatccatcgagatgcgagaggaggcggcacgggagatccgcagagccatcacaggccggatcccagacagcctgaagaactgtgtcaacaaggaccatctgacagccgccacccactgggccagcatggaccccgccgtcgtgcaccctgagctcaatggggctgcctataggtaccctccgggcgtggtgggcgtggcccccactggcatcccagctgctgtggaaggtatcgtccccagcgccatgtccctgtcccacggcctgccccctgtggcccacccgccccacgccccttctcctggccaaaccgtcaagcccgaggcggatagagaccacgccagtgaccagttgtagcccgggaggagctctccagcctcggcgcctgggcagagggcccggaaaccctcggaccagagtgtgtggaggaggcatctgtgtggtggccctggcactgcagagactggtccgggctgtcaggaggcgggagggggcagcgctgggcctcgtgtcgcttgtcgtcgtccgtcctgtgggcgctctgccctgtgtccttcgcgttcctcgttaagcagaagaagtcagtagttattctcccatgaacgttcttgtctgtgtacagtttttagaacattacaaaggatctgtttgcttagctgtcaacaaaaagaaaacctgaaggagcatttggaagtcaatttgaggtttttttttttggtttttttttttttgtatgttggaacgtgccccagaatgaggcagttggcaaacttctcaggacaatgaatccttcccgtttttctttttatgccacacagtgcattgttttttctacctgcttgtcttatttttagaataatttagaaaaacaaaacaaaggctgtttttcctaattttggcatgaacccccccttgttccaaatgaagacggcatgggcctgtgcaacacagagcccgttcctcaggcgagtggtggtgaggtgctctgtggtgatgggaacggc

SEQ ID NO: 41320 - DNA, 2015 bp, Homo sapiens
ggccgccccacgcgccgggctcgcggcggcgcagcgcgccggagtggtcggggcccgcggccgctcgcgcctctcgatgggcagctcgcacttgctcaacaagggcctgccgcttgtaagactttgaccccgacgcaggcttcagtgattgccgcggatcagaagcctgagcactttggctcgagacaattaaggacgtgggatgaggctccgagacaggacgcggttctgcctggggatcctgaagataaaaagctttgaaaagtcgaattcatggtcgtggaagctgagcccatattaagagatgtcaggcgtccgacctccgatcatgaacgggcccctgcacccgcggcccctggtggcattgctggatggccgggactgcacagtggagatgcccatcctgaaggacgtggccactgtggccttctgcgacgcgcagtccacgcaggagatccatgagaaggtcctgaacgaggctgtgggggccctgatgtaccacaccatcactctcaccagggaggacctggagaagttcaaagccctccgcatcatcgtccggattggcagtggttttgacaacatcgacatcaagtcggccggggatttaggcattgccgtctgcaacgtgcccgcggcgtctgtggaggagacggccgactcgacgctgtgccacatcctgaacctgtaccggcgggccacctggctgcaccaggcgctgcgggagggcacacgagtccagagcgtcgagcagatccgcgaggtggcgtccggcgctgccaggatccgcggggagaccttgggcatcatcggacttggtcgcgtggggcaggcagtggcgctgcgggccaaggccttcggcttcaacgtgctcttctacgacccttacttgtcggatggcgtggagcgggcgctggggctgcagcgtgtcagcaccctgcaggacctgctcttccacagcgactgcgtgaccctgcactgcggcctcaacgagcacaaccaccacctcatcaacgacttcaccgtcaagcagatgagacaaggggccttcctggtgaacacagcccggggtggcctggtggatgagaaggcgctggcccaggccctgaaggagggccggatccgcggcgcggccctggatgtgcacgagtcggaacccttcagctcctggccaaaccgtcaagcccgaggcggatagagaccacgccagtgaccagttgtagcccgggaggagctctccagcctcggcgcctgggcagagggcccggaaaccctcggaccagagtgtgtggaggaggcatctgtgtggtggccctggcactgcagagactggtccgggctgtcaggaggcgggagggggcagcgctgggcctcgtgtcgcttgtcgtcgtccgtcctgtgggcgctctgccctgtgtccttcgcgttcctcgttaagcagaagaagtcagtagttattctcccatgaacgttcttgtctgtgtacagtttttagaacattacaaaggatctgtttgcttagctgtcaacaaaaagaaaacctgaaggagcatttggaagtcaatttgaggtttttttttttggtttttttttttttgtatgttggaacgtgccccagaatgaggcagttggcaaacttctcaggacaatgaatccttcccgtttttctttttatgccacacagtgcattgttttttctacctgcttgtcttatttttagaataatttagaaaaacaaaacaaaggctgtttttcctaattttggcatgaacccccccttgttccaaatgaagacggcatcacgaagcagctccaaaaggaaaagcttgggcggtgcccagcgtgcccgctgcccatcgacgtctgtcctggggacgtggagggtggcagcgtccccgcctgcaccagtgccgtcctgctgatgtggtaggctagcaatattttggttaaaatcatgtttgtgactgtaaccatttgtatgaattattttaaagaaataaaaatcctggaaagag

SEQ ID NO: 41321 - DNA, 1870 bp, Homo sapiens
  misc_feature (1803)..(1803): n is a, c, g, or t
ggccgccccacgcgccgggctcgcggcggcgcagcgcgccggagtggtcggggcccgcggccgctcgcgcctctcgatgggcagctcgcacttgctcaacaagggcctgccgcttgtaagactttgaccccgacgcaggcttcagtgattgccgcggatcagaagcctgagcactttggctcgagacaattaaggacgtgggatgaggctccgagacaggacgcggttctgcctggggatcctgaagataaaaagctttgaaaagtcgaattcatggtcgtggaagctgagcccatattaagagatgtcaggcgtccgacctccgatcatgaacgggcccctgcacccgcggcccctggtggcattgctggatggccgggactgcacagtggagatgcccatcctgaaggacgtggccactgtggccttctgcgacgcgcagtccacgcaggagatccatgagaaggtcctgaacgaggctgtgggggccctgatgtaccacaccatcactctcaccagggaggacctggagaagttcaaagccctccgcatcatcgtccggattggcagtggttttgacaacatcgacatcaagtcggccggggatttaggcattgccgtctgcaacgtgcccgcggcgtctgtggaggagacggccgactcgacgctgtgccacatcctgaacctgtaccggcgggccacctggctgcaccaggcgctgcgggagggcacacgagtccagagcgtcgagcagatccgcgaggtggcgtccggcgctgccaggatccgcggggagaccttgggcatcatcggacttggtcgcgtggggcaggcagtggcgctgcgggccaaggccttcggcttcaacgtgctcttctacgacccttacttgtcggatggcgtggagcgggcgctggggctgcagcgtgtcagcaccctgcaggacctgctcttccacagcgactgcgtgaccctgcactgcggcctcaacgagcacaaccaccacctcatcaacgacttcaccgtcaagcagatgagacaaggggccttcctggtgaacacagcccggggtggcctggtggatgagaaggcgctggcccaggccctgaaggagggccggatccgcggcgcggccctggatgtgcacgagtcggaacccttcagctttagccagggccctctgaaggatgcacccaacctcatctgcaccccccatgctgcatggtacagcgagcaggcatccatcgagatgcgagaggaggcggcacgggagatccgcagagccatcacaggccggatcccagacagcctgaagaactgtgtcaacaaggaccatctgacagccgccacccactgggccagcatggaccccgccgtcgtgcaccctgagctcaatggggctgcctataggtaccctccgggcgtggtgggcgtggcccccactggcatcccagctgctgtggaaggtatcgtccccagcgccatgtccctgtcccacggcctgccccctgtggcccacccgccccacgccccttctcctggccaaaccgtcaagcccgaggcggatagagaccacgccagtgaccagttgtagcccgggaggagctctccagcctcggcgcctgggcagagggcccggaaaccctcggaccagagtgtgtggaggaggcatctgtgtggtggccctggcactgcagagactggtccgggctgtcaggaggcgggagggggcagcgctgggcctcgtgtcgcttgtcgtcgtccgtcctgtgggcgctgcccccgcaagacggtggcagggcngggtatgtgtcccggagccaggccagcgtggtcttgttcggggtggcactctggcgacttgcggggg

SEQ ID NO: 41322 - DNA, 1408 bp, Homo sapiens
acaacaaaaccagcaaagcgcttcagttcaaactggacacttcaccgtcaagcagatgagacaaggggccttcctggtgaacacagcccggggtggcctggtggatgagaaggcgctggcccaggccctgaaggagggccggatccgcggcgcggccctggatgtgcacgagtcggaacccttcagctttagccagggccctctgaaggatgcacccaacctcatctgcaccccccatgctgcatggtacagcgagcaggcatccatcgagatgcgagaggaggcggcacgggagatccgcagagccatcacaggccggatcccagacagcctgaagaactgtgtcaacaaggaccatctgacagccgccacccactgggccagcatggaccccgccgtcgtgcaccctgagctcaatggggctgcctataggtaccctccgggcgtggtgggcgtggcccccactggcatcccagctgctgtggaaggtatcgtccccagcgccatgtccctgtcccacggcctgccccctgtggcccacccgccccacgccccttctcctggccaaaccgtcaagcccgaggcggatagagaccacgccagtgaccagttgtagcccgggaggagctctccagcctcggcgcctgggcagagggcccggaaaccctcggaccagagtgtgtggaggaggcatctgtgtggtggccctggcactgcagagactggtccgggctgtcaggaggcgggagggggcagcgctgggcctcgtgtcgcttgtcgtcgtccgtcctgtgggcgctctgccctgtgtccttcgcgttcctcgttaagcagaagaagtcagtagttattctcccatgaacgttcttgtctgtgtacagtttttagaacattacaaaggatctgtttgcttagctgtcaacaaaaagaaaacctgaaggagcatttggaagtcaatttgaggtttttttttttggtttttttttttttgtatgttggaacgtgccccagaatgaggcagttggcaaacttctcaggacaatgaatccttcccgtttttctttttatgccacacagtgcattgttttttctacctgcttgtcttatttttagaataatttagaaaaacaaaacaaaggctgtttttcctaattttggcatgaacccccccttgttccaaatgaagacggcatcacgaagcagctccaaaaggaaaagcttgggcggtgcccagcgtgcccgctgcccatcgacgtctgtcctggggacgtggagggtggcagcgtccccgcctgcaccagtgccgtcctgctgatgtggtaggctagcaatattttggttaaaatcatgtttgtgactgtaaccatttgtatgaattattttaaagaaataaaaatcctggaaagag

SEQ ID NO: 41323 - DNA, 1369 bp, Homo sapiens
tcagccagcctgccgagcagagcagggccgtggggtctgtggttcccaggcagggccccccacagggggttccagtgcccagccacctcccctccgtacccagccacagcactcaggctgcactgaccatgcctgtgctgttcccagctttagccagggccctctgaaggatgcacccaacctcatctgcaccccccatgctgcatggtacagcgagcaggcatccatcgagatgcgagaggaggcggcacgggagatccgcagagccatcacaggccggatcccagacagcctgaagaactgtgtcaacaaggaccatctgacagccgccacccactgggccagcatggaccccgccgtcgtgcaccctgagctcaatggggctgcctataggtaccctccgggcgtggtgggcgtggcccccactggcatcccagctgctgtggaaggtatcgtccccagcgccatgtccctgtcccacggcctgccccctgtggcccacccgccccacgccccttctcctggccaaaccgtcaagcccgaggcggatagagaccacgccagtgaccagttgtagcccgggaggagctctccagcctcggcgcctgggcagagggcccggaaaccctcggaccagagtgtgtggaggaggcatctgtgtggtggccctggcactgcagagactggtccgggctgtcaggaggcgggagggggcagcgctgggcctcgtgtcgcttgtcgtcgtccgtcctgtgggcgctctgccctgtgtccttcgcgttcctcgttaagcagaagaagtcagtagttattctcccatgaacgttcttgtctgtgtacagtttttagaacattacaaaggatctgtttgcttagctgtcaacaaaaagaaaacctgaaggagcatttggaagtcaatttgaggtttttttttttggtttttttttttttgtatgttggaacgtgccccagaatgaggcagttggcaaacttctcaggacaatgaatccttcccgtttttctttttatgccacacagtgcattgttttttctacctgcttgtcttatttttagaataatttagaaaaacaaaacaaaggctgtttttcctaattttggcatgaacccccccttgttccaaatgaagacggcatcacgaagcagctccaaaaggaaaagcttgggcggtgcccagcgtgcccgctgcccatcgacgtctgtcctggggacgtggagggtggcagcgtccccgcctgcaccagtgccgtcctgctgatgtggtaggctagcaatattttggttaaaatcatgtttgtgactgtaaccatttgtatgaattattttaaagaaataaaaatcctggaaagag

SEQ ID NO: 41324 - DNA, 1695 bp, Homo sapiens
  misc_feature (26)..(27): n is a, c, g, or t
  misc_feature (57)..(57): n is a, c, g, or t
  misc_feature (91)..(91): n is a, c, g, or t
caggacttcggttcgagctttctgtnnattattcagcctccaaatgcaaatgaatgntataaaaataagtagggaacatggcagagagtgntgcttcccagcctcacaatgtgggaatttgacataggatgagagtcagagtataggtttaaaagataaaatctttagttaataattttgtatttatttattctagatgtatgtatctgaggaaagaaatctggtatttttgctttccaataaaggggatcaaagtaatggtttttctctcagttctctaagctggtctatgttatagctctagcagtatggaaatgtgctttaaaatatgcttaccttttgaatgatcatggctatatgttgttgagatatttgaaacttaccttgttttcacttgtgcactgtgaatgaactttgtattatttttttaaaaccttcacattacgtgtagatattattgcaacttatattttgcctgtgcttgatcggtcatttgtgtagatgagtaattaatatctcgtgccgaattcggcacgaggcgagcaggcatccatcgagatgcgagaggaggcggcacgggagatccgcagagccatcacaggccggatcccagacagcctgaagaactgtgtcaacaaggaccatctgacagccgccacccactgggccagcatggaccccgccgtcgtgcaccctgagctcaatggggctgcctataggtaccctccgggcgtggtgggcgtggcccccactggcatcccagctgctgtggaaggtatcgtccccagcgccatgtccctgtcccacggcctgccccctgtggcccacccgccccacgccccttctcctggccaaaccgtcaagcccgaggcggatagagaccacgccagtgaccagttgtagcccgggaggagctctccagcctcggcgcctgggcagagggcccggaaaccctcggaccagagtgtgtggaggaggcatctgtgtggtggccctggcactgcagagactggtccgggctgtcaggaggcgggagggggcagcgctgggcctcgtgtcgcttgtcgtcgtccgtcctgtgggcgctctgccctgtgtccttcgcgttcctcgttaagcagaagaagtcagtagttattctcccatgaacgttcttgtctgtgtacagtttttagaacattacaaaggatctgtttgcttagctgtcaacaaaaagaaaacctgaaggagcatttggaagtcaatttgaggtttttttttttggtttttttttttttgtatgttggaacgtgccccagaatgaggcagttggcaaacttctcaggacaatgaatccttcccgtttttctttttatgccacacagtgcattgttttttctacctgcttgtcttatttttagaataatttagaaaaacaaaacaaaggctgtttttcctaattttggcatgaacccccccttgttccaaatgaagacggcatcacgaagcagctccaaaaggaaaagcttgggcggtgcccagcgtgcccgctgcccatcgacgtctgtcctggggacgtggagggtggcagcgtccccgcctgcaccagtgccgtcctgctgatgtggtaggctagcaatattttggttaaaatcatgtttgtgactgtaaccatttgtatgaattattttaaagaaataaaaatcctggaaagag

SEQ ID NO: 41325 - DNA, 1121 bp, Homo sapiens
gctgttccttcctcctgcatctcccaggccggatcccagacagcctgaagaactgtgtcaacaaggaccatctgacagccgccacccactgggccagcatggaccccgccgtcgtgcaccctgagctcaatggggctgcctataggtaccctccgggcgtggtgggcgtggcccccactggcatcccagctgctgtggaaggtatcgtccccagcgccatgtccctgtcccacggcctgccccctgtggcccacccgccccacgccccttctcctggccaaaccgtcaagcccgaggcggatagagaccacgccagtgaccagttgtagcccgggaggagctctccagcctcggcgcctgggcagagggcccggaaaccctcggaccagagtgtgtggaggaggcatctgtgtggtggccctggcactgcagagactggtccgggctgtcaggaggcgggagggggcagcgctgggcctcgtgtcgcttgtcgtcgtccgtcctgtgggcgctctgccctgtgtccttcgcgttcctcgttaagcagaagaagtcagtagttattctcccatgaacgttcttgtctgtgtacagtttttagaacattacaaaggatctgtttgcttagctgtcaacaaaaagaaaacctgaaggagcatttggaagtcaatttgaggtttttttttttggtttttttttttttgtatgttggaacgtgccccagaatgaggcagttggcaaacttctcaggacaatgaatccttcccgtttttctttttatgccacacagtgcattgttttttctacctgcttgtcttatttttagaataatttagaaaaacaaaacaaaggctgtttttcctaattttggcatgaacccccccttgttccaaatgaagacggcatcacgaagcagctccaaaaggaaaagcttgggcggtgcccagcgtgcccgctgcccatcgacgtctgtcctggggacgtggagggtggcagcgtccccgcctgcaccagtgccgtcctgctgatgtggtaggctagcaatattttggttaaaatcatgtttgtgactgtaaccatttgtatgaattattttaaagaaataaaaatcctggaaagag

SEQ ID NO: 41326 - DNA, 1175 bp, Homo sapiens
ggccgccccacgcgccgggctcgcggcggcgcagcgcgccggagtggtcggggcccgcggccgctcgcgcctctcgatgggcagctcgcacttgctcaacaagggcctgccgcttgtaagactttgaccccgacgcaggcttcagtgattgccgcggatcagaagcctgagcactttggctcaatggggctgcctataggtaccctccgggcgtggtgggcgtggcccccactggcatcccagctgctgtggaaggtatcgtccccagcgccatgtccctgtcccacggcctgccccctgtggcccacccgccccacgccccttctcctggccaaaccgtcaagcccgaggcggatagagaccacgccagtgaccagttgtagcccgggaggagctctccagcctcggcgcctgggcagagggcccggaaaccctcggaccagagtgtgtggaggaggcatctgtgtggtggccctggcactgcagagactggtccgggctgtcaggaggcgggagggggcagcgctgggcctcgtgtcgcttgtcgtcgtccgtcctgtgggcgctctgccctgtgtccttcgcgttcctcgttaagcagaagaagtcagtagttattctcccatgaacgttcttgtctgtgtacagtttttagaacattacaaaggatctgtttgcttagctgtcaacaaaaagaaaacctgaaggagcatttggaagtcaatttgaggtttttttttttggtttttttttttttgtatgttggaacgtgccccagaatgaggcagttggcaaacttctcaggacaatgaatccttcccgtttttctttttatgccacacagtgcattgttttttctacctgcttgtcttatttttagaataatttagaaaaacaaaacaaaggctgtttttcctaattttggcatgaacccccccttgttccaaatgaagacggcatcacgaagcagctccaaaaggaaaagcttgggcggtgcccagcgtgcccgctgcccatcgacgtctgtcctggggacgtggagggtggcagcgtccccgcctgcaccagtgccgtcctgctgatgtggtaggctagcaatattttggttaaaatcatgtttgtgactgtaaccatttgtatgaattattttaaagaaataaaaatcctggaaagag

SEQ ID NO: 41327 - DNA, 907 bp, Homo sapiens
  misc_feature (82)..(82): n is a, c, g, or t
cttgccaggccgattaaggttgggttaacgcaaggtgttttcccaagtcccgaacgttgtaaaaacgacgggccaattgaanttgtaaatacgactcactattagggccgaattggggtaccggggttccaaggcctcggcgcctgggcagagggcccggaaaccctcggaccagagtgtgtggaggaggcatctgtgtggtggccctggcactgcagagactggtccgggctgtcaggaggcgggagggggcagcgctgggcctcgtgtcgcttgtcgtcgtccgtcctgtgggcgctctgccctgtgtccttcgcgttcctcgttaagcagaagaagtcagtagttattctcccatgaacgttcttgtctgtgtacagtttttagaacattacaaaggatctgtttgcttagctgtcaacaaaaagaaaacctgaaggagcatttggaagtcaatttgaggtttttttttttggtttttttttttttgtatgttggaacgtgccccagaatgaggcagttggcaaacttctcaggacaatgaatccttcccgtttttctttttatgccacacagtgcattgttttttctacctgcttgtcttatttttagaataatttagaaaaacaaaacaaaggctgtttttcctaattttggcatgaacccccccttgttccaaatgaagacggcatcacgaagcagctccaaaaggaaaagcttgggcggtgcccagcgtgcccgctgcccatcgacgtctgtcctggggacgtggagggtggcagcgtccccgcctgcaccagtgccgtcctgctgatgtggtaggctagcaatattttggttaaaatcatgtttgtgactgtaaccatttgtatgaattattttaaagaaataaaaatcctggaaagag

SEQ ID NO: 41328 - DNA, 684 bp, Homo sapiens
aaccaccgagccgcgagccgctaactctggcgagagctgctacctgaggggcaagctgctaactcagggccgagcactgccctgtgtccttcgcgttcctcgttaagcagaagaagtcagtagttattctcccatgaacgttcttgtctgtgtacagtttttagaacattacaaaggatctgtttgcttagctgtcaacaaaaagaaaacctgaaggagcatttggaagtcaatttgaggtttttttttttggtttttttttttttgtatgttggaacgtgccccagaatgaggcagttggcaaacttctcaggacaatgaatccttcccgtttttctttttatgccacacagtgcattgttttttctacctgcttgtcttatttttagaataatttagaaaaacaaaacaaaggctgtttttcctaattttggcatgaacccccccttgttccaaatgaagacggcatcacgaagcagctccaaaaggaaaagcttgggcggtgcccagcgtgcccgctgcccatcgacgtctgtcctggggacgtggagggtggcagcgtccccgcctgcaccagtgccgtcctgctgatgtggtaggctagcaatattttggttaaaatcatgtttgtgactgtaaccatttgtatgaattattttaaagaaataaaaatcctggaaagag

SEQ ID NO: 41329 - DNA, 1268 bp, Homo sapiens
ggccgccccacgcgccgggctcgcggcggcgcagcgcgccggagtggtcggggcccgcggccgctcgcgcctctcgatgggcagctcgcacttgctcaacaagggcctgccgcttgtaagactttgaccccgacgcaggcttcagtgattgccgcggatcagaagcctgagcactttggctcgagacaattaaggacgtgggatgaggctccgagacaggacgcggttctgcctggggatcctgaagataaaaagctttgaaaagtcgaattcatggtcgtggaagctgagcccatattaagagatgtcaggcgtccgacctccgatcatgaacgggcccctgcacccgcggcccctggtggcattgctggatggccgggactgcacagtggagatgcccatcctgaaggacgtggccactgtggccttctgcgacgcgcagtccacgcaggagatccatgagaaggtcctgaacgaggctgtgggggccctgatgtaccacaccatcactctcaccagggaggacctggagaagttcaaagccctccgcatcatcgtccggattggcagtggttttgacaacatcgacatcaagtcggccggggatttaggcattgccgtctgcaacgtgcccgcggcgtctgtggaggagacggccgactcgacgctgtgccacatcctgaacctgtaccggcgggccacctggctgcaccaggcgctgcgggagggcacacgagtccagagcgtcgagcagatccgcgaggtggcgtccggcgctgccaggatccgcggggagaccttgggcatcatcggacttggtcgcgtggggcaggcagtggcgctgcgggccaaggccttcggcttcaacgtgctcttctacgacccttacttgtcggatggcgtggagcgggcgctggggctgcagcgtgtcagcaccctgcaggacctgctcttccacagcgactgcgtgaccctgcactgcggcctcaacgagcacaaccaccacctcatcaacgacttcaccgtcaagcagatgagacaaggggccttcctggtgaacacagcccggggtggcctggtggatgagaaggcgctggcccaggccctgaaggagggccggatccgcggcgcggccctggatgtgcacgagtcggaacccttcagctttagccaggcgggcgggcggagcagcggacggcgccgaggccgccccacgcgccgggctcgcggcggcgcagcgcgccggagtggtcggggcccgcggccgc

SEQ ID NO: 41330 - DNA, 1186 bp, Homo sapiens
ggccgccccacgcgccgggctcgcggcggcgcagcgcgccggagtggtcggggcccgcggccgctcgcgcctctcgatgggcagctcgcacttgctcaacaagggcctgccgcttgtaagactttgaccccgacgcaggcttcagtgattgccgcggatcagaagcctgagcactttggctcgagacaattaaggacgtgggatgaggctccgagacaggacgcggttctgcctggggatcctgaagataaaaagctttgaaaagtcgaattcatggtcgtggaagctgagcccatattaagagatgtcaggcgtccgacctccgatcatgaacgggcccctgcacccgcggcccctggtggcattgctggatggccgggactgcacagtggagatgcccatcctgaaggacgtggccactgtggccttctgcgacgcgcagtccacgcaggagatccatgagaaggtcctgaacgaggctgtgggggccctgatgtaccacaccatcactctcaccagggaggacctggagaagttcaaagccctccgcatcatcgtccggattggcagtggttttgacaacatcgacatcaagtcggccggggatttaggcattgccgtctgcaacgtgcccgcggcgtctgtggaggagacggccgactcgacgctgtgccacatcctgaacctgtaccggcgggccacctggctgcaccaggcgctgcgggagggcacacgagtccagagcgtcgagcagatccgcgaggtggcgtccggcgctgccaggatccgcggggagaccttgggcatcatcggacttggtgcgtcggccgcagctccacgcctgtgtccctccctgtgtctggcgctgccgctcttcagctgtgcccaggaggagaggcccggggcggggtggggctgctgcaggtgtcggtcccaacccaggacaggactgagtgcgcacaggcaccagggcccgggagtcccaggcgtgtgccctacgtgcacggacgtcacagcacacgtgggtctcacacaggcacacacagataacgtacacggatgccacagcacacacagcctcacacagacatcacagcacgtgggtctcatgggcacatgcagataacacacacggacgtcacagcactcacatgggcttcatgggcacatagataacacacggatg

SEQ ID NO: 41331 - DNA, 465 bp, Homo sapiens
acaggaggcagagcctttccgcagtttccctgcccacagcacacaccctgtgccctccgccccctggttcttggacactggggacatctggatgcggctagagcctgtgggggtggccgcagccctgggggactgttcccaggagtaggcctcggggccacaggggcgcggcctcgggcctggcactgcaacctcagggtgagcgcccttcgtgtgtgcggcaggagccggggcccctggctgtcagcaggcccccgagtccaggtaggtcccagacagcagtcccgggtgtggcagatgcagtgaggtccacttctgaggcgttccctggagtctgtgagttctggtcggaccttcgatggcattttaatgtgtctcttgtgtttgatttttagtaagactttgaccccgacgcaggcttcagtgattgccgcggatcagaagcctgagcactttggctcgaga

SEQ ID NO: 41332 - DNA, 271 bp, Homo sapiens
gaagccttcatgtagcctctcccagtgtccgggctggtgcttggggaacaagcctgagggccacaggctaatttcccagccggggcagccccacccccgaaggccaagcccgagggtcttcaggttccgggctgagcctgtgtgctttctcgctgcaggtcctgaacgaggctgtgggggccctgatgtaccacaccatcactctcaccagggaggacctggagaagttcaaagccctccgcatcatcgtccggattggcagtggttttga

SEQ ID NO: 41333 - DNA, 230 bp, Homo sapiens
ccaggccgcctacaggtgggcctcacggatggaccctctcccagcaggtaccctccgggcgtggtgggcgtggcccccactggcatcccagctgctgtggaaggtatcgtccccagcgccatgtccctgtcccacggcctgccccctgtggcccacccgccccacgccccttctcctggccaaaccgtcaagcccgaggcggatagagaccacgccagtgaccagttgta

SEQ ID NO: 41334 - DNA, 2191 bp, Homo sapiens
ggccgccccacgcgccgggctcgcggcggcgcagcgcgccggagtggtcggggcccgcggccgctcgcgcctctcgatgggcagctcgcacttgctcaacaagggcctgccgcttggcgtccgacctccgatcatgaacgggcccctgcacccgcggcccctggtggcattgctggatggccgggactgcacagtggagatgcccatcctgaaggacgtggccactgtggccttctgcgacgcgcagtccacgcaggagatccatgagaaggtcctgaacgaggctgtgggggccctgatgtaccacaccatcactctcaccagggaggacctggagaagttcaaagccctccgcatcatcgtccggattggcagtggttttgacaacatcgacatcaagtcggccggggatttaggcattgccgtctgcaacgtgcccgcggcgtctgtggaggagacggccgactcgacgctgtgccacatcctgaacctgtaccggcgggccacctggctgcaccaggcgctgcgggagggcacacgagtccagagcgtcgagcagatccgcgaggtggcgtccggcgctgccaggatccgcggggagaccttgggcatcatcggacttggtcgcgtggggcaggcagtggcgctgcgggccaaggccttcggcttcaacgtgctcttctacgacccttacttgtcggatggcgtggagcgggcgctggggctgcagcgtgtcagcaccctgcaggacctgctcttccacagcgactgcgtgaccctgcactgcggcctcaacgagcacaaccaccacctcatcaacgacttcaccgtcaagcagatgagacaaggggccttcctggtgaacacagcccggggtggcctggtggatgagaaggcgctggcccaggccctgaaggagggccggatccgcggcgcggccctggatgtgcacgagtcggaacccttcagctttagccagggccctctgaaggatgcacccaacctcatctgcaccccccatgctgcatggtacagcgagcaggcatccatcgagatgcgagaggaggcggcacgggagatccgcagagccatcacaggccggatcccagacagcctgaagaactgtgtcaacaaggaccatctgacagccgccacccactgggccagcatggaccccgccgtcgtgcaccctgagctcaatggggctgcctataggtaccctccgggcgtggtgggcgtggcccccactggcatcccagctgctgtggaaggtatcgtccccagcgccatgtccctgtcccacggcctgccccctgtggcccacccgccccacgccccttctcctggccaaaccgtcaagcccgaggcggatagagaccacgccagtgaccagttgtagcccgggaggagctctccagcctcggcgcctgggcagagggcccggaaaccctcggaccagagtgtgtggaggaggcatctgtgtggtggccctggcactgcagagactggtccgggctgtcaggaggcgggagggggcagcgctgggcctcgtgtcgcttgtcgtcgtccgtcctgtgggcgctctgccctgtgtccttcgcgttcctcgttaagcagaagaagtcagtagttattctcccatgaacgttcttgtctgtgtacagtttttagaacattacaaaggatctgtttgcttagctgtcaacaaaaagaaaacctgaaggagcatttggaagtcaatttgaggtttttttttttggtttttttttttttgtatgttggaacgtgccccagaatgaggcagttggcaaacttctcaggacaatgaatccttcccgtttttctttttatgccacacagtgcattgttttttctacctgcttgtcttatttttagaataatttagaaaaacaaaacaaaggctgtttttcctaattttggcatgaacccccccttgttccaaatgaagacggcatcacgaagcagctccaaaaggaaaagcttgggcggtgcccagcgtgcccgctgcccatcgacgtctgtcctggggacgtggagggtggcagcgtccccgcctgcaccagtgccgtcctgctgatgtggtaggctagcaatattttggttaaaatcatgtttgtgactgtaaccatttgtatgaattattttaaagaaataaaaatcctggaaagag

SEQ ID NO: 41335 - DNA, 2139 bp, Homo sapiens
ggccgccccacgcgccgggctcgcggcggcgcagcgcgccggagtggtcggggcccgcggccgctcgcgcctctcgatgggcagctcgcacttgctcaacaagggcctgccgcttggcgtccgacctccgatcatgaacgggcccctgcacccgcggcccctggtggcattgctggatggccgggactgcacagtggagatgcccatcctgaaggacgtggccactgtggccttctgcgacgcgcagtccacgcaggagatccatgagaaggtcctgaacgaggctgtgggggccctgatgtaccacaccatcactctcaccagggaggacctggagaagttcaaagccctccgcatcatcgtccggattggcagtggttttgacaacatcgacatcaagtcggccggggatttaggcattgccgtctgcaacgtgcccgcggcgtctgtggaggagacggccgactcgacgctgtgccacatcctgaacctgtaccggcgggccacctggctgcaccaggcgctgcgggagggcacacgagtccagagcgtcgagcagatccgcgaggtggcgtccggcgctgccaggatccgcggggagaccttgggcatcatcggacttggtcgcgtggggcaggcagtggcgctgcgggccaaggccttcggcttcaacgtgctcttctacgacccttacttgtcggatggcgtggagcgggcgctggggctgcagcgtgtcagcaccctgcaggacctgctcttccacagcgactgcgtgaccctgcactgcggcctcaacgagcacaaccaccacctcatcaacgacttcaccgtcaagcagatgagacaaggggccttcctggtgaacacagcccggggtggcctggtggatgagaaggcgctggcccaggccctgaaggagggccggatccgcggcgcggccctggatgtgcacgagtcggaacccttcagctttagccagggccctctgaaggatgcacccaacctcatctgcaccccccatgctgcatggtacagcgagcaggcatccatcgagatgcgagaggaggcggcacgggagatccgcagagccatcacaggccggatcccagacagcctgaagaactgtgtcaacaaggaccatctgacagccgccacccactgggccagcatggaccccgccgtcgtgcaccctgagctcaatggggctgcctataggtaccctccgggcgtggtgggcgtggcccccactggcatcccagctgctgtggaaggtatcgtccccagcgccatgtccctgtcccacggcctgccccctgtggcccacccgccccacgccccttctcctggccaaaccgtcaagcccgaggcggatagagaccacgccagtgaccagttgtagcccgggaggagctctccagcctcggcgcctgggcagagggcccggaaaccctcggaccagagtgtgtggaggaggcatctgtgtggtggccctggcactgcagagactggtccgggctgtcaggaggcgggagggggcagcgctgggcctcgtgtcgcttgtcgtcgtccgtcctgtgggcgctctgccctgtgtccttcgcgttcctcgttaagcagaagaagtcagtagttattctcccatgaacgttcttgtctgtgtacagtttttagaacattacaaaggatctgtttgcttagctgtcaacaaaaagaaaacctgaaggagcatttggaagtcaatttgaggtttttttttttggtttttttttttttgtatgttggaacgtgccccagaatgaggcagttggcaaacttctcaggacaatgaatccttcccgtttttctttttatgccacacagtgcattgttttttctacctgcttgtcttatttttagaataatttagaaaaacaaaacaaaggctgtttttcctaattttggcatgaacccccccttgttccaaatgaagacggcatcacgaagcagctccaaaaggaaaagcttgggcggtgcccgtctgtcctggggacgtggagggtggcagcgtccccgcctgcaccagtgccgtcctgctgatgtggtaggctagcaatattttggttaaaatcatgtttgtggccgaacgggcccctgcacccg

SEQ ID NO: 41336 - DNA, 2386 bp, Homo sapiens
ggccgccccacgcgccgggctcgcggcggcgcagcgcgccggagtggtcggggcccgcggccgctcgcgcctctcgatgggcagctcgcacttgctcaacaagggcctgccgcttgtaagactttgaccccgacgcaggcttcagtgattgccgcggatcagaagcctgagcactttggctcgagacaattaaggacgtgggatgaggctccgagacaggacgcggttctgcctggggatcctgaagataaaaagctttgaaaagtcgaattcatggtcgtggaagctgagcccatattaagagatgtcaggcgtccgacctccgatcatgaacgggcccctgcacccgcggcccctggtggcattgctggatggccgggactgcacagtggagatgcccatcctgaaggacgtggccactgtggccttctgcgacgcgcagtccacgcaggagatccatgagaaggtcctgaacgaggctgtgggggccctgatgtaccacaccatcactctcaccagggaggacctggagaagttcaaagccctccgcatcatcgtccggattggcagtggttttgacaacatcgacatcaagtcggccggggatttaggcattgccgtctgcaacgtgcccgcggcgtctgtggaggagacggccgactcgacgctgtgccacatcctgaacctgtaccggcgggccacctggctgcaccaggcgctgcgggagggcacacgagtccagagcgtcgagcagatccgcgaggtggcgtccggcgctgccaggatccgcggggagaccttgggcatcatcggacttggtcgcgtggggcaggcagtggcgctgcgggccaaggccttcggcttcaacgtgctcttctacgacccttacttgtcggatggcgtggagcgggcgctggggctgcagcgtgtcagcaccctgcaggacctgctcttccacagcgactgcgtgaccctgcactgcggcctcaacgagcacaaccaccacctcatcaacgacttcaccgtcaagcagatgagacaaggggccttcctggtgaacacagcccggggtggcctggtggatgagaaggcgctggcccaggccctgaaggagggccggatccgcggcgcggccctggatgtgcacgagtcggaacccttcagctttagccagggccctctgaaggatgcacccaacctcatctgcaccccccatgctgcatggtacagcgagcaggcatccatcgagatgcgagaggaggcggcacgggagatccgcagagccatcacaggccggatcccagacagcctgaagaactgtgtcaacaaggaccatctgacagccgccacccactgggccagcatggaccccgccgtcgtgcaccctgagctcaatggggctgcctataggtaccctccgggcgtggtgggcgtggcccccactggcatcccagctgctgtggaaggtatcgtccccagcgccatgtccctgtcccacggcctgccccctgtggcccacccgccccacgccccttctcctggccaaaccgtcaagcccgaggcggatagagaccacgccagtgaccagttgtagcccgggaggagctctccagcctcggcgcctgggcagagggcccggaaaccctcggaccagagtgtgtggaggaggcatctgtgtggtggccctggcactgcagagactggtccgggctgtcaggaggcgggagggggcagcgctgggcctcgtgtcgcttgtcgtcgtccgtcctgtgggcgctctgccctgtgtccttcgcgttcctcgttaagcagaagaagtcagtagttattctcccatgaacgttcttgtctgtgtacagtttttagaacattacaaaggatctgtttgcttagctgtcaacaaaaagaaaacctgaaggagcatttggaagtcaatttgaggtttttttttttggtttttttttttttgtatgttggaacgtgccccagaatgaggcagttggcaaacttctcaggacaatgaatccttcccgtttttctttttatgccacacagtgcattgttttttctacctgcttgtcttatttttagaataatttagaaaaacaaaacaaaggctgtttttcctaattttggcatgaacccccccttgttccaaatgaagacggcatcacgaagcagctccaaaaggaaaagcttgggcggtgcccagcgtgcccgctgcccatcgacgtctgtcctggggacgtggagggtggcagcgtccccgcctgcaccagtgccgtcctgctgatgtggtaggctagcaatattttggttaaaatcatgtttgtgactgtaaccatttgtatgaattattttaaagaaataaaaatcctggaaagag

SEQ ID NO: 41337 - DNA, 1562 bp, Homo sapiens
taggtctatctatcttgttcctcgtagcatctggccagatctgtgcaaattcaccaactacagaaagtgaaaagtttcccaaaatatgcctattaacctcgaggaatgacttctctttttgtcatcaaagtggatgaagttttgtttgccttgggtttggcaggcagaaaacaacttccaggttgagctctcccctttacccagaagccactggccttcagttcctttctatgttgcacaaggaagtggcccaccttgcaggctttgctgatgagcttttatacctgtttaattgtgtgaattgcataaacacatgcaatcattagagtatagttgctctctcaataagtcttccagatggttctcttcctttccagagatgcacaggtgattgagctgtaggtgagcagtgacgtgaagaggggttctagccccgtggaaaacagcccatggttaacatctcaggatgttctgcattcaaacacccaaggctggtaatgaactttcacatggactgaatattggaggcaaataatagaaggaatagaatatacagtgcctctgtcctgaaggaaaatatcatgcctcttctggaagaaacggactgcacagaggaaggattgagcaatttagcctgcagtggaagaaggtggacaccaaaagcttcaccctgtgttggagctgttcatgcttccatgaggccatggtgtccatgtccgtggaacctaccacagaaaatggctcatgaaaaggggaatccgacccaacacacagcttcctacacactgccatcttatcaacagttaggcactactttgtagaacgattagcttcaccctcttagctgccaggagatcccttcttaaagatggactatgtgaagattcgggagtcctgaaacatggggactccgggatggtctctagccctatcgatgatgaacactggccttctggaggggaaatggcagtctgggctggcgtggtaggaagggctttggtgttcatggaatgggcctgctgctctcagaccttcaaaggatggaaccaacgaaggaccaaatgagaaagcagatgctgtgccttgcagagggccatgaatgtcagttattatttttctccttatacaattattttgtggttattattacaatgtacatggctgttgcatagaagacatgactggtggaggctgaggaaagccatgacattctacaattgccatcaggctaaggccccgtgagcatttctctcccttgtaatattaaccctgtatttctgggatcacatcacggaatattctttgcctttccactttccaggaaatctctcggactgggctaccctccttgtgtgtgatgaaagatgagctatatttcagaacaaagtgctgtgttgtcatgatttgcctggactcccagggcgtctcttacccaacttgataacgatgctgttcattagcagcctttgttaactgataaccaagagcggtaatgtgatactcataagcaattttctgtgtgtaggataaaataaaccatcttgtatgggaaaaaaaaattg

SEQ ID NO: 41338 - DNA, 758 bp, Homo sapiens
agcggattgtgcctgcgctgccagcagccaggagccaggagccaagagcagagcgccacatgaacttgggggtcagcatgctgaggatcctcttcctcctggatgtaggaggagctcaagtgctggcaacaggcaagacccctggggctgaaattgatttcaagtacgccctcatcgggactgctgtgggtgtcgccatatctgctggcttcctggccctgaagatctgcatgatcaggaggcacttatttgacgacgactcttccgacctgaaaagcacgcctgggggcctcagtgacaccatcccgctaaagaagagagccccaagagcccacgtcctcagggacggtcctgccttgggacctttgcacttgctgttttctgtaattggaatgctctttgccagaaagctgcaagcctcgaccctcttttccttcaaatccctgcttcagtgtcaccactgcatcatggagggcctatttaaggcgaaaccacaatttctccaaaaggtgagttgtaagagtgatcacttgtcttaaaaggaggacaggcagtctctgcccaatggggctgcatgggttttcggcatgacctctccctcccctggccacgtgggacgggcaaccatggcatggccaggagccctcatgccaggacagctgtgagaccaggaatcagcatcaccttgggacatgatggtacttggcaagatttaacatgaagctgtggggcattgcccagttagagctgagaaaatg

SEQ ID NO: 41339 - DNA, 1530 bp, Homo sapiens
caggctgtacaggtcccagcgtcgtaagatggagccaagagcagagcgccacatgaacttgggggtcagcatgctgaggatcctcttcctcctggatgtaggaggagctcaagtgctggcaacaggcaagacccctggggctgaaattgatttcaagtacgccctcatcgggactgctgtgggtgtcgccatatctgctggcttcctggccctgaagatctgcatgatcaggaggcacttatttgacgacgactcttccgacctgaaaagcacgcctgggggcctcagtgacaccatcccgctaaagaagagagccccaaggcgaaaccacaatttctccaaaagagatgcacaggtgattgagctgtaggtgagcagtgacgtgaagaggggttctagccccgtggaaaacagcccatggttaacatctcaggatgttctgcattcaaacacccaaggctggtaatgaactttcacatggactgaatattggaggcaaataatagaaggaatagaatatacagtgcctctgtcctgaaggaaaatatcatgcctcttctggaagaaacggactgcacagaggaaggattgagcaatttagcctgcagtggaagaaggtggacaccaaaagcttcaccctgtgttggagctgttcatgcttccatgaggccatggtgtccatgtccgtggaacctaccacagaaaatggctcatgaaaaggggaatccgacccaacacacagcttcctacacactgccatcttatcaacagttaggcactactttgtagaacgattagcttcaccctcttagctgccaggagatcccttcttaaagatggactatgtgaagattcgggagtcctgaaacatggggactccgggatggtctctagccctatcgatgatgaacactggccttctggaggggaaatggcagtctgggctggcgtggtaggaagggctttggtgttcatggaatgggcctgctgctctcagaccttcaaaggatggaaccaacgaaggaccaaatgagaaagcagatgctgtgccttgcagagggccatgaatgtcagttattatttttctccttatacaattattttgtggttattattacaatgtacatggctgttgcatagaagacatgactggtggaggctgaggaaagccatgacattctacaattgccatcaggctaaggccccgtgagcatttctctcccttgtaatattaaccctgtatttctgggatcacatcacggaatattctttgcctttccactttccaggaaatctctcggactgggctaccctccttgtgtgtgatgaaagatgagctatatttcagaacaaagtgctgtgttgtcatgatttgcctggactcccagggcgtctcttacccaacttgataacgatgctgttcattagcagcctttgttaactgataaccaagagcggtaatgtgatactcataagcaattttctgtgtgtaggataaaataaaccatcttgtatgggaaaaaaaaattg

SEQ ID NO: 41340 - DNA, 1607 bp, Homo sapiens
caggctgtacaggtcccagcgtcgtaagatggagccaagagcagagcgccacatgaacttgggggtcagcatgctgaggatcctcttcctcctggatgtaggaggagctcaagtgctggcaacaggcaagacccctggggctgaaattgatttcaagtacgccctcatcgggactgctgtgggtgtcgccatatctgctggcttcctggccctgaagatctgcatgatcaggaggcacttatttgacgacgactcttccgacctgaaaagcacgcctgggggcctcagtgacaccatcccgctaaagaagagagccccaaaagctgcaagcctcgaccctcttttccttcaaatccctgcttcagtgtcaccactgcatcatggagggcctatttaaggcgaaaccacaatttctccaaaagagatgcacaggtgattgagctgtaggtgagcagtgacgtgaagaggggttctagccccgtggaaaacagcccatggttaacatctcaggatgttctgcattcaaacacccaaggctggtaatgaactttcacatggactgaatattggaggcaaataatagaaggaatagaatatacagtgcctctgtcctgaaggaaaatatcatgcctcttctggaagaaacggactgcacagaggaaggattgagcaatttagcctgcagtggaagaaggtggacaccaaaagcttcaccctgtgttggagctgttcatgcttccatgaggccatggtgtccatgtccgtggaacctaccacagaaaatggctcatgaaaaggggaatccgacccaacacacagcttcctacacactgccatcttatcaacagttaggcactactttgtagaacgattagcttcaccctcttagctgccaggagatcccttcttaaagatggactatgtgaagattcgggagtcctgaaacatggggactccgggatggtctctagccctatcgatgatgaacactggccttctggaggggaaatggcagtctgggctggcgtggtaggaagggctttggtgttcatggaatgggcctgctgctctcagaccttcaaaggatggaaccaacgaaggaccaaatgagaaagcagatgctgtgccttgcagagggccatgaatgtcagttattatttttctccttatacaattattttgtggttattattacaatgtacatggctgttgcatagaagacatgactggtggaggctgaggaaagccatgacattctacaattgccatcaggctaaggccccgtgagcatttctctcccttgtaatattaaccctgtatttctgggatcacatcacggaatattctttgcctttccactttccaggaaatctctcggactgggctaccctccttgtgtgtgatgaaagatgagctatatttcagaacaaagtgctgtgttgtcatgatttgcctggactcccagggcgtctcttacccaacttgataacgatgctgttcattagcagcctttgttaactgataaccaagagcggtaatgtgatactcataagcaattttctgtgtgtaggataaaataaaccatcttgtatgggaaaaaaaaattg

SEQ ID NO: 41341 - DNA, 652 bp, Homo sapiens
atctggtcttgctgggccattgctctagaacctgctcagtaattagcacttgttgagtcaattatgcccgaagtggaacatcagcctctggagccagtctgcaagaatgggacaggtggcgtgccatcctaagaagagaggacagcctctgctgaggccccgggcaagggcagcatggactacaggggttgtgcaagaggggagaatgagagatgtaggaggagctcaagtgctggcaacaggcaagacccctggggctgaaattgatttcaagtacgccctcatcgggactgctgtgggtgtcgccatatctgctggcttcctggccctgaagatctgcatgatcaggaggcacttatttgacgacgactcttccgacctgaaaagcacgcctgggggcctcagtggtgagggatgtggtgctcgggcctggctctgccccacccagcgaggcaccgagggccactctgtgatgctggctacagcaagaatgaacccacaagcgcagagcccaacaggctgtaaaggaaggcagtgacctctgcatgtttctgtctctctcactaacccttttgcctctgtttctctttcttctgtctctatctctctctgtctctctatttgtgttcctttttctgtctccctttccatg

SEQ ID NO: 41342 - DNA, 690 bp, Homo sapiens
gatgagcagaaagaacacctggggggctgtaggcaggtgaaagatagttttattcagcagcagctcaaattaacagctttcttacactagctctcttatgaacagcttttcttacactgtccacctttatctcggcggtttgctccggctgtgtggctcccgcgacccccatgcctgcggcttcccagaaggctctcccctgccttcagggtcagcagcttaaccctttatctgggcatgtgcaagccgagctgtgtcctggctccctcctgtccagacgggacagctttggctgtctctctttctctgggcaccagtgcctgcacaagagccatgttgagccagggtgcgccccaagagcgcctgtacaacggtagcagggcaattataccttttacagacaacagtggctcagagccaaggatgtacttacacaaacaggttatataacaagtgggggtgtgcgcctgcacgccaaactcgctgagtcatgcaggcctggatatccaccttggcctacctccatgtaccttttcatgtgattacacacttagaaaattatttactggccaggtgcggtggcttacaccctgtaatcccagcaccttgagaggctggggcaggaggattgctctaggccaggagtttaagaccagccttaggcaacatagcaagaccctgtctctacaa

SEQ ID NO: 41343 - DNA, 491 bp, Homo sapiens
tgggactgtctgggcaaccatggcctctgaagtttgagctcatgctctgcccatggctgcagctgcctgtggtaagccgaatgaattccaggagggaagatgacagaagaggctcaaggctccggctctgttccctgctctgctttctttcagagcctggaattctccaccaagcccatcgctgctgcgtggctttctgggcgccgtgccaaggactcacactggactctgtattcagccccagattgcatcctgcctcggcgtttggggtggggcggcccagcagggctccccttgtgactggagtcagagtttgcctgggctcccctgaggcgggcctaggccggggtcgtgaggctgctccaacaagcagccccattgtatcccagcctgggagtgcacagagagcggctcctgtgatggagaagcccctgtgcctctgcagggtttgattccacccaaccaggcgaagccatgtggtgagcatgtgc

SEQ ID NO: 41344 - DNA, 1454 bp, Homo sapiens
cagtggccagaatcataagccctgaccccatccctagaaagatgaggtcccagcaatggccagagcatttctcaccagttctgtgagatagcacataaaaatagagttctttgggcaaaacttttgggaagcaatgcatcctacatgggctgatattcagcctgagctgttctcaagaggagagtggtactggcagtttatggctgaaatccattctgattggttggagtctatgctataccagttgttaaacattttgagtatcactcttgcatactgttactattatattttctctatatatagacagaaaggccattttagaatattaaaggctctgaaaatttctgcagtagacccaactgaaggttctattaaggcagtgtttcctaaatgtatttgacctcagtatcctttctatttacatcccacagaactggtgactatgaaacactctggtgaacactgggttagagagtaacaaggaaacaagagatagtgatcaggcatccagagcccccttttttatccatatgaaagccaggggggccagaccttgttcatgtgtgggtctgtcttccttatgccaatcagcagtatatacatcacctctcaccctcacctgctgaaaaaataacctttttacccattattcctactcccttcatcctgcacatacatatatccagctgagagatcacactacaaggctaagagatgatctaatacccccaaatagccctggcccacacagaaaaacagaaaaacaaaaaaaactttatccccttgaacagtcccctctctcctcttgactgtctttatgtgtctgtgtatttgtgtgcagggtctttgaagacagcatgctatgtgcaaactgtacaagctaggttttctaggggctgtgttctggggatgagggtagtggggattatatggggttttttctttgtttcaagacaggaagcagtctggttaagggagaactagtggaaagggttaaatgacaggttaagttgagtacaaagctttcccagtactgctgagattaagacaattgtggatgtgtatgtctaggtttgaatctctgggctgcagattgcttttgccctggcagagaaagaggagtctttggggaggtgagctgtttcttgttgatttcaggcaagaggcacatagaaactttgtattgagtggggattttgttttaagtgctggaaaattagggcaggaattacgtgtttgcaagttgttgccatcactggtttgaatttgactgcctcatcaaggggcaagagttattcttgaagatctcattctcccagaaacagaactttagggaaaatggctgtggcttagcttttcagctgctgcagggtaataagctttctggttggttttccttccaattctggaaaggtgtccacactaagacccttaactctagggcttgcata

SEQ ID NO: 41345 - DNA, 590 bp, Homo sapiens
aagaatagagaaagtgaaatagatgacatttggcttccatctcattccccaccgccctcgcccagcgtcctcttcccagcccttcattttctcttgggtaggggtgtgtctatgagagagaggatattgcttgttactgatggaagccagaatcctccccatttcttctcccgcaatccagactctcactagaatatctaaatgatgtcctctgaacttaagtcctttatttctgtatgttctcaaatggcagatccattcaaaaaattctggagccaattatttaagttccagataacaaggccgggcactgtggctcatacctataatcccagcactttgaggaggctgaggcaggatgggatcgctttgagtccaggaattcaagggccagcttttgacaaaaatagtgagaccccatctttacaaaaacaaacaaattagctgggatgatggtgcacacctctagtggctactcaggaggctgaggcaggaagattgcttgagaccaggagttggaggctgcagtgagctatgatgataccaccacactccaccctgggtgacaaagcaagaccccatatctttaa

SEQ ID NO: 41346 - DNA, 329 bp, Homo sapiens
ggaaatcctctgttataaggcacctgcactaagcgtgaagtggtatggtgtaatttgaagatgggtttagattagttaaaaatgtatattgtagccagggtgacatagcaaaacccagtcttaactaacaatacaaaaattagccaggtgtggtggcacacatctgtagttccagctacttgggaggctgaggtgggaaagttgcttgagcccgggaggcagaggttgcagtgagccgagattgcacccctgtactccagcctgggtgatacagcaagaccctgtctcaaaacaaacaaacaaacagaaatgtatattgtaagttctag

SEQ ID NO: 41347 - DNA, 460 bp, Homo sapiens
agcagtagaatataagagattgagtgctcttagcaaatcttttattaccccagcatagtctctagtggtgtaattctctattgatgtgaacatttctattacttatgatagagaatcagtacaaaagtttataaagcaaagctgaagtttgtcacttgtaaatggtataaaggacaaattagaaacagattttgatttcctaaaccatgtatttctcaagctgctttcttgtgaccattttatactacttcaggctcctgatttcaaatacatttttaaagcacctaaataggccaggcatagtggctcacacctgtaatcccagcactttgggagactgaggcgggcggatcacctgaggtcaggagttcgaggccagcctaggcaacatggtgaaacaccatctctaccaaaaatacaaaaaattaggtgggcgtgatggcacatgcctgtagtccca

SEQ ID NO: 41348 - DNA, 553 bp, Homo sapiens
cattttatggatggaccttgttcatactccggaaaattgactcaggtaccttacccagtaaactggcagaacttactgatctctatacctctggctgaaatgtagcaagcactcagaaaatgtttaagtagattaatgtattacatttcttaccagagtgactaagacccactaaaatttattgctagaacttcggcttaattactatgccttccgcttttggggtggcattgtcacatttagtagtctcagttgaaggtaaaaatttaatcaggtttagttgttttagtagtgtggcataatttttatatggtgaaattaaaacggtggaatctttaataactatcacccagtcaattctgtcctcaaatcatcctacacactttttcttccccatctctactaaaaatacagaaaattagccaggtgcctgtagtcccagctactcgggaggctgaggcaggagagtggtgtgaacccaggaggcggagcttgcagtgagccgagatcacaccactgcaccccagtctgggcgacagagcgagagtcgtct

SEQ ID NO: 41349 - DNA, 391 bp, Homo sapiens
ctatacatattaaaaatctttttaaaaaacttctggaaggaaggtattatctaattggacatactaagttttcagtgctgcattttgagcaaattaaagttggtcataaaaaatacttacctttggccggacacggtggctcacacctgtaatcccagcactttgggaggccaaggtgggcggatctcgaggtcaggagatcgagaccatcctggctaacacagtgaaaccccatctctactaaaaatacagaaaattagccaggtgcctgtagtcccagctactcgggaggctgaggcaggagagtggtgtgaacccaggaggcggagcttgcagtgagccgagatcacaccactgcaccccagtctgggcgacagagcgagagtcgtct

SEQ ID NO: 41350 - DNA, 381 bp, Homo sapiens
aaaatgagataatttgttttctatatcattacagttattttcatgtctggagctcttacattaagtttcttttcccaaagtgtataagttttagaaagaaggaaagagaaaaaccttgaaattaaggttttataatggaaacactgtgcgcttaactgttcttgtgcttacccatcacgttaatacagtggttctcaaactttgcctggttggttcccatttaagaattatgtaatgaattccagaactcaccatgaaacaaaattggtgaaatcacagttggagtgtaacagacagcaaattaaacttctgtaggcagtaaaatccatgcctacagaaatccgtgacttaccaaattgaaggtaaaaattggtcgtagac

SEQ ID NO: 41351 - DNA, 444 bp, Homo sapiens
taatttaaatttcaaaactgcttgaaaatatattgtatcttgtatagatgagtcataggacaaacatatagactgttgttctatgggaatgcttgctgtctcagcagctcaaatattaatgccttaataatttacttaataagccaaagatgtagtttgctgatagactgtatgttcatatacaagcctctttcctctgctctcccatgcctaccccgtctgcaacctttgtgccctcgtcaccctcctgtgtgcatgtatgagtacccggaatatacaaacctcatggaactatgggactctttgacctctatgataaaagatcttcggattatgcttacttcttgattatctttttggggaacatcttggcctagggatttggattattcactgcttctttgtacatacttcttagtttgttaacttctgcaacacagtctt

SEQ ID NO: 41352 - DNA, 206 bp, Homo sapiens
ccttagaggatgtgccttagcttcaaaatttctgacatgaagataaaaagctggaactgtatctgaactttttgtgtgtgtatgtgtgaagcaaaagctaaaaggcaccaatttaaaaactgaatttatcttcttagaagtatctgctgctcaataatttttgaaaataattttttcttacatgaaatgaaattaggaaaaaaaaa

SEQ ID NO: 41353 - DNA, 287 bp, Homo sapiens
tgattataaacctaactgcacttgctcaaaatagtcaagttagcctatcctttcctcccttaaatccgggtactttcttctccttactaattaatgtcctttgtagcacattttcccccaaaatagagcactttcatcagcattaaaaacctgttcaggttgggtgcagtggctcattcttgaaatcccagcattttgggaggccaaggtgggaggattgcttgagcccaggagtttcagactagtctgctcaatgtagtgagacctcgtctctgcagaaaagtaaa

SEQ ID NO: 41354 - DNA, 372 bp, Homo sapiens
gtaattttgtttttcaaagaagctgtgaggaaagaaggtgtatatacttatatcatttgttatattaaccctgttatttaccattttcagttctctttgttcctgtgggttcaagttaacatccagtgttactttcctactgtaatacagctttgctgtcacccgcttcctattacactgttactggtaaaccttacatttctgtatatgataggcccaacaatataattgcacattgagtatccctaatctgaaaatccaaagttcaaaatgttccagaagcccaaactttttgagcactgtcatgacactcaaaaagaattgctcactggagtattttggattttcagaatagggatgcataaattccaa

SEQ ID NO: 41355 - DNA, 562 bp, Homo sapiens
caaaaggcctctcacatagaattttgaactaaagtcacatattgaacaaaggatatttaaattaactactgaacaaagtaagagctcttcaaaagaaacagagctccctgccaagccccctaaaaatgcccccaggcctcttattcattcactaccattatttcagtttatatctaaagatgttttatttcttatctcattctcttcccaccacctagtggacacatagttggcacttactgcttgtttattgaattgaatggaatctagccccaagagttaaaagctattctctgaagaagaaaataaaagagaaataattttgtcagtgaatagaaataacaagtctgagtttctctcggcaatggaataaagttaggaagggataacacgtacagttggctctctgtatctgtggggttccacacttctgcatttagccaactgcggattgaaaatattcagaaaacaaggatagttgcatctgtgttgaacatgtacagattttttccttgtctttattccctaaacaatacagtataacaactatgtacatagcatt

SEQ ID NO: 41356 - DNA, 512 bp, Homo sapiens
gcagacacctgtaatcccagctacttgggaggctgaggcagaggcaggagaattgcttgaacccaggaggcagaggttgcagtgagctgagatggcgccattgcactccagcctggacaacaagagcaaaactctgtcttcaaaaacaacaacaacaacaacaacaacaacaacaacagatctcattatcttcacctcgtccttcctacaacctgtggggattatgagaactacaattcaaggtgagatttgggtggggacacagccaaaccatatcatatggcgttgactttgaagtcaggtagactggatttgaatcccaactatagcactaattaatgttgaatacgtattaggggttgttactctattaatggagttttactccagtcacgttaagtcatgtagctcaatggactgaagcatgtcactttattgacaaattaactctttcagtcctgactctttcatggtgtagctataaccacagtgggactccagcagccccaacc

SEQ ID NO: 41357 - DNA, 325 bp, Homo sapiens
acaatcttgagcttcaagtcagtggaaagaaatgtacaatctaattgaacacaaaaaaatttatagttcaaaacattcaaagtgtcagattggttgcataaattaaaagagattagagaagaggaaaatcagtggacttggagtgatcagcaaaggcttcaataagtaggtagaacttaatctgggacttaaatgtgaaaattgaccagcttggaaggaaaaagggaggtggtaccacataaggatgtgaagtcaagcagaacagcagaaatggataatgctaacggtatatgaagaccagcagtggctgctgcaggaagtagag

SEQ ID NO: 41358 - DNA, 365 bp, Homo sapiens
ctctctaaatgtgtaactgtgtgtattttaacgttgtgagggtaagggaacaagtatcagaaaaaggtactttccatgtgcttttgcttccagtgagatttcaagtaaaaagtgtgatgtcatccttagagcccatgccagaggtaaaaacaaacagaaacctgattcatggggaccatacatcaaaggcctaaaatcaaaagtgaccaaatgtgttcgttcttctctcaataatttaacatctttcagcccctttcctggctttataaaataagggacaaattccaatcctgtaaaacagacatttaagcaaagcactttcatagtatcattatcagaggcatatatctttgggcaagccactt

SEQ ID NO: 41359 - DNA, 892 bp, Homo sapiens
  misc_feature (733)..(733): n is a, c, g, or t
  misc_feature (774)..(774): n is a, c, g, or t
  misc_feature (824)..(824): n is a, c, g, or t
ggaggaagagagaggaagggtgagggtgaggcgtgtgggggcggctgcctgtgtcagccagggagctggttttgttctcctgtttcctgtttgctgggctccccctccgtgcaagagctggaccccccacccccaccctggcggaagccagatgggaagagtgaggctgccacgagctgagtcaggagagcttagggggagagcgggaaaggactgcagccggggagagcaggacgcgccatctccattggcaccctctcccgccccacttccatcgctagaaaactaaggattcggtgttgggaccactcctgccctgacctgccctgtgactccgtcatactctccaaaggccagaccctcctagaccagctggaaccaccatcaagatgtccccagccatgtcagactctggggccccaggcggagggcaaccagatgtcttcagctccaagtctggcctctcctcccagcaagcagccaactgcagagaccttggaaaggatcaaccatatacaatgtccatttcctgccctctaacctggcaggggagcaaggcccagccaagttacagaaactgaggcttggccaggcgtggtggctcacacctgcaatctcagcactgggaggccaaggtgggcagatcgcttgagcccaggagtttgagaccagcccgaggaacatggcgaaaccccatctctacaaaaaatacagaaattagccaagtgtggtnggcacgtgtctgtagtttcagctactcaggaggcttaggtngggaggatcacctgagcctgggaggtagaggttgcaatgagcagagattngctctccagccagggagacagagtgagaccctgtcccaaaataaataaataaataagaataaaattta

SEQ ID NO: 41360 - DNA, 940 bp, Homo sapiens
ggaggaagagagaggaagggtgagggtgaggcgtgtgggggcggctgcctgtgtcagccagggagctggttttgttctcctgtttcctgtttgctgggctccccctccgtgcaagagctggaccccccacccccaccctggcggaagccagatgggaagagtgaggctgccacgagctgagtcaggagagcttagggggagagcgggaaaggactgcagccggggagagcaggacgcgccatctccattggcaccctctcccgccccacttccatcgctagaaaactaaggattcggtgttgggaccactcctgccctgacctgccctgtgactccgtcatactctccaaaggccagaccctcctagaccagctggaaccaccatcaagatgtccccagccatgtcagactctggggccccaggcggagggcaaccagatgtcttcagctccaagtctggcctctcctcccagcaagcagccacctctgatggccaacaggtgctgctgtgtgcccagatcaagaatccacctctgcggaattcaaaaccgctgagggttctgggacagcagggaggagagaggtggagacgcaacatgggttttctgtgttcagactgcagagaccttggaaaggatcaaccatatacaatgtccatttcctgccctctaacctggcaggggagcaaggcccagccaaggagttacaagaaactgaggttggccaggcgtggtggtcacacctgcattctcagcactggaggccagtggcagatcgttgaaccagagttgagacacctgagaactggggaaccttctttgaaaataagaattccatggggggcggttggatcacaacagggtagggaagcacgaccggagaaggctacaatccctgttccaggaaggagcccctaataaaaataaaaaccctcgggaga

SEQ ID NO: 41361 - DNA, 783 bp, Homo sapiens
  misc_feature (592)..(592): n is a, c, g, or t
ggaggaagagagaggaagggtgagggtgaggcgtgtgggggcggctgcctgtgtcagccagggagctggttttgttctcctgtttcctgtttgctgggctccccctccgtgcaagagctggaccccccacccccaccctggcggaagccagatgggaagagtgaggctgccacgagctgagtcaggagagcttagggggagagcgggaaaggactgcagccggggagagcaggacgcgccatctccattggcaccctctcccgccccacttccatcgctagaaaactaaggattcggtgttgggaccactcctgccctgacctgccctgtgactccgtcatactctccaaaggccagaccctcctagaccagctggaaccaccatcaagatgtccccagccatgtcagactctggggccccaggcggagggcaaccagatgtcttcagctccaagtctggcctctcctcccagcaagcagccaactgcagagaccttggaaaggatcaaccatatacaatgtccatttcctgccctctaacctggcaggggagcaaggcccagccaaggaggtaacagattcctccaacacnaaaccacaccttccttccccacccccaccacctccacacccagctgcctctgtggggacttcagggggagagtgcacacagtggggcctcaaaggttatgtagcttgaataaatgatcctccaggcctggggagcctctccgctccctcccccatttcctctgggaaaggaatgtggggtgggccccagag

SEQ ID NO: 41362 - DNA, 807 bp, Homo sapiens
  misc_feature (648)..(648): n is a, c, g, or t
  misc_feature (689)..(689): n is a, c, g, or t
  misc_feature (739)..(739): n is a, c, g, or t
ggaggaagagagaggaagggtgagggtgaggcgtgtgggggcggctgcctgtgtcagccagggagctggttttgttctcctgtttcctgtttgctgggctccccctccgtgcaagagctggaccccccacccccaccctggcggaagccagatgggaagagtgaggctgccacgagctgagtcaggagagcttagggggagagcgggaaaggactgcagccggggagagcaggacgcgccatctccattggcaccctctcccgccccacttccatcgctagaaaactaaggattcggtgttgggaccactcctgccctgacctgccctgtgactccgtcatactctccaaaggccagaccctcctagaccagctggaaccaccatcaagatgtccccagccatgtcagactctggggccccaggcggagggcaaccagatgtcttcagctccaagtctggcctctcctcccagcaagcagccattacagaaactgaggcttggccaggcgtggtggctcacacctgcaatctcagcactgggaggccaaggtgggcagatcgcttgagcccaggagtttgagaccagcccgaggaacatggcgaaaccccatctctacaaaaaatacagaaattagccaagtgtggtnggcacgtgtctgtagtttcagctactcaggaggcttaggtngggaggatcacctgagcctgggaggtagaggttgcaatgagcagagattngctctccagccagggagacagagtgagaccctgtcccaaaataaataaataaataagaataaaattta

SEQ ID NO: 41363 - DNA, 288 bp, Homo sapiens
gacctgccctgtgactccgtcatactctccaaaggccagaccctcctagaccagctggaaccaccatcaagatgtccccagccatgtcagactctggggccccaggcggagggcaaccagatgtcttcagctccaagtctggcctctcctcccagcaagcagccagtaagtcctttcaggtgcctaacttgcattcctcttgctgctagtccagtccctggttctaaggaaatggaatgactctcccctctcatcccccatggagcctctgatggccaacaggtgctg

SEQ ID NO: 41364 - DNA, 681 bp, Homo sapiens
  misc_feature (490)..(490): n is a, c, g, or t
tccactgtccccagcaagaacctgcgggagggtggcccaatggggagaaaactaaggattcggtgttgggaccactcctgccctgacctgccctgtgactccgtcatactctccaaaggccagaccctcctagaccagctggaaccaccatcaagatgtccccagccatgtcagactctggggccccaggcggagggcaaccagatgtcttcagctccaagtctggcctctcctcccagcaagcagccacctctgatggccaacaggtgctgctgtgtgcccagatcaagaatccacctctgcggaattcaaaaccgctgagggttctgggacagcagggaggagagaggtggagacgcaacatgggttttctgtgttcagactgcagagaccttggaaaggatcaaccatatacaatgtccatttcctgccctctaacctggcaggggagcaaggcccagccaaggaggtaacagattcctccaacacnaaaccacaccttccttccccacccccaccacctccacacccagctgcctctgtggggacttcagggggagagtgcacacagtggggcctcaaaggttatgtagcttgaataaatgatcctccaggcctggggagcctctccgctccctcccccatttcctctgggaaaggaatgtggggtgggccccagag

SEQ ID NO: 41365 - DNA, 441 bp, Homo sapiens
gaagcagaagtgtgatttccacatgaggcagcataccatcttcccccaaccacaccttagggtctgcaagagaacataaggagggggaagccctgaagttgtatcatgggacatgtggccatctctctctctttcccatttttgtgtcccctattataaaatggtctatagtcactgtttccacatcctcctctcccattctcaattttcctctccaattaggctgtctctgtccactgaaactgctcttgtccatctcagccagccatgggtcaaacccagtggtcacttcccagtccttaccttcctcccgtctcagccctgtttgtcacaataggtcctctctctttcttaataagctttcttcattcattctccaagacaccactctcaacccactcactgacgtgcatcctcatctttgctcaaatgacatcaagg

SEQ ID NO: 41366 - DNA, 448 bp, Homo sapiens
cttctaaagtgctgggattacaggcatgagtcaccacgcccggctgacacttttcaacgtattcatgcacattacctccctcatttaatcctatgctagggcagctagtatcacccctgcatttctgatgaatttgaggttcagagactgacttgtccaaaatcacagagcacgtgagtggccacagctaacctgaagccccctgttcccctgactcggcttcctcatgttgtgtagccgtggaattttcagggtgctggacaggccttcagtgtattttgggcagtgtcattcaggatagaaggagctgtgtggagtgattcaaatgctcagagaagctggtgcttctgcatgaagactgcaagaaaatgggattggctgcagaagaattttgctaattttatgtcttgagatacacggactctactttcaagattggcagtcattc

SEQ ID NO: 41367 - DNA, 384 bp, Homo sapiens
actaagcaatacattgttttagggttacatatgttgatatactataaataaaagcaaaaattcatattgtgattacctctagggcagtagttctcaacaaggggtgactttgccctccaggggatatatggaagtgtttggagacgtttccggttgtcacaactggtggtgatggtggtgatatgctactgtcatcttatgggttgaggccaggggtattgctaagcatccaaaatgttctggttaagaattatctgcccaaaatgtcaatagcgtgaggttgagaaactgttctaaagcagtggaggtgggcggatcacgaggtcaggagatcgagaccatcctggctaacatggtgaaaccccatctctacaaaaatacaaa

SEQ ID NO: 41368 - DNA, 1133 bp, Homo sapiens
aggcacatgccatcgacgcccagctaaccttttcaattttttgtagtgacaggttctgtgtatgttgcccaggcatgtctcaaactcctggtctcaagtgatcctcccgcctcccagagtgccgggattgtgggtgtgagctaccatgcctggcctacacgtgtaaactttgagatgcattttagatatccaagtggaatgttgagaggtcaggtagagattagagaccagagctccagggggaggttgaagctggagataaacagaggggagggctcaggatcgttgttaaagacttgatatagaccaaagctcagtgaggacagtgactgagtctatttattcacctctatatacctaggacaagcattcagttatgtatatctaatcaataaattaatctgtggctattgttgcacagtgattgtgatttagtacaaaacgaaatcactaactgataatttgctttattgttcaaaacaaaaaaaattgaaatctggtatgtagtttcttagaaataatttgctaatagggctgggcacagtggtgcatacctgtaatcacagcactttgagaggctgaggtgggcccaggagttcaagaccagcctgggcaacatgacgaaaccccatatctaccaaaaaacaaacaaaaaatagcctgacatggtggcgcacacctgtcccagctacccaggaggctgaggtgggaggatcatctgagcctgggaggttgaggctgaagtgagacatgatcgtgccactgaactccagcctgggtgacagaaaaaaaaaggaaaagaaaagcttttataataaagcttgacactgaaaagaatcttagaggccatttaatgcaaaggttcaaagtgtgcaggcaaggaatggtaaggggagtggacagtttattgcaaagggtgagcccttgtttacaggggccacatattgacaataaactgagtaacaatgtcttaaatgtaatggcaccactcttgttaaagtatatgaagatgttgttgcaattaataaagagaacatttttgttaatttcttgttattatgtattttcataaccagtaggctccaaaaagacagctatctttggagcagggaaaagctagtgcttatacattt

SEQ ID NO: 41369 - DNA, 851 bp, Homo sapiens
ccttcatatctcaatgctacagtctttaagcccctgttataagaactcggaggcttcagggatgacaggaaacaccagaacgctatggtggagcatatctaggtgccttctcccaactcagaccctttgactgtacaaagacacaggtttcaaggctgagatccacaaaactctagcaaatactgcacagacaccaaccaatgacagcaggtgctgcctgtcaccctggagcaccaggcagcatttcaaagcactcttgctgtgccggcctctgattgctggttatagggaggtctggggtagtcccaaaagctgggatgtccaaggtagctggggtcagtcaggaggctcagggcagtggcaggaaaatattttcctccctgttagagcaacagtggggtatccaggctgaatatcagtggcgagaaggatgatcgcacagcaccaagacctgcggaacaaactttgttggagctgaatccagaaaaacaatcttcttctaagccactctcctgcccctcatttaattattgtgcttttgggtgtacttggactactctgaaacattcagaactctgtcaaaaaaaaaaaaaaaagagagaaagacttctttcctcagcacctctctgacttgggcatcagtcttggcttcctgtctacttgctttcacttgctgtttgtggcagagatggcccccagcagatcccttccctcgggttcccttgctgtcaagtggaggctagggagcgagattatggccaataggaatgtgaggcggaagtgatgtgaaccacagatcttgagccttagggaacatcccatagggaccctggagcttctttcccccggct

SEQ ID NO: 41370 - DNA, 471 bp, Homo sapiens
ctcctcccacagacattcctgtggtccactggggaagtgagcagcctgggactgcagtggttaactccccaccaggctcaggagagaaggagtgtccaccctcagacccggtgggaatcaggatccctgacccctctacctttaactccaccagaccacatgagcacgtgaatatgttatgggttcaactggatcccctaaagaagatacactgaagtcctaatccccattacctcagaacgtgaccttatttggaaagagcgttgctacagagataatcaagttaaaatgaggtcattagggtgggccctaatccaatatgagtggtgtcctcatgaaaaaggggaaacttggccaggtgtggtggctcacgcctgtactcccaatactatgggaggccaaggcaggaggatctcctgagatcaggagttcaaaaccagcctggcaacctggtgaaaccccgtctctact

SEQ ID NO: 41371 - DNA, 777 bp, Homo sapiens
  misc_feature (697)..(697): n is a, c, g, or t
tgtcaacaagaaaatgtccccaaagctcttaggtattttgatatgtcaaatcatgtttttgaagattttaatgaaaccataggcaacaaaaacaagtatggttgatatcttgtccaaacacaattctagatttatttgatacacagcacaaatgtaaattttggtaaatttcatttggtctgaacttcttcctaatgaaagtgaaaagttcttatctgctcaatatcctgcacagcatgtatataacactgctaaaaaggggtataacttgcttaagtttgataattgatgctttcttaatgaacacttttggttactttgtcagtttttaaaaaatttgtagaagcacttaatgtgagttttgacttgaaagaaatggaaaaacgttggcattgtgactcatgcctgtaatcccagcattttgagaggctaagttaggagaatcgcttgagtccagtagtttgagaccagcctggacaacatagtgagaccctgtctctaggaaaaaaaaaaaaaaaaagaaatggaagaaaatgacttccttggatatgtgcctaaaagatggctattattgttgctggacatagatgccctgcagtacaatattaacaaaatatgggaccaaaggaatgcccatctctgatttggcagtacattgagactccatctcaaaaaaaaaaaagagagaaaaaaaggntgatttacttaagccttaattttatcaaggcacgttttgcattttgcagttttcagtcttttctcctgcttagaactggg

SEQ ID NO: 41372 - DNA, 2652 bp, Homo sapiens
cgagagcctgaattcactgtcagctttgaacactgaacgcgaggactgttaactgtttctggcaaacatgaagtcaggcctctggtatttctttctcttctgcttgcgcattaaagttttaacaggagaaatcaatggttctgccaattatgagatgtttatatttcacaacggaggtgtacaaattttatgcaaatatcctgacattgtccagcaatttaaaatgcagttgctgaaaggggggcaaatactctgcgatctcactaagacaaaaggaagtggaaacacagtgtccattaagagtctgaaattctgccattctcagttatccaacaacagtgtctctttttttctatacaacttggaccattctcatgccaactattacttctgcaacctatcaatttttgatcctcctccttttaaagtaactcttacaggaggatatttgcatatttatgaatcacaactttgttgccagctgaagttctggttacccataggatgtgcagcctttgttgtagtctgcattttgggatgcatacttatttgttggcttacaaaaaagaagtattcatccagtgtgcacgaccctaacggtgaatacatgttcatgagagcagtgaacacagccaaaaaatctagactcacagatgtgaccctataatatggaactctggcacccaggcatgaagcacgttggccagttttcctcaacttgaagtgcaagattctcttatttccgggaccacggagagtctgacttaactacatacatcttctgctggtgttttgttcaatctggaagaatgactgtatcagtcaatggggattttaacagactgccttggtactgccgagtcctctcaaaacaaacaccctcttgcaaccagctttggagaaagcccagctcctgtgtgctcactgggagtggaatccctgtctccacatctgctcctagcagtgcatcagccagtaaaacaaacacatttacaagaaaaatgttttaaagatgccaggggtactgaatctgcaaagcaaatgagcagccaaggaccagcatctgtccgcatttcactatcatactacctcttctttctgtagggatgagaattcctcttttaatcagtcaagggagatgcttcaaagctggagctattttatttctgagatgttgatgtgaactgtacattagtacatactcagtactctccttcaattgctgaaccccagttgaccattttaccaagactttagatgctttcttgtgccctcaattttctttttaaaaatacttctacatgactgcttgacagcccaacagccactctcaatagagagctatgtcttacattctttcctctgctgctcaatagttttatatatctatgcatacatatatacacacatatgtatataaaattcataatgaatatatttgcctatattctccctacaagaatatttttgctccagaaagacatgttcttttctcaaattcagttaaaatggtttactttgttcaagttagtggtaggaaacattgcccggaattgaaagcaaatttattttattatcctattttctaccattatctatgttttcatggtgctattaattacaagtttagttctttttgtagatcatattaaaattgcaaacaaaatcatctttaatgggccagcattctcatggggtagagcagaatattcatttagcctgaaagctgcagttactataggttgctgtcagactatacccatggtgcctctgggcttgacaggtcaaaatggtccccatcagcctggagcagccctccagacctgggtggaattccagggttgagagactcccctgagccagaggccactaggtattcttgctcccagaggctgaagtcaccctgggaatcacagtggtctacctgcattcataattccaggatctgtgaagagcacatatgtgtcagggcacaattccctctcataaaaaccacacagcctggaaattggccctggcccttcaagatagccttctttagaatatgatttggctagaaagattcttaaatatgtggaatatgattattcttagctggaatattttctctacttcctgtctgcatgcccaaggcttctgaagcagccaatgtcgatgcaacaacatttgtaactttaggtaaactgggattatgttgtagtttaacattttgtaactgtgtgcttatagtttacaagtgagacccgatatgtcattatgcatacttatattatcttaagcatgtgtaatgctggatgtgtacagtacagtactgaacttgtaatttgaatctagtatggtgttctgttttcagctgacttggacaacctgactggctttgcacaggtgttccctgagttgtttgcaggtttctgtgtgtggggtggggtatggggaggagaaccttcatggtggcccacctggcctggttgtccaagctgtgcctcgacacatcctcatccccagcatgggacacctcaagatgaataataattcacaaaatttctgtgaaatcaaatccagttttaagaggagccacttatcaaagagattttaacagtagtaagaaggcaaagaataaacatttgatattcagcaactgaaaaaaaaaaa

SEQ ID NO: 41373 - DNA, 368 bp, Homo sapiens
ggtagcaagattcagccattgcctttgtaccatattgcaaatattaaatgatagcacttactgctgggattgtacatggcagggactttttaagaaatgctcgtttccttcagtatctttttctcttcctaagttaccttgcttgtgtttggaacacttttaaaactcgtatatagaaaggcaaaaagttactccaaccctctcctttgtaacaaacccacacagaaggataagaaccacagttgcagctaccctggaacttgagttctgtcaagggagctgtagctgtttactttaaggaaggtatagggaatgtaatgattgtactttttcccacctccaccgggggtaatagcccaaggcattag

SEQ ID NO: 41374 - DNA, 355 bp, Homo sapiens
tgacttaagtacaaaggagaaaaggaacttttataatggagaggtctcctggaagccgtcttaaaccaagtaatgaaatttaacatcctcaataatgggacagactggcatgtgccaactgaatgtaggaagtctgcagcatcgtctaggcagtggtcttgctaaaatatttcagctctatccaaccatgaggaagtaaaaaatgcagatgatgggacatgcttcaagacacctgtcctgaattctgcaacactgtcaatgttataaaacactattctagattaaaggaaattgaagagacatgccattcaaatgcaaggcatgtgtcttgattgaattctggatgaaaaaaaaa

SEQ ID NO: 41375 - DNA, 937 bp, Homo sapiens
taacctgtcagttaaaaaataattactatgtcagtatggctggcagctcatataggaaaaatatgctgtctcttaatcaaaggtgattacagttttcccctgtctataaatgtgcttgttgtgtaacgagaatgcattagtctcagcctgatgtacgaaatgaaaggcagtaagaagcagcaccattgttatcactccagggcgtgtctaatgaatcgtgtttccatgttctctcggtcacgccgtagagtgccctcagccaggggcttaagcctccctgtaaaaatgctctttaagattattgtagcaagaacagaaatgctgcatggctgggggtggggagagaatgccaacgagacagctgcatttcaaacagttacagctgcaaggattactcatagtaatagcagtgacagacaactgtttgagctttagtgtaaaaggcaatttggggacttgccctgtcagaattttagtagcaagcttctgtgtgcacgtgtgtgtgcatgtgcgtgtgttttttattcaaattagtttgtgtctgaagagtggaaggaaatattttaaatttttacttctcaattgtgctaatgttgaaatcagtagttgactcatctttattaaaatcattgtcctagaggaagtttataaaatgtttatttgtagcaatgatgaatttaaatgtatatgttctaactgaatcacatgtctgcttttccgtctcaaaatttatcttgtgatgattcctgttttaaaaatattggttttccttgtaatttctgaacatacagccttgtttaatataggatccttattttaaaaatttatttcaaatatgatgtaagcttataaaagtaatgcctgtcatgaaatctggaaaatactcaaagaggtaaaggagaaaacaatcattattctagcagagataactgttaat

SEQ ID NO: 41376 - DNA, 391 bp, Homo sapiens
agcttttgagctaaattactcctagtttttagctctaaatttgtaagattttgtgattctcagctatagaggtataacttcctaatctgtcaaagaggaattggagacttactactccctagaagtgtgaatgactaaattccagtggtgcgagtggctgagtgagaaggaaaactgatcttacttagtttctatggaagaaaatgtgaattaagtgccatgagtaactggcagcatcccttttgagcccaagattttctttcccctatcattgctgagcctgctggagcatataattcctatccattaccatcctccttttctttcttaaaaaaagtatttttggctgggcgcggtggctcacacctggaatcccagcactttgggaggc

SEQ ID NO: 41377 - DNA, 874 bp, Homo sapiens
  misc_feature (35)..(35): n is a, c, g, or t
taacatgatacgaatcgagctcggaccctagtttnagaagtttcaatagcatgaaaatttgagttgaaaacagctagcagaaagctgatggcgcaaattcaaccctaatctcatgttttggcacttctgaactatagcaagcataagggctcaactcttatctagttgaagcttacttgggtctttgagaatagtacatctcaaaattaaacactttcttagtccttattgttaagttgtttttggaattattgtcttatttgtctgaattaagtgtgctgcaggacttataggatctgatggatgatttgcctaaaagttggtccaggtcaacctcagggcatttaaatgcttggtccagccactttctgaaagttgactgaaatatgttgcacagcagggtagaggaggacaagtttactagatgtcatttttaacctgcttgtcttcatctctgactgtagaaatgtatattcattataagtttgccacaaatagagaatagagtttattctttgatcatctaatttctaggagctattgaaatttctactgctacctgcttttaaataagcgccaacaaacatttattaaaagggctttaaggtataggccaagatttattcaattgctaatggtatgttttctgtaaatgaaagcaaaaatatgttcaagtgtataatattaaatattaacattcagaaacttggagaaatacagatggcttttttttttgagacgcagtcttgctctgtcgcccaggctggagtgcagtggcatgatctccgctcactgcaagctccacctcccgggttcacgccattctcctgccccagcctcccgagtagctggtactacaggcacccgccaccac

SEQ ID NO: 41378 - DNA, 182 bp, Homo sapiens
atcaacactcaacacagactagttttgatcgctgatgtgtatgggatttcccacaccaagcaactttgcagttctcagtggataccagctgggtgccctacagtttaactcaatttcgacacacctacctgaagttagaatcagatcccacaggttcagggctcagtcccacaaaactatcc

SEQ ID NO: 41379 - DNA, 486 bp, Homo sapiens
cctctcttaagtaaatgaaaaccctattgtttttgctaactaaaataaggttttagttatagtataattttataagtggatacagtgcttgaaatcacatttccattcttccagggctggtgatgacaaacaattccgaatcaacaactcactgaaattgattccaactttgtagaagaaagtgtcacacacagagtcagcccccattcatgtttccccaacactcagaatcatcctagctttgtctggtagatagagtgtcaagtagaaagtggataagaggtaaaggggtattaagtatttgcctaatgttaatgttaagctgctaatgaatgtcaaggataatttatcctccgtgtactaaaacaaccttttattgtttagatcactgagtattagatccctaaaaaggactttgggggttacttgggaaactcaggcatgctctccagttgttaccaaagccatccccagtctggggaggag

SEQ ID NO: 41380 - DNA, 427 bp, Homo sapiens
aataatctccattgctcagctatggtgaatattgcaaaagagggcataattacctctgagataagctgccgaatccattgttctacaagaagtcataaatgtagttgttagtcatcacaaaaatattttaaaatagtacttaaggctgggcgcggtggctcacgcccgtaatcccagcactctgggaggcccaggcaggtggatcacgaggtcgggagatcgagaccatcctggctaacatggtgaaaccctgtctctactaaaaaaatacaaaaaattagccgggcgtggtggtgggcgcctgtagtcccagctactcaggaggctgaggcaggaaaatggcatgaacccaggaggcgaagctcacagtgagccgagatcgcgccactgcactccagcccgggcgacagagcaagactctgtctca

SEQ ID NO: 41381 - DNA, 335 bp, Homo sapiens
tcaaactggaagtaaccataaatgccccaaaaggtgatttaaagccactgttccttcaatagcaaggaactgggagaaatataaacgctaaacagttagctggctaaacaaatactacttccatagaacaatgtaatttagctattaaatgagatttataatcacatggaaagttttatagtaaatgtgcaaaaagacactatataaaatgacatgtacagtctgattctatccttctaaatcttgccaaaaggtattcaatgggtgataaaaattttggatggtatctgcatgtgcttatcaatggtttttcaactatgataagcatgtactac

SEQ ID NO: 41382 - DNA, 451 bp, Homo sapiens
taatcttcaatatagaagtatttacagtattgtgcaggctgttggaactgatctaacagaaaagtgaaatttgagcatggaggagaaaaagggctaagtcccgacaatgttgtccctgtgcaaggagaacttttcagagcctatgcacaaggctagagggtgtccttagataaaagcccataccattcagttcattcacagcaaggaagaaaaagcagtgatacaagcacagagggagggctgtggactgaatcgtgcccctcaaaattaatatgctgaagccctaatcctcaatgtgatgatagatgaggcctttgggagataatttgttttagatgggctcatggaggtgggtcccttgtacaagattggtccccctataaaccaaagagcttgctctctatctcatcaccgtgtgaggacacagagagaagacagccatctgcaaagc

SEQ ID NO: 41383 - DNA, 197 bp, Homo sapiens
ccccaaatagtgctgaatatctcaaagtaatttgcagtcttattctttaaagaaaattgccatttgtcctctgagaatcacaaaattgaaaagcaaagatacctctttggctttgtaggtgctgttttgctaggcttggaacgctcctccctgccacaccccgtatccttcttgtctggcgagtgtgtgtgcctgtc

SEQ ID NO: 41384 - DNA, 325 bp, Homo sapiens
gtcttatcatgttacctaggctggtgttgaactctgggcctcaagcctcagcctcccaaagttctgggattataggcatgagccactgcgcccagctcttatcccttatagcacataccatgttttttagagtcagtggcttatgtgtctgtttccctcatgagattgtgaggtcccagaggccagggttattatatcttgctcatctttatgccccaagtgtctaaaacagtaggtactgaaggatcatatgtttaacagatccaaatcactgagaaactgtgacataaactaacctcctattcagacctaagaaaccacaggc

SEQ ID NO: 41385 - DNA, 235 bp, Homo sapiens
gtagctgggattacagatgtacaccaccacacccagctaaatttagtatttttagtagagacagggtttcatcatgttggccaagatagtcttgatctcttgaccttgtgatccgcctacctcggcctcccaaagagctggggttacaggcgtgatctaccgcacctgctgcaaccaggttttctgaaagttaaaaattctcagccagatgcggtggctcaacactttggggagc

SEQ ID NO: 41386 - DNA, 468 bp, Homo sapiens
ttattttccaaatgggaaaaagtcatttcatcacatcagcctgtaacttgacatgaaccttgcaaataagcattaaggccaaaaaaggtataaaacacccagaacagctaggccacttgtggctgcttcacagatctaggggcaaatccatgagctggaaagtaaagtcacattagttcgggtaagaagtcttttatttcttggcttctgcggcctgcaatcaggaattacctgaaattctttctggaaacaaaaaggcagagcatatatacattaattaaaatcaaagaagtcagtggtggaaggggtttgcttagcattctatggctgtcacccagtatgaatggatgttctctattcttaagcctgtgccttgtaatttaggaaaattatcattctttgtgaaaaatcccattggtgagctaatctcttaaatgccttcttttattttctgaaaacaaaaacaaa

SEQ ID NO: 41387 - DNA, 393 bp, Homo sapiens
aatgaaggatgtgaatgtataatcaggtgattattcaaaaataacattattggatttaaggttcagagtattttatagaaatttctttgacttgtagttatgaattatgacatggtttctaaagctggttcttcctgatttctttatgtttagctaatgtgtttctataagttatttaccaagttctaaaaattagttgtttttaaaacattagatgatatttattgggtatctatttgaagcagttgtctaaaaagtcaagttttattagatccattacccaaggctgacatgtatgattttagtcattgaatacatttcttctgtggagtagtttatctgctagttattataaagcactgacaaatactttttgctttttcaggactgtga

SEQ ID NO: 41388 - DNA, 196 bp, Homo sapiens
atctcaaaaccaaacaaaaacagttgatttttaacaaaggtgccagtggagaaatgatagtctttttaacaaaaggtgctggaactatgaaaaatgaacactgacttatactttgcattatatataaatatcaactagaaatgaatcatagccttaaatataaaacctaaaacaataacattctagaaaaaaaatt

SEQ ID NO: 41389 - DNA, 398 bp, Homo sapiens
tgcacgctacatttccaccaacggtttatgagggtcccagttttcacacaacttcgccaacacgtactgacatcctagcgagcgtcagtacttttcgtttataaagtgatgtaactgcttcttttaagcaactgacgtttgtaaagttggccttaatgttagtttgctctgcccttgaatttaagaaaccagcaaaactaatagcttatccacagttgcctcaacggcctagctgccaccttccgtgtgggtgccgcgccgtttgcacaggcatcatcctttaccgagatcctgcgttctgggtctgggtgtagtcaggtcaggctttcttcccgcagcgaagcttttagttgggcatctgggacgcgcaggactttcgcgctacctgcaggccgcag

SEQ ID NO: 41390 - DNA, 458 bp, Homo sapiens
tgtgtgccagacactgtgctaggttttagggaatcctgctctcgtggaggtgacattctgtgaggttggcaggataatgaagaggaacacaattctcagcacagagaaaagttctgctcaactggtgcaccccatttattctagttctttccagggcagagtcaccctttccccaaccccctcctttcagctctgtggctggggaaacagcccccaccccaacccaccacatcccttggaacaccctagggcctggaggcgctggggccctttcagaaaaacaccctgccaagaatgcatcaccccgccagggcgccgaccaaggaaaacagagggcctgaggagggagatcagacaggccctcaggccaggccattggaggggcaggcgcagcaggaaagccgagtcaggcaccaggtgaaatatgacctccaaagcatccataggcatttcttgta

SEQ ID NO: 41391 - DNA, 343 bp, Homo sapiens
ttagtgagatgcaggagatcggagatcagtgggagaaatgtggcatcttcatggtattgggtctttgaatccatgaatatgttgtagtcagggatttagatcttcgttaattctctgatgtcttattgtttcctgggtagaggtctttcacatattttattatatttgtcccaaaggtactcactattttttatgctattacaaacagtacctttaaatttttactttcagctgggtgcagtgcacatgcctgtagttacagcactttggaggccaaggtgggaggatcacttgagcccaggagttcaagaccagcctaggcaacatagcaagaacctgtctc

SEQ ID NO: 41392 - DNA, 438 bp, Homo sapiens
ttctaacttaacttctaacattagcggccggacgcgcgtgtcacgcccgtactcccaaagtgcagggattacaggcatgagccactgcactcggcctaaaaaccactttttttgtttgtttggtttggtttgagactctgtctaaaaaaaaaaaaggtagacaccaggcacggtggctcacacttgtcatcccagcactttgtgaggccaaggtgggcagatcgctttaagcccaggagtttgaaaccagtctaggatacatggcgaaaccctgtttgtacaaaaaattagtcaggcgtggtatctcacgcctgtagtccccactacttaggaggctgaggctggagaatcccttgagcccagggaagtggaggttacagtgagcagcgatcatgccactagactccagcctgggtgatagaatgagaccctgtctca

SEQ ID NO: 41393 - DNA, 993 bp, Homo sapiens
atgtaaatcacacagatgttggtagagaaaaaggcatactggtattgaaactgtaaactggcctgtttacttcgtctcctaacaaaaaacactttggattcaggttctccacagcagtcttccactggccacagtgaggggagctaggtttccccagtctccagctagaaaaactcagaacatctaaagatctgaaagatggaaaaaagagaactaaaggcttctgttccaaaatttgacaagattccttggcttagtgaggccagccttgtaaacaagccattagtgctcagccttcccagaagatatcctcatacctctgcgacttttctgacttcatccaagaagaatatgaatttgccaattttgtttcaagttccagatgttttatctaaggccaggaggaaccagtgtgactccatgctgctcagaaaccaacagctgtgctccacatgtcaagaaatgaaaatggtacaaccaagaacaatgaaaatcccagatgatccaaaagcatcctttgagaattgtatgagttatagaatgagtcttcatcaacccaaattccagactacacctgagcctttccatgatgacatcccaacagaaagcattcactacagactgcccattctgggccccaggacagctgtcttccacggattactgacagaggcctacaaaactctaaaagagagacaacgttcttccttgcccagaaaggaaccaataggcaagacaacgaggcagtgagcggtaggagctcatcacctcccagactcccagagagaaaataacctcgccaagccaatctttgacactggcaccttctcctcacaattttctctcttctcccaaaagatgatttaattttgccttcctaagattgctggtattctagctcttacctctatgttctttctcacgtctcctaaagacaaaattgtttaatttacatgattataaagatctgtttatgaaaatggaaaaataact

SEQ ID NO: 41394 - DNA, 880 bp, Homo sapiens
atgtaaatcacacagatgttggtagagaaaaaggcatactggtattgaaactgtaaactggcctgtttacttcgtctcctaacaaaaaacactttggattcaggttctccacagcagtcttccactggccacagtgaggggagctaggtttccccagtctccagctagaaaaactcagaacatctaaagatctgaaagatggaaaaaagagaactaaagatatattccaagcacacagaacagtatttgtcatacagcctgaatccttgtgccagcagcccacaaagaggcatgccacagtatcaaaattaagccaattaataaccctgcaatggcttttaactgttcaaatgaagagttgcacatctctcattttaaatcaaaagtagaaatgattaagcttagtgaagaaggcatatcaaaagccgagacaggctgaaagccaggcctcttgtgacaaacagccaagttgtgaatgcaaataaaaagttattgaaggaaattaaaagtggtactcccatgataagaaactaaaagagccttactgttaatacagataaagttatagtggtctgtataaaaggctaaaccagtcacaacattccctttaggccaaagcataaaccacaacaaggcgctaactcttctcaatttaacaaaggctgagagaggagaggaagctgcagaagaaaggtttgaaactaagagaggttgattcatgaggtttaaggaaaacagccatctctgtaacataaaagtgcacactaaagcagcaagtgctcatatggaagctgcaagttatccagaagatctagctaagaacattgatgcaggcttccattccaagatggccaaataggaacagctccagtctgcagct

SEQ ID NO: 41395 - DNA, 679 bp, Homo sapiens
atgtaaatcacacagatgttggtagagaaaaaggcatactggtattgaaactgtaaactggcctgtttacttcgtctcctaacaaaaaacactttggattcaggttctccacagcagtcttccactggccacagtgaggggagctaggtttccccagtctccagctagaaaaactcagaacatctaaagatctgaaagatggaaaaaagagaactaaaggcttctgttccaaaatttgacaagattccttggcttagtgaggccagccttgtaaacaagccattagtgctcagccttcccagaagatatcctcatacctctgcgacttttctgacttcatccaagaagaatatgaatttgccaattttgtttcaagttccagatgttttatctaaggccaggaggaaccagtgtgactccatgctgctcagaaaccaacagctgtgctccacatgtcaagaaatgaaaatggtacaaccaagaacaatgaaaatcccagatgatccaaaagcatcctttgagaattgtatgagttatagaatgagtcttcatcaacccaaattccagactacacctgagcctttccatgatgacatcccaacaggatctgtccacaacatatggctgaagactttccatggagatggggtacaaacaaaataaaagttcccctattggc

SEQ ID NO: 41396 - DNA, 435 bp, Homo sapiens
ggcttttttctcagtctatggttgagtggttttcacattcctttgagggtactgagttcttacagtttaatcacaaggtcaccataactcccacttagttctttaaaatgtagcatttcctcaagggttggtaaaaagtctttactaaagatgatatccagcctgggcaacatagtgattattgttaaagagtgagattatgggtgatttagatttccttccttatatttttctgaattttccaacttttccttttatgataaattgatattattattattattattattttgagacagagtctcactctgttgcccaggctggagtgcaatggtgtggtctcggctcaccgcaacttccgcctcccgggttgcagtgagccgagatcgtgccattgcactccagcctgggccacaggagcaaaactccatctca

SEQ ID NO: 41397 - DNA, 7084 bp, Homo sapiens
  misc_feature (160)..(160): n is a, c, g, or t
atggcaggaaacagccttgttctacccattgttctttggggtcgaaaagcgcccacacattgcatctcagccgtacttttaacagatgatggggccacgatcgtaacaggatgtcacgacggacaaatatgtctctgggatctttcagtagaactgcaanttaatcctcgagcactgttgtttggtcatacagcatcaatcacttgtttgtctaaagcttgtgcttccagtgacaaacagtatattgtgagtgcatctgaaagtggagagatgtgcctctgggatgtgagtgatggcagatgtattgaatttacaaaattagcttgcacacatactggcatacagttctaccagttctctgttgggaatcagcgagaaggaaggcttttatgccacggacattaccctgaaatccttgttgtggatgctaccagccttgaagtattatactccttagtatcaaagatatcaccagactggattagctccatgagtattattcgatcccaccgaacacaagaggacacagtggtagcactctcggtgactggcatcctgaaggtctggattgttacctcggaaataagtgacatgcaggatactgagccaatatttgaggaggaatccaaaccaatttattgtcagaattgccaaagcatctctttttgtgcatttacacaaaggtcacttttggttgtgtgttccaaatattggagggtgttcgatgccggagactattccttgttgtgttcaggtcctagtgaaaatggacagacatggaccgggggggactttgtctcatcagataaagtcatcatttggacagaaaatgggcaaagttatatttacaaactacctgccagttgccttccagctagtgattcattccgcagtgatgtggggaaggcagttgaaaatttaattcctcctgtacaacatatcctcttggatcgaaaagataaagagttgctaatttgtcctcctgttactcggttcttctatggatgcagagaatatttccataaactgttaattcagggtgattcttctggaaggttgaatatttggaacatatcagacacagctgataaacagggaagtgaagaagggctggcaatgacaacttctattagtttgcaagaggcatttgataaactgaatccttgtcctgctggaattatagatcagctgagtgtgattcccaatagtaatgaacctcttaaagtaactgcaagtgtgtacataccagcacatggacgacttgtttgtggtcgtgaagatggaagcatagttattgtacctgccacacagacggccatagtacagctgttgcaaggggaacacatgctcagaagaggttggccacctcacagaacactccgtggtcatcggaacaaagtcacatgtttgctatatcctcatcaggtctcagctcggtatgatcaaagatacctgatatctggaggtgtggatttttcagtcataatttgggacatattttctggagaaatgaaacatatcttctgtgttcatggtggtgagattactcaacttctagttccacctgaaaactgtagtgcaagagtacagcactgcatctgctctgtagccagtgaccactcagtaggacttctaagtttgcgagagaaaaaatgcataatgttggcatctcgtcacctttttcctattcaagtaatcaaatggaggccttctgatgattacctggtggtggggtgttcagatggttctgtgtacgtctggcaaatggatactggtgcattggatcgttgtgtgatggggataacagcagttgagattctaaacgcttgtgatgaagctgttcctgctgctgttgattcacttagtcatccagcagtcaacctaaaacaagctatgacgagacgtagtcttgctgctcttaaaaatatggcccatcataagctacaaacccttgcaactaacctcttggcttctgaggcatctgacaagggaaatttacctaaatattctcataactccctgatggttcaagcaataaagacaaacctaacagacccggacatacatgtgctattctttgatgtggaagcgttgattattcaactcctgactgaagaagcctctaggccgaatactgctcttatttccccagagaatttgcaaaaagcatctggcagttcagacaaagggggctcttttttaactggaaaacgagcagcagttctcttccaacaagtgaaagaaacgatcaaagagaacatcaaggaacacctccttgatgatgaagaggaggatgaggagataatgaggcagagaagggaagaaagtgatcctgaatatcggtccagcaaatcaaagccattgaccctattagaatataatttaactatggacactgcaaagctgtttatgtcctgccttcacgcctggggtttgaatgaagtactggatgaagtttgcctggatcgccttggaatgctgaaaccccactgcaccgtatcgtttggcctcttgtcaagaggaggccatatgtcactgatgctgccgggttataatcagcctgcttgtaaactgtcacatgggaaaacagaagtaggaaggaagctgccagcgtctgagggagtaggaaagggaacttacggagtgtcccgtgccgtcaccacacagcatctcctgtctatcatttctttggcaaatactttaatgagtatgaccaatgcaacttttattggtgatcatatgaagaagggtcctaccaggccacctagaccaagcaccccagacctttctaaggcaaggggttcccctccaacttccagtaatattgtgcaaggacagattaaacaagttgctgcacctgtcgtttccgctcggtctgatgctgatcactctggctctgaccctccttctgctcctgctttacatacctgtttcttagtaaatgaaggttggagtcagttagctgctatgcactgtgttatgctgccagacctactgggattggataaatttaggcctccccttctggagatgctggcccgaagatggcaagatcgatgcttggaggtgagagaagccgcacaggccctgcttctggcggaactgagaagaattgagcaggcaggcaggaaggaagccattgatgcctgggctccttacttacctcagtacatagaccacgtcatatcacctggagtcacatcagaagccgcgcagactatcaccacggctcctgatgcctcagggcctgaagcaaaagtccaggaggaagagcatgaccttgttgacgatgacatcaccactggttgcttatcaagtgtcccacaaatgaaaaaaatttctacatcttacgaggaaagacggaagcaagctaccgctattgttttacttggagtaataggagctgaatttggtgctgaaattgaacctcctaaactattgaccagacctcgaagctctagccaaattcctgagggattcgggttgactagtggtggatccaactactcgctggccagacatacttgcaaggcactgacgtttcttctgctacagcctccaagccccaaacttcctccacacagcactatccgaagaacagccattgatctgattggacgtgggttcactgtttgggagccttacatggatgtgtccgctgttctgatggggcttctcgaactttgtgccgatgccgagaaacaacttgccaacatcacaatggggttgcctctgagcccagcagctgactcggcccgctctgcgaggcatgccctctcgctcattgccaccgccagaccacccgccttcatcaccaccatagccaaagaggtacacagacatacggctcttgcagcaaatacccaatcacagcagaatatgcacacaacaactcttgcacgagctaaaggggaaattttgagagtcattgaaattcttattgaaaagatgcccacagatgttgtggatcttctcgtggaggttatggacatcattatgtactgccttgaaggatctttagttaaaaagaaaggtcttcaagaatgtttcccagccatctgcaggttctacatggtcagctattatgagcggaatcacagaatagcagttggagctcgccatggttcagtggccctgtacgacatccggactggaaaatgtcagacaatccatggacacaagggaccaatcactgcagtggcttttgctcctgatggaagatatcttgccacctactcaaacactgacagccacatttctttttggcagatgaacacgtcactgctgggaagcatcggcatgctgaactcggcacctcagctgcgctgcattaaaacctaccaggtgccccctgtgcagcccgcgtcccccggctcccacaatgccctcaagctggcccggctcatctggacttccaaccgcaacgtcatcctcatggcccatgacgggaaggagcaccgcttcatggtctaatgctgctgcctgccgccgtgactgcgttttagttctctaaattatccaagccgatgttgctctgtccttcctcacaccagattgttcccaggggcctgcccaccccagtgccatccagtggcacggccgggtcttgtcacttgtgcatgcttctcaggggcagaacccgctcgtgccatctgtcgattcagaggcacgcacacatgctctgcaggatgtggccatcctgtcaccaggtagtttttccctgccagagatggcaggggaaagccagcggttcctgggaacgctcttgttgcttggtgcaacagaagcacaaaaatcaataaacactgtgattgcactcccagcccagatcagcatttttagccatctcaaccgcacctctgaagtgctgcttgaatctggccgttctgacactgggtgttgaggtcatgtggcagtcctcacgattgaaattattgccctttgaattacctaaaatattgtttaccaaaaagattctgtgtttacatgttcttttcttctggtgattgctaggaaattactcaatccaatttcctagggtttagctaccaccttctttatcaacagctaaccaatttgagattcatgattaattatgtacacaaaaatattttccttgtagaaaatagttttccagacacttagccttctgaagtgctcatctcttgcttaaatgatagtctatttagtagtttaaaataaaaataatcactccctatgatctagttaatgtaattatccagtcactgtaactaatctcttgaagggacttttgtgataaagagccaagttcagaagcatagcgtgtaccgaaaatgaagactctcctatctactgctacagatcctgttgaagaaagagcttacccctttcccccggaaaacttgcaatcctgtagttcccatatgtgtggcatatgtcagttatgaaattattataattcagccttcaaactactactgatcaactaaaggaaagctaataaggtatttcttttaaacaagtattctggaaaagtaataactatggcacaaatgttcaggagtgtatataaaaatatgtgggctctcgatttatttgagcaaacattgcaatgagggtgttcattatgcttctaagtaagctttaactagaccactttcttcttatgtcagattgtgctggttctagctcataataatgaaaaaaatagaattatattttgtatgaattgtttctaacaaaccttgatctgtatatacttgtgaggggttgtttggttgcctaattgttgattgggttggttagttgggcaaaatcatttattacatgcaaaaatagaaaattatttgttaaattcagagaaaatatgtgaagtttacaaaggaaccaaaatgataatgggagaatttagtcttaaaagtttaggttgtcagagtttatctgatatacaaaaaagtaggatcaaagtctaggaacaaacattggttatttcactgaaacagatttttaaagagcatattaagaaattaagaccattagatcatctctttcataatgatatgatgttatttccattgacggcaaatctatactgttccttggttttagagttgggtattctttcaaaagtgaatttaggcacatgcatgtacattgtatttataaagattatatatgtagtttccaaggaagaaacaaagacctatacagtttagactttatttgtttggtgaacgtgctgttgtgtttggcatagctagagaaatgtaaggtaaaaggctcactttgttttccagtgggtccagagtcttctctatacccaacatatgtttactttatgaacttaaatggaaattaatttattgtagactacatctctatttggaatgatgaggtaaatgtataccttagcattttctttaacaaaaatgttctgtgtgtcaggaaagaggtgtgagagcggtaggcagcctgccgcaaacacacggatggctccccccgccacgaaggttgagaacaaagccagggggcccagaggagcaatagccctgggccacaagcgtgggtaggcctttcacgtattccgtctgcacaggcaaccaaggccagtagaaagctatggctgcaaaaccctggggtggacgatgtttgatgattagacggtcatctctaactactaaactaatatctgcattcttgttaacataaatctctccttggctattttaatagccacagtcccaaacttcatcccagcttagatttctcagcactgaggtaaactctgcattgtcatcccagcgtacacctttaatgttttattgatttcactggcactgtatttggacctgtccttgtatatgtagagacatatgtggcttcattggtaatttacaagcaaaagatgacatgacgtgacacctgtatgaaaatgtgatgattgaactccctgtgtacagcgagtgaattaaaatgtctgcctctccagacatttcttaatgattccacttaatagactctatgtgtgctgaatgttcctgtgtacatatgtgtgttaaataaaacaattgtattgaagactgtttttctcacaataaaacct

SEQ ID NO: 41398 - DNA, 5388 bp, Homo sapiens
aacaagatttagccagatgaacctcttgcttccctcttacgaagttattaaaggtgggtcactgacctaggtggtttctgtggagctgttgatgtgcttctgggatcaaccgtctcgttcttcacatttcatattcccagtaagtatgcagtgccattctcacaggcctttgacaaggtgcattggatcgttgtgtgatggggataacagcagttgagattctaaacgcttgtgatgaagctgttcctgctgctgttgattcacttagtcatccagcagtcaacctaaaacaagctatgacgagacgtagtcttgctgctcttaaaaatatggcccatcataagctacaaacccttgcaactaacctcttggcttctgaggcatctgacaagggaaatttacctaaatattctcataactccctgatggttcaagcaataaagacaaacctaacagacccggacatacatgtgctattctttgatgtggaagcgttgattattcaactcctgactgaagaagcctctaggccgaatactgctcttatttccccagagaatttgcaaaaagcatctggcagttcagacaaagggggctcttttttaactggaaaacgagcagcagttctcttccaacaagtgaaagaaacgatcaaagagaacatcaaggaacacctccttgatgatgaagaggaggatgaggagataatgaggcagagaagggaagaaagtgatcctgaatatcggtccagcaaatcaaagccattgaccctattagaatataatttaactatggacactgcaaagctgtttatgtcctgccttcacgcctggggtttgaatgaagtactggatgaagtttgcctggatcgccttggaatgctgaaaccccactgcaccgtatcgtttggcctcttgtcaagaggaggccatatgtcactgatgctgccgggttataatcagcctgcttgtaaactgtcacatgggaaaacagaagtaggaaggaagctgccagcgtctgagggagtaggaaagggaacttacggagtgtcccgtgccgtcaccacacagcatctcctgtctatcatttctttggcaaatactttaatgagtatgaccaatgcaacttttattggtgatcatatgaagaagggtcctaccaggccacctagaccaagcaccccagacctttctaaggcaaggggttcccctccaacttccagtaatattgtgcaaggacagattaaacaaggttggagtcagttagctgctatgcactgtgttatgctgccagacctactgggattggataaatttaggcctccccttctggagatgctggcccgaagatggcaagatcgatgcttggaggtgagagaagccgcacaggccctgcttctggcggaactgagaagaattgagcaggcaggcaggaaggaagccattgatgcctgggctccttacttacctcagtacatagaccacgtcatatcacctggagtcacatcagaagccgcgcagactatcaccacggctcctgatgcctcagggcctgaagcaaaagtccaggaggaagagcatgaccttgttgacgatgacatcaccactggttgcttatcaagtgtcccacaaatgaaaaaaatttctacatcttacgaggaaagacggaagcaagctaccgctattgttttacttggagtaataggagctgaatttggtgctgaaattgaacctcctaaactattgaccagacctcgaagctctagccaaattcctgagggattcgggttgactagtggtggatccaactactcgctggccagacatacttgcaaggcactgacgtttcttctgctacagcctccaagccccaaacttcctccacacagcactatccgaagaacagccattgatctgattggacgtgggttcactgtttgggagccttacatggatgtgtccgctgttctgatggggcttctcgaactttgtgccgatgccgagaaacaacttgccaacatcacaatggggttgcctctgagcccagcagctgactcggcccgctctgcgaggcatgccctctcgctcattgccaccgccagaccacccgccttcatcaccaccatagccaaagaggtacacagacatacggctcttgcagcaaatacccaatcacagcagaatatgcacacaacaactcttgcacgagctaaaggggaaattttgagagtcattgaaattcttattgaaaagatgcccacagatgttgtggatcttctcgtggaggttatggacatcattatgtactgccttgaaggatctttagttaaaaagaaaggtcttcaagaatgtttcccagccatctgcaggttctacatggtcagctattatgagcggaatcacagaatagcagttggagctcgccatggttcagtggccctgtacgacatccggactggaaaatgtcagacaatccatggacacaagggaccaatcactgcagtggcttttgctcctgatggaagatatcttgccacctactcaaacactgacagccacatttctttttggcagatgaacacgtcactgctgggaagcatcggcatgctgaactcggcacctcagctgcgctgcattaaaacctaccaggtgccccctgtgcagcccgcgtcccccggctcccacaatgccctcaagctggcccggctcatctggacttccaaccgcaacgtcatcctcatggcccatgacgggaaggagcaccgcttcatggtctaatgctgctgcctgccgccgtgactgcgttttagttctctaaattatccaagccgatgttgctctgtccttcctcacaccagattgttcccaggggcctgcccaccccagtgccatccagtggcacggccgggtcttgtcacttgtgcatgcttctcaggggcagaacccgctcgtgccatctgtcgattcagaggcacgcacacatgctctgcaggatgtggccatcctgtcaccaggtagtttttccctgccagagatggcaggggaaagccagcggttcctgggaacgctcttgttgcttggtgcaacagaagcacaaaaatcaataaacactgtgattgcactcccagcccagatcagcatttttagccatctcaaccgcacctctgaagtgctgcttgaatctggccgttctgacactgggtgttgaggtcatgtggcagtcctcacgattgaaattattgccctttgaattacctaaaatattgtttaccaaaaagattctgtgtttacatgttcttttcttctggtgattgctaggaaattactcaatccaatttcctagggtttagctaccaccttctttatcaacagctaaccaatttgagattcatgattaattatgtacacaaaaatattttccttgtagaaaatagttttccagacacttagccttctgaagtgctcatctcttgcttaaatgatagtctatttagtagtttaaaataaaaataatcactccctatgatctagttaatgtaattatccagtcactgtaactaatctcttgaagggacttttgtgataaagagccaagttcagaagcatagcgtgtaccgaaaatgaagactctcctatctactgctacagatcctgttgaagaaagagcttacccctttcccccggaaaacttgcaatcctgtagttcccatatgtgtggcatatgtcagttatgaaattattataattcagccttcaaactactactgatcaactaaaggaaagctaataaggtatttcttttaaacaagtattctggaaaagtaataactatggcacaaatgttcaggagtgtatataaaaatatgtgggctctcgatttatttgagcaaacattgcaatgagggtgttcattatgcttctaagtaagctttaactagaccactttcttcttatgtcagattgtgctggttctagctcataataatgaaaaaaatagaattatattttgtatgaattgtttctaacaaaccttgatctgtatatacttgtgaggggttgtttggttgcctaattgttgattgggttggttagttgggcaaaatcatttattacatgcaaaaatagaaaattatttgttaaattcagagaaaatatgtgaagtttacaaaggaaccaaaatgataatgggagaatttagtcttaaaagtttaggttgtcagagtttatctgatatacaaaaaagtaggatcaaagtctaggaacaaacattggttatttcactgaaacagatttttaaagagcatattaagaaattaagaccattagatcatctctttcataatgatatgatgttatttccattgacggcaaatctatactgttccttggttttagagttgggtattctttcaaaagtgaatttaggcacatgcatgtacattgtatttataaagattatatatgtagtttccaaggaagaaacaaagacctatacagtttagactttatttgtttggtgaacgtgctgttgtgtttggcatagctagagaaatgtaaggtaaaaggctcactttgttttccagtgggtccagagtcttctctatacccaacatatgtttactttatgaacttaaatggaaattaatttattgtagactacatctctatttggaatgatgaggtaaatgtataccttagcattttctttaacaaaaatgttctgtgtgtcaggaaagaggtgtgagagcggtaggcagcctgccgcaaacacacggatggctccccccgccacgaaggttgagaacaaagccagggggcccagaggagcaatagccctgggccacaagcgtgggtaggcctttcacgtattccgtctgcacaggcaaccaaggccagtagaaagctatggctgcaaaaccctggggtggacgatgtttgatgattagacggtcatctctaactactaaactaatatctgcattcttgttaacataaatctctccttggctattttaatagccacagtcccaaacttcatcccagcttagatttctcagcactgaggtaaactctgcattgtcatcccagcgtacacctttaatgttttattgatttcactggcactgtatttggacctgtccttgtatatgtagagacatatgtggcttcattggtaatttacaagcaaaagatgacatgacgtgacacctgtatgaaaatgtgatgattgaactccctgtgtacagcgagtgaattaaaatgtctgcctctccagacatttcttaatgattccacttaatagactctatgtgtgctgaatgttcctgtgtacatatgtgtgttaaataaaacaattgtattgaagactgtttttctcacaataaaacct

SEQ ID NO: 41399 - DNA, 3256 bp, Homo sapiens
  misc_feature (160)..(160): n is a, c, g, or t
atggcaggaaacagccttgttctacccattgttctttggggtcgaaaagcgcccacacattgcatctcagccgtacttttaacagatgatggggccacgatcgtaacaggatgtcacgacggacaaatatgtctctgggatctttcagtagaactgcaanttaatcctcgagcactgttgtttggtcatacagcatcaatcacttgtttgtctaaagcttgtgcttccagtgacaaacagtatattgtgagtgcatctgaaagtggagagatgtgcctctgggatgtgagtgatggcagatgtattgaatttacaaaattagcttgcacacatactggcatacagttctaccagttctctgttgggaatcagcgagaaggaaggcttttatgccacggacattaccctgaaatccttgttgtggatgctaccagccttgaagtattatactccttagtatcaaagatatcaccagactggattagctccatgagtattattcgatcccaccgaacacaagaggacacagtggtagcactctcggtgactggcatcctgaaggtctggattgttacctcggaaataagtgacatgcaggatactgagccaatatttgaggaggaatccaaaccaatttattgtcagaattgccaaagcatctctttttgtgcatttacacaaaggtcacttttggttgtgtgttccaaatattggagggtgttcgatgccggagactattccttgttgtgttcaggtcctagtgaaaatggacagacatggaccgggggggactttgtctcatcagataaagtcatcatttggacagaaaatgggcaaagttatatttacaaactacctgccagttgccttccagctagtgattcattccgcagtgatgtggggaaggcagttgaaaatttaattcctcctgtacaacatatcctcttggatcgaaaagataaagagttgctaatttgtcctcctgttactcggttcttctatggatgcagagaatatttccataaactgttaattcagggtgattcttctggaaggttgaatatttggaacatatcagacacagctgataaacagggaagtgaagaagggctggcaatgacaacttctattagtttgcaagaggcatttgataaactgaatccttgtcctgctggaattatagatcagctgagtgtgattcccaatagtaatgaacctcttaaagtaactgcaagtgtgtacataccagcacatggacgacttgtttgtggtcgtgaagatggaagcatagttattgtacctgccacacagacggccatagtacagctgttgcaaggggaacacatgctcagaagaggttggccacctcacagaacactccgtggtcatcggaacaaagtcacatgtttgctatatcctcatcaggtctcagctcggtatgatcaaagatacctgatatctggaggtgtggatttttcagtcataatttgggacatattttctggagaaatgaaacatatcttctgtgttcatggtggtgagattactcaacttctagttccacctgaaaactgtagtgcaagagtacagcactgcatctgctctgtagccagtgaccactcagtaggacttctaagtttgcgagagaaaaaatgcataatgttggcatctcgtcacctttttcctattcaagtaatcaaatggaggccttctgatgattacctggtggtggggtgttcagatggttctgtgtacgtctggcaaatggatactggtgcattggatcgttgtgtgatggggataacagcagttgagattctaaacgcttgtgatgaagctgttcctgctgctgttgattcacttagtcatccagcagtcaacctaaaacaagctatgacgagacgtagtcttgctgctcttaaaaatatggcccatcataagctacaaacccttgcaactaacctcttggcttctgaggcatctgacaagggaaatttacctaaatattctcataactccctgatggttcaagcaataaagacaaacctaacagacccggacatacatgtgctattctttgatgtggaagcgttgattattcaactcctgactgaagaagcctctaggccgaatactgctcttatttccccagagaatttgcaaaaagcatctggcagttcagacaaagggggctcttttttaactggaaaacgagcagcagttctcttccaacaagtgaaagaaacgatcaaagagaacatcaaggaacacctccttgatgatgaagaggaggatgaggagataatgaggcagagaagggaagaaagtgatcctgaatatcggtccagcaaatcaaagccattgaccctattagaatataatttaactatggacactgcaaagctgtttatgtcctgccttcacgcctggggtttgaatgaagtactggatgaagtttgcctggatcgccttggaatgctgaaaccccactgcaccgtatcgtttggcctcttgtcaagaggaggccatatgtcactgatgctgccgggttataatcagcctgcttgtaaactgtcacatgggaaaacagaagtaggaaggaagctgccagcgtctgagggagtaggaaagggaacttacggagtgtcccgtgccgtcaccacacagcatctcctgtctatcatttctttggcaaatactttaatgagtatgaccaatgcaacttttattggtgatcatatgaagaagggtcctaccaggccacctagaccaagcaccccagacctttctaaggcaaggggttcccctccaacttccagtaatattgtgcaaggacagattaaacaaggttggagtcagttagctgctatgcactgtgttatgctgccagacctactgggattggataaatttaggcctccccttctggagatgctggcccgaagatggcaagatcgatgcttggaggtgagagaagccgcacaggccctgcttctggcggaactgagaagaattgagcaggcaggcaggaaggaagccattgatgcctgggctccttacttacctcagtacatagaccacgtcatatcacctggagtcacatcagaagccgcgcagactatcaccacggctcctgatgcctcagggcctgaagcaaaagtccaggaggaagagcatgaccttgttgacgatgacatcaccactgaggcacagttgaatgctgttgatgctttgattgactccatgagcttggcaa

SEQ ID NO: 41400 - DNA, 191 bp, Homo sapiens
cctcttaaagtaactgcaagtgtgtacataccagcacatggacgacttgtttgtggtcgtgaagatggaagcatagttattgtacctgccacacagacggccatagtacagctgttgcaaggggaacacatgctcagaagaggtatactgaagagctccgtatgtctaaagtgttttgacaactcttaccc

SEQ ID NO: 41401 - DNA, 6985 bp, Homo sapiens
  misc_feature (160)..(160): n is a, c, g, or t
atggcaggaaacagccttgttctacccattgttctttggggtcgaaaagcgcccacacattgcatctcagccgtacttttaacagatgatggggccacgatcgtaacaggatgtcacgacggacaaatatgtctctgggatctttcagtagaactgcaanttaatcctcgagcactgttgtttggtcatacagcatcaatcacttgtttgtctaaagcttgtgcttccagtgacaaacagtatattgtgagtgcatctgaaagtggagagatgtgcctctgggatgtgagtgatggcagatgtattgaatttacaaaattagcttgcacacatactggcatacagttctaccagttctctgttgggaatcagcgagaaggaaggcttttatgccacggacattaccctgaaatccttgttgtggatgctaccagccttgaagtattatactccttagtatcaaagatatcaccagactggattagctccatgagtattattcgatcccaccgaacacaagaggacacagtggtagcactctcggtgactggcatcctgaaggtctggattgttacctcggaaataagtgacatgcaggatactgagccaatatttgaggaggaatccaaaccaatttattgtcagaattgccaaagcatctctttttgtgcatttacacaaaggtcacttttggttgtgtgttccaaatattggagggtgttcgatgccggagactattccttgttgtgttcaggtcctagtgaaaatggacagacatggaccgggggggactttgtctcatcagataaagtcatcatttggacagaaaatgggcaaagttatatttacaaactacctgccagttgccttccagctagtgattcattccgcagtgatgtggggaaggcagttgaaaatttaattcctcctgtacaacatatcctcttggatcgaaaagataaagagttgctaatttgtcctcctgttactcggttcttctatggatgcagagaatatttccataaactgttaattcagggtgattcttctggaaggttgaatatttggaacatatcagacacagctgataaacagggaagtgaagaagggctggcaatgacaacttctattagtttgcaagaggcatttgataaactgaatccttgtcctgctggaattatagatcagctgagtgtgattcccaatagtaatgaacctcttaaagtaactgcaagtgtgtacataccagcacatggacgacttgtttgtggtcgtgaagatggaagcatagttattgtacctgccacacagacggccatagtacagctgttgcaaggggaacacatgctcagaagaggttggccacctcacagaacactccgtggtcatcggaacaaagtcacatgtttgctatatcctcatcaggtctcagctcggtatgatcaaagatacctgatatctggaggtgtggatttttcagtcataatttgggacatattttctggagaaatgaaacatatcttctgtgttcatggtggtgagattactcaacttctagttccacctgaaaactgtagtgcaagagtacagcactgcatctgctctgtagccagtgaccactcagtaggacttctaagtttgcgagagaaaaaatgcataatgttggcatctcgtcacctttttcctattcaagtaatcaaatggaggccttctgatgattacctggtggtggggtgttcagatggttctgtgtacgtctggcaaatggatactggtgcattggatcgttgtgtgatggggataacagcagttgagattctaaacgcttgtgatgaagctgttcctgctgctgttgattcacttagtcatccagcagtcaacctaaaacaagctatgacgagacgtagtcttgctgctcttaaaaatatggcccatcataagctacaaacccttgcaactaacctcttggcttctgaggcatctgacaagggaaatttacctaaatattctcataactccctgatggttcaagcaataaagacaaacctaacagacccggacatacatgtgctattctttgatgtggaagcgttgattattcaactcctgactgaagaagcctctaggccgaatactgctcttatttccccagagaatttgcaaaaagcatctggcagttcagacaaagggggctcttttttaactggaaaacgagcagcagttctcttccaacaagtgaaagaaacgatcaaagagaacatcaaggaacacctccttgatgatgaagaggaggatgaggagataatgaggcagagaagggaagaaagtgatcctgaatatcggtccagcaaatcaaagccattgaccctattagaatataatttaactatggacactgcaaagctgtttatgtcctgccttcacgcctggggtttgaatgaagtactggatgaagtttgcctggatcgccttggaatgctgaaaccccactgcaccgtatcgtttggcctcttgtcaagaggaggccatatgtcactgatgctgccgggttataatcagcctgcttgtaaactgtcacatgggaaaacagaagtaggaaggaagctgccagcgtctgagggagtaggaaagggaacttacggagtgtcccgtgccgtcaccacacagcatctcctgtctatcatttctttggcaaatactttaatgagtatgaccaatgcaacttttattggtgatcatatgaagaagggtcctaccaggccacctagaccaagcaccccagacctttctaaggcaaggggttcccctccaacttccagtaatattgtgcaaggacagattaaacaaggttggagtcagttagctgctatgcactgtgttatgctgccagacctactgggattggataaatttaggcctccccttctggagatgctggcccgaagatggcaagatcgatgcttggaggtgagagaagccgcacaggccctgcttctggcggaactgagaagaattgagcaggcaggcaggaaggaagccattgatgcctgggctccttacttacctcagtacatagaccacgtcatatcacctggagtcacatcagaagccgcgcagactatcaccacggctcctgatgcctcagggcctgaagcaaaagtccaggaggaagagcatgaccttgttgacgatgacatcaccactggttgcttatcaagtgtcccacaaatgaaaaaaatttctacatcttacgaggaaagacggaagcaagctaccgctattgttttacttggagtaataggagctgaatttggtgctgaaattgaacctcctaaactattgaccagacctcgaagctctagccaaattcctgagggattcgggttgactagtggtggatccaactactcgctggccagacatacttgcaaggcactgacgtttcttctgctacagcctccaagccccaaacttcctccacacagcactatccgaagaacagccattgatctgattggacgtgggttcactgtttgggagccttacatggatgtgtccgctgttctgatggggcttctcgaactttgtgccgatgccgagaaacaacttgccaacatcacaatggggttgcctctgagcccagcagctgactcggcccgctctgcgaggcatgccctctcgctcattgccaccgccagaccacccgccttcatcaccaccatagccaaagaggtacacagacatacggctcttgcagcaaatacccaatcacagcagaatatgcacacaacaactcttgcacgagctaaaggggaaattttgagagtcattgaaattcttattgaaaagatgcccacagatgttgtggatcttctcgtggaggttatggacatcattatgtactgccttgaaggatctttagttaaaaagaaaggtcttcaagaatgtttcccagccatctgcaggttctacatggtcagctattatgagcggaatcacagaatagcagttggagctcgccatggttcagtggccctgtacgacatccggactggaaaatgtcagacaatccatggacacaagggaccaatcactgcagtggcttttgctcctgatggaagatatcttgccacctactcaaacactgacagccacatttctttttggcagatgaacacgtcactgctgggaagcatcggcatgctgaactcggcacctcagctgcgctgcattaaaacctaccaggtgccccctgtgcagcccgcgtcccccggctcccacaatgccctcaagctggcccggctcatctggacttccaaccgcaacgtcatcctcatggcccatgacgggaaggagcaccgcttcatggtctaatgctgctgcctgccgccgtgactgcgttttagttctctaaattatccaagccgatgttgctctgtccttcctcacaccagattgttcccaggggcctgcccaccccagtgccatccagtggcacggccgggtcttgtcacttgtgcatgcttctcaggggcagaacccgctcgtgccatctgtcgattcagaggcacgcacacatgctctgcaggatgtggccatcctgtcaccaggtagtttttccctgccagagatggcaggggaaagccagcggttcctgggaacgctcttgttgcttggtgcaacagaagcacaaaaatcaataaacactgtgattgcactcccagcccagatcagcatttttagccatctcaaccgcacctctgaagtgctgcttgaatctggccgttctgacactgggtgttgaggtcatgtggcagtcctcacgattgaaattattgccctttgaattacctaaaatattgtttaccaaaaagattctgtgtttacatgttcttttcttctggtgattgctaggaaattactcaatccaatttcctagggtttagctaccaccttctttatcaacagctaaccaatttgagattcatgattaattatgtacacaaaaatattttccttgtagaaaatagttttccagacacttagccttctgaagtgctcatctcttgcttaaatgatagtctatttagtagtttaaaataaaaataatcactccctatgatctagttaatgtaattatccagtcactgtaactaatctcttgaagggacttttgtgataaagagccaagttcagaagcatagcgtgtaccgaaaatgaagactctcctatctactgctacagatcctgttgaagaaagagcttacccctttcccccggaaaacttgcaatcctgtagttcccatatgtgtggcatatgtcagttatgaaattattataattcagccttcaaactactactgatcaactaaaggaaagctaataaggtatttcttttaaacaagtattctggaaaagtaataactatggcacaaatgttcaggagtgtatataaaaatatgtgggctctcgatttatttgagcaaacattgcaatgagggtgttcattatgcttctaagtaagctttaactagaccactttcttcttatgtcagattgtgctggttctagctcataataatgaaaaaaatagaattatattttgtatgaattgtttctaacaaaccttgatctgtatatacttgtgaggggttgtttggttgcctaattgttgattgggttggttagttgggcaaaatcatttattacatgcaaaaatagaaaattatttgttaaattcagagaaaatatgtgaagtttacaaaggaaccaaaatgataatgggagaatttagtcttaaaagtttaggttgtcagagtttatctgatatacaaaaaagtaggatcaaagtctaggaacaaacattggttatttcactgaaacagatttttaaagagcatattaagaaattaagaccattagatcatctctttcataatgatatgatgttatttccattgacggcaaatctatactgttccttggttttagagttgggtattctttcaaaagtgaatttaggcacatgcatgtacattgtatttataaagattatatatgtagtttccaaggaagaaacaaagacctatacagtttagactttatttgtttggtgaacgtgctgttgtgtttggcatagctagagaaatgtaaggtaaaaggctcactttgttttccagtgggtccagagtcttctctatacccaacatatgtttactttatgaacttaaatggaaattaatttattgtagactacatctctatttggaatgatgaggtaaatgtataccttagcattttctttaacaaaaatgttctgtgtgtcaggaaagaggtgtgagagcggtaggcagcctgccgcaaacacacggatggctccccccgccacgaaggttgagaacaaagccagggggcccagaggagcaatagccctgggccacaagcgtgggtaggcctttcacgtattccgtctgcacaggcaaccaaggccagtagaaagctatggctgcaaaaccctggggtggacgatgtttgatgattagacggtcatctctaactactaaactaatatctgcattcttgttaacataaatctctccttggctattttaatagccacagtcccaaacttcatcccagcttagatttctcagcactgaggtaaactctgcattgtcatcccagcgtacacctttaatgttttattgatttcactggcactgtatttggacctgtccttgtatatgtagagacatatgtggcttcattggtaatttacaagcaaaagatgacatgacgtgacacctgtatgaaaatgtgatgattgaactccctgtgtacagcgagtgaattaaaatgtctgcctctccagacatttcttaatgattccacttaatagactctatgtgtgctgaatgttcctgtgtacatatgtgtgttaaataaaacaattgtattgaagactgtttttctcacaataaaacct

SEQ ID NO: 41402 - DNA, 3604 bp, Homo sapiens
  misc_feature (160)..(160): n is a, c, g, or t
atggcaggaaacagccttgttctacccattgttctttggggtcgaaaagcgcccacacattgcatctcagccgtacttttaacagatgatggggccacgatcgtaacaggatgtcacgacggacaaatatgtctctgggatctttcagtagaactgcaanttaatcctcgagcactgttgtttggtcatacagcatcaatcacttgtttgtctaaagcttgtgcttccagtgacaaacagtatattgtgagtgcatctgaaagtggagagatgtgcctctgggatgtgagtgatggcagatgtattgaatttacaaaattagcttgcacacatactggcatacagttctaccagttctctgttgggaatcagcgagaaggaaggcttttatgccacggacattaccctgaaatccttgttgtggatgctaccagccttgaagtattatactccttagtatcaaagatatcaccagactggattagctccatgagtattattcgatcccaccgaacacaagaggacacagtggtagcactctcggtgactggcatcctgaaggtctggattgttacctcggaaataagtgacatgcaggatactgagccaatatttgaggaggaatccaaaccaatttattgtcagaattgccaaagcatctctttttgtgcatttacacaaaggtcacttttggttgtgtgttccaaatattggagggtgttcgatgccggagactattccttgttgtgttcaggtcctagtgaaaatggacagacatggaccgggggggactttgtctcatcagataaagtcatcatttggacagaaaatgggcaaagttatatttacaaactacctgccagttgccttccagctagtgattcattccgcagtgatgtggggaaggcagttgaaaatttaattcctcctgtacaacatatcctcttggatcgaaaagataaagagttgctaatttgtcctcctgttactcggttcttctatggatgcagagaatatttccataaactgttaattcagggtgattcttctggaaggttgaatatttggaacatatcagacacagctgataaacagggaagtgaagaagggctggcaatgacaacttctattagtttgcaagaggcatttgataaactgaatccttgtcctgctggaattatagatcagctgagtgtgattcccaatagtaatgaacctcttaaagtaactgcaagtgtgtacataccagcacatggacgacttgtttgtggtcgtgaagatggaagcatagttattgtacctgccacacagacggccatagtacagctgttgcaaggggaacacatgctcagaagaggttggccacctcacagaacactccgtggtcatcggaacaaagtcacatgtttgctatatcctcatcaggtctcagctcggtatgatcaaagatacctgatatctggaggtgtggatttttcagtcataatttgggacatattttctggagaaatgaaacatatcttctgtgttcatggtggtgagattactcaacttctagttccacctgaaaactgtagtgcaagagtacagcactgcatctgctctgtagccagtgaccactcagtaggacttctaagtttgcgagagaaaaaatgcataatgttggcatctcgtcacctttttcctattcaagtaatcaaatggaggccttctgatgattacctggtggtggggtgttcagatggttctgtgtacgtctggcaaatggatactggtgcattggatcgttgtgtgatggggataacagcagttgagattctaaacgcttgtgatgaagctgttcctgctgctgttgattcacttagtcatccagcagtcaacctaaaacaagctatgacgagacgtagtcttgctgctcttaaaaatatggcccatcataagctacaaacccttgcaactaacctcttggcttctgaggcatctgacaagggaaatttacctaaatattctcataactccctgatggttcaagcaataaagacaaacctaacagacccggacatacatgtgctattctttgatgtggaagcgttgattattcaactcctgactgaagaagcctctaggccgaatactgctcttatttccccagagaatttgcaaaaagcatctggcagttcagacaaagggggctcttttttaactggaaaacgagcagcagttctcttccaacaagtgaaagaaacgatcaaagagaacatcaaggaacacctccttgatgatgaagaggaggatgaggagataatgaggcagagaagggaagaaagtgatcctgaatatcggtccagcaaatcaaagccattgaccctattagaatataatttaactatggacactgcaaagctgtttatgtcctgccttcacgcctggggtttgaatgaagtactggatgaagtttgcctggatcgccttggaatgctgaaaccccactgcaccgtatcgtttggcctcttgtcaagaggaggccatatgtcactgatgctgccgggttataatcagcctgcttgtaaactgtcacatgggaaaacagaagtaggaaggaagctgccagcgtctgagggagtaggaaagggaacttacggagtgtcccgtgccgtcaccacacagcatctcctgtctatcatttctttggcaaatactttaatgagtatgaccaatgcaacttttattggtgatcatatgaagaagggtcctaccaggccacctagaccaagcaccccagacctttctaaggcaaggggttcccctccaacttccagtaatattgtgcaaggacagattaaacaaggttggagtcagttagctgctatgcactgtgttatgctgccagacctactgggattggataaatttaggcctccccttctggagatgctggcccgaagatggcaagatcgatgcttggaggtgagagaagccgcacaggccctgcttctggcggaactgagaagaattgagcaggcaggcaggaaggaagccattgatgcctgggctccttacttacctcagtacatagaccacgtcatatcacgtaagagttctcatgcttctctacaaagctttgcaggaatatgtagaaaaggtacctgtactcacaaatatatatgctactacccatcaacaaaaatgagtcactgaccttaaagtgaaaagaacagatcctcaaattcactttattattttctgaatctctgtagtttggaacttgctttaaaaaacaaaaggcaaaggctgtctatatcaaaatattcattaatgaactgacttttataaatgaattccccatcaaacatcctactctagtactaacatgtgcctccgcccattgcattattatgcttatggatgccagcttgttcgatatggatctgatgatatgcaagtgcagatacaaggcaaactctcttgctagttaaagttgggattgtgaatccttagaaaaacaaagatctgatagagttagactcaggcaatatttacaaagagaaaattgggaaggattttgatggataaatctttcaaaagagtataatttgaaaggatt

SEQ ID NO: 41403 - DNA, 1160 bp, Homo sapiens
cctccccttcctcttgctgcggttcttgacactactacaaaccaggactataaacataaacatgtgtcactgtaacagggcaggttcccagtagctgcagcagtgaaagacagtgattggctccagtgctcccagaaggatttgggctgaagccaggggaacagaaccagaagaggattccctttccagagaccatcaggctcctcatgtcttgtctctcctctctcccctcgtggtggctcaggatttcagtatggctgagcagcccatagagtcagctgacatggtcaacaaatttatcaaagaaaccccctggcttttgaagaatagtactttatacatctggatctgcacatcaggcaaagctcagaaatatccgtttattcttttaatcacgcggatgtgtctatttttggaggaacaaggaaacacataaatgcctgggttgcatttatgttgtagttgcaaacactgaacagttaagaagattttgccgaattttgcaaagcagccaaggagccgccttgggatcgtggtaatgcgactgggaggacccttgctctcatttggcaatattttggatatccttgaaaacgacaccaaaatttgccttaatttgactaagaagaggttaaaccacattgattttcatccaaagtgattttgttaaagcagatgcttgactttgatggaaaaactgggagttgtggaagatttacctaaactaccaaccaaaagcatcacaaaccactgaaacagtctgcatcgtacatcagcactttcttttcattgttattacgtaaaacctctggaagcaccttgggcgtttgacagtttcttttctttgctgcagaaggaagcaatctgctccctggaattctgacctgtggtgaacaggaccctggcaaaggctttgctggggactcttggacgatcccgcctccaatccagtacggttaattgtggaaaagtgtacacatttctggcttatctatgctttgttatgggtctgacgtgaaactacctcctccccaccccaccccccagcagagaaccgaaatccagttgaattgttacagtgtttcggagctggagccttgaactgcttccttggtcaaataactttgtttctggttgtaaaaaggcatttcaggaaaaaa

SEQ ID NO: 41404 - DNA, 1101 bp, Homo sapiens
tttttatctcccgcttttttgtaggttcccagtagctgcagcagtgaaagacagtgattggctccagtgctcccagaaggatttgggctgaagccaggggaacagaaccagaagaggattccctttccagagaccatcaggctcctcatgtcttgtctctcctctctcccctcgtggtggctcaggatttcagtatggctgagcagcccatagagtcagctgacatggtcaacaaatttatcaaagaaaccccctggcttttgaagaatagtactttatacatctggatctgcacatcaggcaaagctcagaaatatccgtttattcttttaatcacgcggatgtgtctatttttggaggaacaaggaaacacataaatgcctgggttgcatttatgttgtagttgcaaacactgaacagttaagaagattttgccgaattttgcaaagcagccaaggagccgccttgggatcgtggtaatgcgactgggaggacccttgctctcatttggcaatattttggatatccttgaaaacgacaccaaaatttgccttaatttgactaagaagaggttaaaccacattgattttcatccaaagtgattttgttaaagcagatgcttgactttgatggaaaaactgggagttgtggaagatttacctaaactaccaaccaaaagcatcacaaaccactgaaacagtctgcatcgtacatcagcactttcttttcattgttattacgtaaaacctctggaagcaccttgggcgtttgacagtttcttttctttgctgcagaaggaagcaatctgctccctggaattctgacctgtggtgaacaggaccctggcaaaggctttgctggggactcttggacgatcccgcctccaatccagtacggttaattgtggaaaagtgtacacatttctggcttatctatgctttgttatgggtctgacgtgaaactacctcctccccaccccaccccccagcagagaaccgaaatccagttgaattgttacagtgtttcggagctggagccttgaactgcttccttggtcaaataactttgtttctggttgtaaaaaggcatttcaggaaaaaa

SEQ ID NO: 41405 - DNA, 498 bp, Homo sapiens
gagccatacctgctcgtgccatccagaccagagcaggggaagctgggacttttgaatgtgaaaaaagaaattactgtataatttttttcttgcaggctcagaaatatccgtttattcttttaatcacgcggatgtgtctatttttggaggaacaaggaaacacataaatgcctgggttgcatttatgttgtagttgcaaacactgaacagttaagaagattttgccgaattttgcaaagcagccaaggagccgccttgggatcgtggtaatgcgactgggaggacccttgctctcatttggcaatattttggatatccttgaaaacgacaccaaaatttgccttaatttgactaagaagaggttaaaccacattgattttcatccaaagtgattttgttaaagcagatgcttgactttgatggaaaaactgggagttgtggaagatttacctaaactaccaaccaaaagcatcacaaaccactgaaacagtctgcatc

SEQ ID NO: 41406 - DNA, 419 bp, Homo sapiens
aatagatgtagactctaatgttttaactattggattctgcttaacaatatttcttaagcatggtgaagcacctaaaaaaatcaggctggttttggttgaatactatcctctttgtgaaataccaccctgaaatatttatatttttattttcataatagtcactcaaaataattttaccagtggaatgtgttcctattgtatatatcttttaaaactacaatcatgtatctagaggaaaaatctatttaagaataaagggctgtttcaattttcctaatattttgttatcatctagcacttgccagtaaacaaacgataatagtagtcaaagtattaaaatatatctaagaaattgtatgcattgttactatattatgtgactcaattatatgcagttttagcagtttaacactccagct

SEQ ID NO: 41407 - DNA, 581 bp, Homo sapiens
caaaagcacttgggtgtttcttattcagaggcaggttgggatactggctctgtgacctatagtctgtcctggcttttgagggaaattttcttattagcttggttccttagtcctgagggaaaagtgctcacctccaaaaattaggcaagcgtgccttttgtacattgtgactaatcagctaatcccgtattttcccacattgagattatctttctagagccccacatggaaactccctaaatccactggcatttgcaagaactccattcattcactcactgactcattcattcaaaagatatataagtgcttcagtggtgccaggcactgttctaggtactggattatagagtgaaccaaacacaacccctgcccttctgtggcgtataaatgagaggagaaagatagaaagcaaaataaaaatcagataatgataagagctatgaagaaaagtcatgcagggccaggtgcagtggctcatgcctgtaaccccagcactttgggaggccgaggcaggaagattgcttgaggccaggagttcgagactagcctgagcaacatagggagaccctttctctaca

SEQ ID NO: 41408 - DNA, 449 bp, Homo sapiens
acagtgtggaatggtgagcaaagcacataggctctggggtcagggccgatctggaatcttgacttagcctgcttactggctgagggaccacaggcaacatgctcaactttcttccgctttagtatttatatgaaaaatcagaaaatgcctacaactcacaaggttacatgataccatgggtaaagtacatacaaatgttaattctcttgacctgtcttcaaagccccatggctgtttttcttttttttcagatggagtctcgctctgttgcccaggctggagtgtagtggtgtgatctcatctcactgcaacctgtgcctcccgggttcaagcgattctcctgccttggcctcctgagtagctgggactacaggtgcgtgccaccatgcccagttaattttttgtatttttagtagacacggggtttcaccatgctggccaggctggtc

SEQ ID NO: 41409 - DNA, 849 bp, Homo sapiens
cctcagaaaccaaccctggcatatatggtccgatgatcttccagaaggatgccaagaccactcaatggcaaagcacagtttcttcaacaaatggtgatgggaaaattgtataactacatgcaaaacaatgaagttggactcttaccttacaccacgttaaaatcaattcaaagtgaattataaacctaaatgtaaaactagaactatcaaactcctagggaaaacaaatttggaaaatgctttatgacgatgaatttgtcaataatttttaggatatgacattaaaagctcaggcagtaaaagcaaaaatatatcaaacctaaaaacttctgtacctcaaaggtcacaaccaacagggtaaaaggcaaactgtaaaattaaaaaaaataccagtttagtgtcccttatttgaaatgcttgggatgtgtttcagattttgtaatatttgcattattcttactggttgaggatctcaaattcaaacacctgagtctgagatgctccaataagcatttcctttgagtgtcatgttggcacttcaaaaagtttcagactttggagcatttgggatttcagatttttgggatcagagacattcaacctataggttgcacatcatgtatctcataagaagtgaacattcagaatgcgtaaagaactcctacagagagactaccagaagcagagaggagcaaacacattttcacactagggaacctgctatctctcctggattccaattagggcagagtaagtgctagttctctgccaacccaggattaggccctgcagctgcagtgaaaataatcacagaagaaaactaagaaataaaaaatggagaaagtgaga

SEQ ID NO: 41410 - DNA, 470 bp, Homo sapiens
taaaatactggcaaaccgaatccagtagcacatcaaaaagcttctccaccacgatcaagtgggcttcatccctgggatgcaaggctgtttcaacatatgcaaatcaataaacataatccatcacagaaacagaaccaatgacaaaaaccgcttgattatctcaatagatgcagaaaaggccgtcgacaaaattcaaaagcccttcatgctaaaaactctcaataaactaggtattgatagaacgtttctcaaaataataagagctatatatgacaaacccacagccaatatcatgtggaatgggctaaagctgttgacctgatagatatgggttcaagaggacacagctgaatactgtgcttaggaaaagaacagtttcaaaggctttccagattgtcagatttgatgatatcctccttggtgcacacctctcttggctatggggcacataaaccacctctaccaatcta

SEQ ID NO: 41411 - DNA, 1197 bp, Homo sapiens
taaaatactggcaaaccgaatccagtagcacatcaaaaagcttctccaccacgatcaagtgggcttcatccctgggatgcaaggctgtttcaacatatgcaaatcaataaacataatccatcacagaaacagaaccaatgacaaaaaccgcttgattatctcaatagatgcagaaaaggccgtcgacaaaattcaaaagcccttcatgctaaaaactctcaataaactaggtattgatagaacgtttctcaaaataataagagctatatatgacaaacccacagccaatatcatgtggaatgggctaaagctgttgacctgatagatatgggttcaagaggacacagctgaatactgtgcttaggaaaagaacagtttcaaaggctttccagattgtcagatttgatgatatcctccttggtgcacacctctcttggctatggggcacataaaccacctctaccaatctaactggtttgtgcagtttttctgattttgtatctaccggcaaaatatatcttaagccatttttaggaaacaggaggtttagtcacgtgctcaacaaaagcacaacaaatggggagcatttaatggtgtaagggctgtgaggtgtagctgctgaaactgtagctaggagctgccttgctgccttcttgcaggcagattggccagatgagccaggctaaaatacaattaatatctaccattgtggtttaatatgaaatatggatacctggtctttgtctcagttcttgtcatagagttccccaaacctttagaacttcctgagtggtaggaatatctcattagtgataatgagcccctttgattcgataactcctgagtttatgctaatgaggttacttaatgtggggccctagatattcttaggatggggctagttcccggaaagaccaggtcatttgaggattagagggttggaacttttagctctacccactgatctctgggtggggaaggtgctggagatcaagctgcctaaaaactcttgaacaacaagatttgaggagcttccagtaaatgcgtccacaagctgggagggcactgcaccccagtttcactgggacagaagctcttgcacttggaatctttccagacctagcccttcatgctgcttcatctggctgttcatctgtatcctttataataaattggcaaatgtaaaggttagctgaa

SEQ ID NO: 41412 - DNA, 329 bp, Homo sapiens
cttaatagattaatatgttgtgtttatactccagttacgtttgcattcactagagcagaacttagaatgggaaatacttagctggcaaggaatttattctagttcatatctgaaagtaataaaactgtagtaaaatgttttcagtgattcagttatgtaatccacattacctcttacattcccttgaaaatcagtgattgcagatatcaaaaaaacgggagattttctggtggccctatttatcttgtgtcttatccttcagtgagtgaggctttaccagatagcagttatatctctttctaaagcacatttctcttttcttcttaagc

SEQ ID NO: 41413 - DNA, 267 bp, Homo sapiens
gtcatggtgcaaatgagttcctttgcctctccaagcactggtccttattaacctggaggtgactgcagccacaagaaaaactccctaaaagctttgctggcaggaggtgaaagagaagatgcaccacgcctggaacatcctaagtgctcaataaatggctgccgtgggtggctgcttccccaagccctcctccttcaccacagggttcttgtaaaattcctaactgtccttggaggcctaaattccctgctgtagccatcctgatgc

SEQ ID NO: 41414 - DNA, 426 bp, Homo sapiens
gtagctgggactacaggtgttgcaccactacgcccagctaattttaaaaattgttttgtagagacagggatcttgctgtgatgcacaggctggtcttgaactcctgggctcaagtgatctgccctccttggcctcccaaagtactgggattgcaggagtgagccaccacgttggcctcattgtagccatttttaagtatacagttcaatgacattaagtatattcaaattgtgttgcaaccatcaccactatcttcagaactttttcatcatcccagacaaactctgtacccatttattttcaactgtttttaagtgtacaattcagtggtattaagtacattcaaaatattgtataaccatcagctctggtgttagaactttttcatcattccaaataaattttgtatctagtgggcaataactc

SEQ ID NO: 41415 - DNA, 708 bp, Homo sapiens
caacagtggatagccaatcactaaccagtgttatttctgtaaaccaatgagaattcctgacgaacaacttttgtaatcacccgtcttctgattcatccttttttctgtaaaaagttgagcctgtcctttggaatactctccaaggcaacctggaagtgtctcaggctgcagtcttcaaccttggcccaaataagctaccttgacctgctgtttgcctttttaccctaattccccccaggcatccctagatagggaaacaagccacatctctgccctcagcctgggaccctgcttcctgatgatacctgcccatccctgttttttctccataaacttgctgggaaaggtgccctggttctgtttctctagaggctgtggtgccagactggaaactaccagtttcctgggcatgtgccttggtgtcaccgaacagccagatgagacttgtcaccagaaaatgctttcctttgctcctttattaaacacactcatattgccagtactggggatatcccctgagcaaggtgtaggagagcaaaagtagacaaccagataggaagaaaactgaagtggaataaatagatgccaggcacatgaatggtgctttttttcatcaaccttgtgacgttggaattatctcccattactcaagaagctcagagaggacaagtggtcttgacttatcagacatgggccccttttttgtta

SEQ ID NO: 41416 - DNA, 365 bp, Homo sapiens
tccctgaataaagtcgcacagagaagtctcacagagaagtccttgtgttgctgagctggtgaaacttgctggaaattcaccttctggaacttgccagaaatctaccatctggaacttgctagacatccactatctggaacttgctagaaatctgccctctgcatcttgctagaaatatgccttctggaacttgctggaaatagatggaagatgagggagtataatatagacaattcttcctagaagtgagaaggttgcttgtaaagacaaaagacaataggagctggaaggaaacagggagctgggaaagtttttaaaaattgaagagacttcaatatgtttaaaaagacaatggaaaagatctc

SEQ ID NO: 41417 - DNA, 403 bp, Homo sapiens
aagaatgaattcattcattcatccatattctgggagcaaaggaaattggagttaacaaaaccaacccagaaactgccttcctggtcctctatcaagtgcagcagaaggtcatggaacaaatgacttcaagagtgttacttgttactgaagggtcagtaagagataatgacctttaggatctatttttgcacatcaagggtgggcaaaagcaacccgcaaatggagtcttaaaaggtgcctaggtgtctgctggcctacaagggtgggaaggtgttccaggctgtgggcctggcttgagcagtggcctggaggtgagactcagcctggcatgcaccctcgagaccctcttggccacttcctgttccccagtgtgagttccagtgccatgagcagccctggcccc

SEQ ID NO: 41418 - DNA, 403 bp, Homo sapiens
ggtataaagcaaattttcacattttaatttcaatctccaagagaattagggtgaccaagagcattatccaatagttgtagtgctttaatggttaaattatttggtctatagtatctgtctactgctgagagacaggaaggcaacacatgttttgctgtctgtgtgtgagccaaataacagaagggcaatgaccaatcattgacagactttgaaggaagtgacgtgaccggtcactgatcacaatgtacatctgttattcacattgtaatatgtggactgaagaaactgagatgcagttactcatctgaataccaaggtaactgaaatttgagccagtttgttgggagactggtgttgttgaatgaaacatgacaactgaaatgttcacacattggaattgtgc

SEQ ID NO: 41419 - DNA, 258 bp, Homo sapiens
atcattttagaaaagataaaggaggaaataacaattttagagataaccaatattatgtactacgcctttatattttgctttctctgttgttttaatggatgacttgtctctatactttattaaagatcaacttcacttacatactcgatcccatcttctcttgcttgctcaaggattttgtctctcaacccctattttctctgtatcaacaatttctcccttcccaaacatttgttgccattaacatataaatatgct

SEQ ID NO: 41420 - DNA, 645 bp, Homo sapiens
gaaaggctgaggaatttctcagagggtgacggactgccagctgccctgaggttgctcttacttgttacagtggacaagctgctttgctagcgtgcagatggagaaggcgggcccgggaggcttggagtttggcccaggagctggcaggtgcccagcagcagtttcactgcccgcttcaggcgactctccactggcttcctgggagccttccgttaggagatgctctctcaagatccccgtcaccagggctttctggttggaatgaggcaaggacctgctttacacggtgcgccccattacccaacagcgtttcctgtccttgctggccacagccatcacagtggggctgtcatcagccactttaaacaggcaaaacgtatttacctgtcagggaaaataccaagatcacaaaggtggttttcccagggcaaggttcgtccattgcactccagatgtgctgacccctgcgatttcttcatatgtggggaactgcactcacactctccccagcaatacaaataaataagtaggctgggcacagtggcccatgcctgtaagcactttgggaggccagggcagtaagattgcttgaggccaggagttgaagaccagtgtgggcaacatagcaatacctcctctctacca

SEQ ID NO: 41421 - DNA, 117 bp, Homo sapiens
ttcaataaggtttttaaaggatgtcaaaggaaaaacatctaagtgagaaatgtttttgtggtattgaaagatgactttttctgttcattagctatatgtttttgacagtattttttc

SEQ ID NO: 41422 - DNA, 298 bp, Homo sapiens
acgatcgtctcctgtttctttgcattataattgcaaattttaatgttcctctcataagagtactaaaacataactaacaagaagacaaaaatgcagaaaggatataagatttgaaccatttcagtcaatttaagtggcctttagaaaacacaatgctaggcaaatacagaatatagattcttttgaagtgcacatacaacattcacaaaatagacagatgtgggactatagcaagtgtaagtaaatgtcaggaaactgacatgttaagacatcatattgagtatgttctcttgccaca

SEQ ID NO: 41423 - DNA, 316 bp, Homo sapiens
ctatatactaaagaagtaatgtacctaagagaaagacatggcccggcatggcatggtggcttgcgcctgtaatcccagcactttgggaggccaagacgggggattgcttgagcccaggaattcgagaccagcctgggcaacatggcaaaacctcatctttacaaaaaatacaaaaatcgtcagggcgtggtggtgtgtgcctgtagtcccggttactcgggaggctgaggcaggaagatcaactgattaagcccatgaggttgaggcagtgagctgtgctcataccaccacactccactgggtaacagaactcgag

SEQ ID NO: 41424 - DNA, 358 bp, Homo sapiens
caccaccaccccacccccacctcccgggaccatcggctctgacgctagtaaatctgcgcctgcgtcggcttgcgccggatgttcgggtttaggggtttggttgtcaatgggttttctcgtctctgacataaccacgaagttatataaatgctcctgaagtgtgggcatccggtggtggtctgagccttggagtttcctagatggttacctttctggaacacattatatttggagctaaaagggggaacgcttaaatttgtttccgtaattctgtcctgtcgacttctaaaactgagtacctaagttgtcttgaatttaccttcctgcaccatgtcagaataaaaaacgcagcgagtga

SEQ ID NO: 41425 - DNA, 499 bp, Homo sapiens
cacttatcaaacgggaatgtgtgtatgaatcctccctggaatctggttacagtttatgctcccaatcagtaaggtcagagtggggcctgagcctctgcatttccaacaagctccctggtgatgctgatactcccagtccattgaccacactttggataggaagagtctacacttgctctactcaacttctctccattctgtcctcaaacacaccacgcttccttccccaccagctggagggggctctgctcccaggccccagaggtcaaggcagacacagttaaggtgtggaaacctccttattgcccgatggatcctccagagaggtggtcccttactttcagcagggcgcgtgtctacctgtttcatgctgtctcacacacagggtgccacccctgtgctgggcactgggtaagtgctctgtacatattaattaggagtactcatttcaaaaatatgtgtgcctttgataaataaaaacagtatgtgcaaaaaatgt

SEQ ID NO: 41426 - DNA, 861 bp, Homo sapiens
gcagcatcagcttgggaaaagagtgcctttaaggcactgtttctctctatgaaggcagtgtggaatgatagggatgatctaggacctagaggagagaccttaagtcttacttgcagccaaaagccttcaaacctgagctagccagaactgttacatcagaattctcacccatgacaagaagcctggagggagtccagggttgatggattgacttaaggtgtcatcaaaagcttagactttacccttctgctgcaccacccttattgccttgttgtcacaagaggactactgctgttcaagtcatcacttccacattccagaaggaagaaaggagaggtagagggccagaagtatcccctccttttatcaggagccattaactttcccagaaacttccatgtccacccagcagacctccacttacatctcactaggcagaactcctatcacttggccaccccagcagtcagggaagctggaagggtgagcattcagctatagagagtggaagcacaagcagcaagggaagaacaggtcagtaattgctgtagagtttcctgcccagcagcatctgccaaaactaggtaaattattttttaacataatagtatttttgtggattttcttacaaaagcaatgcatatatattgttactttgaaaaataaagattttaaatcttcaacaagcccattactcaggagtgatgactgttattcttggtttattagctttctagatctttgtattttttttaacgtgggtagaaccacaatatgggttgctctgaaattagcctttacacttggcattgtgaaaaatctttccaaatcattaaatgttctctgcagaattaaaaatta

SEQ ID NO: 41427 - DNA, 428 bp, Homo sapiens
gggattacaggcattgagccactgcgcctggccagcaggtgagtcttttaagcaaggtgccagccagagaggatgaggattttataattgtgaggactgcaattaactcagtgtattcagtaaacattttgtgagcatctgcagcatgctgggcttgaggacacagcagtgaacagacatggtctttcttctcgtgaagactgccatttagtaagagtggcaactattaaacaggaccaggcatggtggctcatgcctgtaatcccagcatgggaggccaaggcgggcagatcgcttgagtccaagagttcaagaccagcctggccaacatggtgaaacccatctctactaaaaatacaaaaattagccgggcgtggtggcaggtgcctgtaatcccagctattcgggaggctgaggcaggtgaatcg

SEQ ID NO: 41428 - DNA, 110 bp, Homo sapiens
agccggccgagggattatgtaacttctggtgggcatggcagatggtgtgctggctcagacagtatcaaacccagcactgacactaaccttctctgacgtggcacccgggc

SEQ ID NO: 41429 - DNA, 446 bp, Homo sapiens
ttttctattgaaaggcctagaaataatgaccaaccagtagcaatgaaccttcatagcaaatagattatggtccctagttaccattttccacatgagggagtcaagtgttactgaagaaatggctgcttccaaaactagggaaggaaagtttcaagatgaaaccggagtatcttgtcatagcaaacagcacagaaatcatcatagaccactgacagggtatcaaaagggctcaggggccaactgcaggaagtgccccagggccagagatgggcaatatgaacatcaataattctgatggattgacatgtatctatcaaatacttcaaattcatgagtttatgttgacaagcttcccctcagaaaaagatctcattacatttggaggatactaaaaaagctaactcattatttttgagtacaaataaatgaaaagaatcaagcattta

SEQ ID NO: 41430 - DNA, 353 bp, Homo sapiens
cgatcctcctaactcccacccagagtgatgggattacaggcgtgagccactgcgcccagccaagcctgggatagaatcaggtggctctgagttcaaatccttcctctgtccctggtgtcctgggtgactctggggatgtcatgccccctctgtggcttccttcagttgtttgggctcatttgatttgatttgatttcatttatttttgagacagagtctcactctgttgctgaggctggaatgcagtggcacgatctctgctcactgcaacctctgcctcctgagttcaagcaattctcctgcctcagccttccaaatagctgggactacaggcgcctgccactatggctggc

SEQ ID NO: 41431 - DNA, 2129 bp, Homo sapiens
  misc_feature (31)..(31): n is a, c, g, or t
ccctggagttcctgtttcccgggacttccangaatgtctcgcagtttttccagaaaggaggagtcaaggaagcccttagtgaacgagaactcttcaatgctgtttcaggcttaaacatcacagcagataatgaagctgattttttagctgagatagaagctttggagaaaatgaatgaagatcacgttcagaagaatggaaggaaagctgcttcatttttgaaagatgatggagacccaccactactatatgatgaatagcactaatacccactgcttcagtgttaacacagcagtgattgtcagctgccaatagcaaatgaagttatgggtgacttgaaataccaaaacctgaggagtgggcaatggtgcttctgtgcttttcccccttgtaacccatgtgccagatgtgtggaatttttagctcagcattgagagaataaaatgtcactacctctcatcttatgaacaggataatataattctttaacagctataggttatctggctgaagtagacctaattttatgtgacttgtggtgtaaaatgtcttgatgataatttttaaaacttgggtaacacttccaaatatgggaggaaaggacagatgtgtttacaagggaggattttacaacatacttgctttattcacctccctgttttgtgttgcgtctttccttgaatattttattggcccagagttagcctttctcaattatgtttccagactgtggccgtgattctaaaggaaaatgtgtgctctttagtgggtagaacaaatggaaatttggtttcagaatggctgacagaaatcgacataagtcatgtaatttttgttgatatatcatgaaaatgaacagaattctttttccatacttatatctaagaaaaggcatcataggtttctgaaagagataactatataacagctttttaactatccagtcaactttcagcttttctacatttaggtaaaatggttaggatataactcatggtgtggctaatctacatttatcaataaaatgtaaattatctgaaaggacagaatataagatttaaccatgtttgacgtattttaatttagttaatgaagcaaaattcagtttatatttcactagaactgtgtacttgattgattttcagagaaatatcacaaattagaaatattaaatctaaggatgaaaggtatatataaaacaatttgggggccaggcacgatggctcaaacctgtaatcccagcactttgggagaccaaggcgggtggatcacttgaggtcaggagttcaagaccagcctgggcaacatggcgaaaccctgtctctactaaaaatacaaaaattagccgggtgtggtggcacttctctgtaatctcagcttctcaggaggctgagacaggagaatcgcttgaacccgggaggcagaggttgcagtgagctgagatcatgccactgcactccggcctaggtgacagagggaaactccatctccaggaaaaaaaaaaaaaacccaatttggataccaaattaatcaactaatttgagctatctggccttactcttagtagtttttagtacgtgctggacaccacttttaaaaagcaatcactgtgctagaaaagtatattggctttgttaggattaaagttcattaacttcaatgtaatcatgcctcctattactgaagtcagattggaaccactaaagatccaaactttctgtctggtaatagaaagtaaaaatctagacatcatttacatttgagaaagctgtttttaacattattttaaaatgccaaatatgttctttctagaaaaatatttatttttgtttttgttggatagcttttaattacatttcagagaggtgtaattttgggtagatgctcattacatttttgaaaggtttatgattccaaaataaagatttatatgactggtgatactggctttacagaaatttcagagaactaatttttaaaatctttagcatttaaaactttttttgttttgttttctgacatattctgacaaagagcagcaaaccactgctgtgtggcattcttggagtgtgctgtgaatgtgctttttaagaaattaaaaagagatcattttaaaattgaaaaaaagt

SEQ ID NO: 41432 - DNA, 2118 bp, Homo sapiens
  misc_feature (31)..(31): n is a, c, g, or t
ccctggagttcctgtttcccgggacttccangaatgtctcgcagtttttccagaaaggaggagtcaaggaagcccttagtgaacgagaactcttcaatgctgtttcaggcttaaacatcacagcagataatgaagctgattttttagctgagatagaagctttggagaaaatgaatgaagatcacgttcagaagaatggaaggaaagctgcttcatttttgaaagatgatggagacccaccactactatatgatgaatagcactaatacccactgcttcagtgttaacacagcagtgattgtcagctgccaatagcaaatgaagttatgggtgacttgaaataccaaaacctgaggagtgggcaatggtgcttctgtgcttttcccccttgtaacccatgtgccagatgtgtggaatttttagctcagcattgagagaataaaatgtcactacctctcatcttatgaacaggataatataattctttaacagctataggttatctggctgaagtagacctaattttatgtgacttgtggtgtaaaatgtcttgatgataatttttaaaacttgggtaacacttccaaatatgggaggaaaggacagatgtgtttacaagggaggattttacaacatacttgctttattcacctccctgttttgtgttgcgtctttccttgaatattttattggcccagagttagcctttctcaattatgtttccagactgtggccgtgattctaaaggaaaatgtgtgctctttagtgggtagaacaaatggaaatttggtttcagaatggctgacagaaatcgacataagtcatgtaatttttgttgatatatcatgaaaatgaacagaattctttttccatacttatatctaagaaaaggcatcataggtttctgaaagagataactatataacagctttttaactatccagtcaactttcagcttttctacatttaggtaaaatggttaggatataactcatggtgtggctaatctacatttatcaataaaatgtaaattatctgaaaggacagaatataagatttaaccatgtttgacgtattttaatttagttaatgaagcaaaattcagtttatatttcactagaactgtgtacttgattgattttcagagaaatatcacaaattagaaatattaaatctaaggatgaaaggtatatataaaacaatttgggggccaggcacgatggctcaaacctgtaatcccagcactttgggagaccaaggcgggtggatcacttgaggtcaggagttcaagaccagcctgggcaacatggcgaaaccctgtctctactaaaaatacaaaaattagccgggtgtggtggcacttctctgtaatctcagcttctcaggaggctgagacaggagaatcgcttgaacccgggaggcagaggttgcagtgagctgagatcatgccactgcactccggcctaggtgacagagggaaactccatctccaggaaaaaaaaaaaaaacccaatttggataccaaattaatcaactaatttgagctatctggccttactcttagtagtttttagtacgtgctggacaccacttttaaaaagcaatcactgtgctagaaaagtatattggctttgttaggattaaagttcattaacttcaatgtaatcatgcctcctattactgaagtcagattggaaccactaaagatccaaactttctgtctggtaatagaaagtaaaaatctagacatcatttacatttgagaaagctgtttttaacattattttaaaatgccaaatatgttctttctagaaaaatatttatttttgtttttgttggatagcttttaattacatttcagagaggtgtaattttgggtagatgctcattacatttttgaaaggtttatgattccaaaataaagatttatatgactggtgatactggctttacagaaatttcagagaactaatttttaaaatctttagcatttaaaactttttttgttttaaaatgatctctttttaatttcttaaaaagcacattcacagcacactccaagaatgccacacagcagtggtttgctgctctttgtcagaatatgtcagtaaacaaaac

SEQ ID NO: 41433 - DNA, 464 bp, Homo sapiens
  misc_feature (31)..(31): n is a, c, g, or t
ccctggagttcctgtttcccgggacttccangaatgtctcgcagtttttccagaaaggaggagtcaaggaagcccttagtgaacgagaactcttcaatgctgtttcaggcttaaacatcacagcagataatgaagctgattttttagctgagatagaagctttggagaaaatgaatgaagatcacgttcagaagaatggaaggaaagctgcttcatttttgaaagatgatggagacccaccactactatatgatgaatagcactaatacccactgcttcagtgttaacacagcagtgattgtcagctgccaatagcaaatgaagttatgggtgacttgaaataccaaaacctgaggagtgggcaatggtgcttctgtgcttttcccccttgtaacccatgtgccagatgtgtggaatttttagctcagcattgagagaataaaatgtcactacctctcatctta

SEQ ID NO: 41434 - DNA, 2175 bp, Homo sapiens
  misc_feature (31)..(31): n is a, c, g, or t
ccctggagttcctgtttcccgggacttccangaatgtctcgcagtttttccagaaaggaggagtcaaggaagcccttagtgaacgagaactcttcaatgctgtttcaggcttaaacatcacagcagataatgaagctgattttttagctgagatagaagctttggagaaaatgaatgaagatcacgttcagaagaatggaaggaaagctgcttcatttttgaaagatgatggagacccaccactactatatgatgaatagcactaatacccactgcttcagtgttaacacagcagtgattgtcagctgccaatagcaaatgaagttatgggtgacttgaaataccaaaacctgaggagtgggcaatggtgcttctgtgcttttcccccttgtaacccatgtgccagatgtgtggaatttttagctcagcattgagagaataaaatgtcactacctctcatcttatgaacaggataatataattctttaacagctataggttatctggctgaagtagacctaattttatgtgacttgtggtgtaaaatgtcttgatgataatttttaaaacttgggtaacacttccaaatatgggaggaaaggacagatgtgtttacaagggaggattttacaacatacttgctttattcacctccctgttttgtgttgcgtctttccttgaatattttattggcccagagttagcctttctcaattatgtttccagactgtggccgtgattctaaaggaaaatgtgtgctctttagtgggtagaacaaatggaaatttggtttcagaatggctgacagaaatcgacataagtcatgtaatttttgttgatatatcatgaaaatgaacagaattctttttccatacttatatctaagaaaaggcatcataggtttctgaaagagataactatataacagctttttaactatccagtcaactttcagcttttctacatttaggtaaaatggttaggatataactcatggtgtggctaatctacatttatcaataaaatgtaaattatctgaaaggacagaatataagatttaaccatgtttgacgtattttaatttagttaatgaagcaaaattcagtttatatttcactagaactgtgtacttgattgattttcagagaaatatcacaaattagaaatattaaatctaaggatgaaaggtatatataaaacaatttgggggccaggcacgatggctcaaacctgtaatcccagcactttgggagaccaaggcgggtggatcacttgaggtcaggagttcaagaccagcctgggcaacatggcgaaaccctgtctctactaaaaatacaaaaattagccgggtgtggtggcacttctctgtaatctcagcttctcaggaggctgagacaggagaatcgcttgaacccgggaggcagaggttgcagtgagctgagatcatgccactgcactccggcctaggtgacagagggaaactccatctccaggaaaaaaaaaaaaaacccaatttggataccaaattaatcaactaatttgagctatctggccttactcttagtagtttttagtacgtgctggacaccacttttaaaaagcaatcactgtgctagaaaagtatattggctttgttaggattaaagttcattaacttcaatgtaatcatgcctcctattactgaagtcagattggaaccactaaagatccaaactttctgtctggtaatagaaagtaaaaatctagacatcatttacatttgagaaagctgtttttaacattattttaaaatgccaaatatgttctttctagaaaaatatttatttttgtttttgttggatagcttttaattacatttcagagaggtgtaattttgggtagatgctcattacatttttgaaaggtttatgattccaaaataaagatttatatgactggtgatactggcacaataagagcagttgccaagatgaggggtgccctcttctcccccaacagctgttctgtaagccggctctgtatctctcaatctaaaagaggctaaactattcagtcgcaggggcgatcccagatccagagctctgtcccatcccgaacctacccaagttccccttcccagggtcattcggtcccagtcgggggggctgcaagaggaaggggtggcatcaataaaca

SEQ ID NO: 41435 - DNA, 188 bp, Homo sapiens
tctcagaggctgcctttggtttttttacatgtgaccttttccttaagacagctcacaatagagcaaatggctttatcaaagcaaacaactgagaggacatgacaatatgaggaagagggaagccacaggcttgtataacctaatttcagaagtgataccttttatttttgcttcacttttattagcta

SEQ ID NO: 41436 - DNA, 452 bp, Homo sapiens
gtttttgtgtgaccctgagttaaaaaatgatgaaaaaaaatttgtggacatttgttttctctcttattacataagtacctacataatatccttgattttgccttttggcccagaaagcctaaaatatttactatttggccctttacaggaagcatttgccaaactccagactagggtcttaggcgtaaatattaggtctagataggatcttgcacacagagtgactgactgcaggcaaatacataggtaagaagtttgagggaattttattgctataagcaaccactatcttccctgcaaaagcctgtaattgttccatccttccagcaatgcccctgatccccaacctgtatgagcagaaagtaggctatgcaagctggcagcctccaaggacagcacactctccaaggccttccccactcttccagcatgacacacacggtgccagatgg

SEQ ID NO: 41437 - DNA, 256 bp, Homo sapiens
ctgcctccacaagagggtgacatcactcacgccttgttaagtgggtccttctgttctctagtgtcaatccctggttgcttcctttcacaaagcttcttatccaacacactatcattgtcattagtcaactaattaaaatgcctattaacatggagaatcataaaaaagattaatacgtacaaccaacatttgactttaacctaaaaataaatgtaccttaatttgccagtttttccttgtgccaacaatccccgat

SEQ ID NO: 41438 - DNA, 346 bp, Homo sapiens
taggtttgtaaattccaagtgatgcttacttaaatttctttttgctttaatttgccagatgtatatacaaatgaaaacttttgagagaagagccttcagggaagagactgttttatgagctctcttaactatgacttaagtgaaataagggaagcagaatggttagcctccctttttcttctttcccctctttccttagttaagaaggcattacgattttcactgtgtagactgacatcttaaacagtggaacaggggagtgtctattgtagtgattctcaatttttggtgtgcccaaggccacctgggcaactttttaaagctctagggctgtatccctcagcaa

SEQ ID NO: 41439 - DNA, 385 bp, Homo sapiens
cagaaggggctccatggatacggaaagagctgcatgcaggaactcttcagtccaggccatgtggaaggcctaggacaagattggtacaaaccactgctcctctccagttcccgagaagggtcattaggcgtgctctaagtaagaatgagaacaccaccccaactgcatgtcccattccattcccccagcctcctcttctctcctttccctgaccatgatttaccctctatgcatactgtgtgcaaatgattgcccaacccagcttagcaaagtttagatgagaaaggtttgcctggttggaagaaaaactcttctgagtgtaaatacaatctgtaaaactactaagtgtgtacctagaagtgatagcgaaataggcaaggagact

SEQ ID NO: 41440 - DNA, 314 bp, Homo sapiens
ttatgggtatagaagcaagggagactcaaacgtagaagacgaataagaatctgtaaaataaagaacccagataacagaatgttaggttttagatatagctttagaatgagtggctctttgatgactcttgccacttggaactaaaagacccagaagagcttattttgggtgggcaggcagacttgacagagcaaagactgtgagcttgccatttaccgtcataattgcctttcattagctgacccactgattacactttttccacacaaaatcctttcccaaggcatctggctttagcaatgggaaaatgccat

SEQ ID NO: 41441 - DNA, 945 bp, Homo sapiens
ttaaagtgagacagtcacactagatgttccgtaagtactcacgctggagtagaaagagtattccatttccaaccaggagacctaggggccaagcgatatgaaatcccctgagactcagtttttccatctttcagatgggactgtgtgaggaacgagcagaacagtctgtatatggaagcactttgtaaagccttcagttctgtaggtaattgccactcttcttctctctagcagtctaaggtcctgtgctctctggtaggggtgcttcaatactttttttgtcttaaagtcacttccctccagcttctggtaatgttgtattgcttcttaattctagtcatttagaagttgataaataacaactgcttcttgttctaagcaaattacatgtcatttgatcagaactttatgaggaaggaggcttagaggggccacacagctactaggcaagccggctgtgtgctccttataccttgctgtattactgcgttgtcacaggagtttcctgaggacagggacaacgtcttactcatctttgcattcacgaaatctagtgctctgtttcacagtaggcatttaatatgtcttttatgtgaataacctgtccatatgttcaacttacattattctctccataatctaagcccctttcttctggttttgataccaagaagtaaaatatttggttggttagcctttttgtaatagtcctgtatagtattatgtttatttgatgatgtctgtatagtattatatctgcgtagtattatatattttgacagttcttttcatagaattttataagtagagttataagttaagaacagtcatacatccttaactcctgtactttacttctaaacgttgttaatggagataaatcttagaaccataagattttcccagatcctcccttctcccatccaaagagaaaaaggaaattaa

SEQ ID NO: 41442 - DNA, 827 bp, Homo sapiens
gttggccaggctggtcttgaactcctgacctcgtgatctgcccacctcggcctctcaaagtgctgggattacaggtgtgagtcactgcgtctggccatggaaaatatttattgagcacaattatgtgagagcatcatgctgagctttgaagatacagtggtgagcaaacatatatcctggcttcatgaagattatactctagttaacatgagcaacaaaataaaataatcacacaaaatatataggttcaagctgaaatgagtggctgcaccagattctatgagataagaaaggaagaaggacatttttcaccaagttcaaagactgggatacaaaggaatttgtcctgacaaaggcaaaacaaaaacaacaacaaacaaaaaacccaaaagagcaaaatgacagtagaacataacggggccagatcaaaaatgctgacaggttcccaaaagaataaaatgacggtaggacatgacggggccagatccaaaatgctgacaggttcaaacaaaattggaattgaaaatcagagtgcgttcaagagtatcaaacaatactatcttgttacttgcttattaccttagtagactggaagcaacacttcacacaaaaaaagggtttggatgtaatttcggataagaagagatgtttctgtaaagtctttcctgagaagcatattatttgagaaaaacacatatttctgtttttagtatttcactttgtataatgtcttaatttttgaagagctggtatattcctatgattcattaatgaaagttctataagatataaaatatacaatgaggagatctcctcttctgtaccag

SEQ ID NO: 41443 - DNA, 3321 bp, Homo sapiens
ccgggcggggggttgcggcgctcaggagaggccccggctccgccccgggcctgcccagggggagagcggagctccgcagccgggtcgggtcggggcccctcccgggaggagcgtggagcgcggcggcggcggcggcagcagaaatgatggaagaattgcatagcctggacccacgacggcaggaattattggaggccaggtttactggagtaggtgttagtaagggaccacttaatagtgagtcttccaaccagagcttgtgcagcgtcggatccttgagtgataaagaagtagagactcccgagaaaaagcagaatgaccagcgaaatcggaaaagaaaagctgaaccatatgaaactagccaagggaaaggcactcctaggggacataaaattagtgattactttgagtttgctgggggaagcgcgccaggaaccagccctggcagaagtgttccaccagttgcacgatcctcaccgcaacattccttatccaatcccttaccgcgacgagtagaacagcccctctatggtttagatggcagtgctgcaaaggaggcaacggaggagcagtctgctctgccaaccctcatgtcagtgatgctagcaaaacctcggcttgacacagagcagctggcgcaaaggggagctggcctctgcttcacttttgtttcagctcagcaaaacagtccctcatctacgggatctggcaacacagagcattcctgcagctcccaaaaacagatctccatccagcacagacagacccagtccgacctcacaatagaaaaaatatctgcactagaaaacagtaagaattctgacttagagaagaaggagggaagaatagatgatttattaagagccaactgtgatttgagacggcagattgatgaacagcaaaagatgctagagaaatacaaggaacgattaaatagatgtgtgacaatgagcaagaaactccttatagaaaagtcaaaacaagagaagatggcgtgtagagataagagcatgcaagaccgcttgagactgggccactttactactgtccgacacggagcctcatttactgaacagtggacagatggttatgcttttcagaatcttatcaagcaacaggaaaggataaattcacagagggaagagatagaaagacaacggaaaatgttagcaaagcggaaacctcctgccatgggtcaggcccctcctgcaaccaatgagcagaaacagcggaaaagcaagaccaatggagctgaaaatgaaacgttaacgttagcagaataccatgaacaagaagaaatcttcaaactcagattaggtcatcttaaaaaggaggaagcagagatccaggcagagctggagagactagaaagggttagaaatctacatatcagggaactaaaaaggatacataatgaagataattcacaatttaaagatcatccaacgctaaatgacagatatttgttgttacatcttttgggtagaggaggtttcagtgaagtttacaaggcatttgatctaacagagcaaagatacgtagctgtgaaaattcaccagttaaataaaaactggagagatgagaaaaaggagaattaccacaagcatgcatgtagggaataccggattcataaagagctggatcatcccagaatagttaagctgtatgattacttttcactggatactgactcgttttgtacagtattagaatactgtgagggaaatgatctggacttctacctgaaacagcacaaattaatgtcggagaaagaggcccggtccattatcatgcagattgtgaatgctttaaagtacttaaatgaaataaaacctcccatcatacactatgacctcaaaccaggtaatattcttttagtaaatggtacagcgtgtggagagataaaaattacagattttggtctttcgaagatcatggatgatgatagctacaattcagtggatggcatggagctaacatcacaaggtgctggtacttattggtatttaccaccggagtgttttgtggttgggaaagaaccaccaaagatctcaaataaagttgatgtgtggtcggtgggtgtgatcttctatcagtgtctttatggaaggaagccttttggccataaccagtctcagcaagacatcctacaagagaatacgattcttaaagctactgaagtgcagttcccgccaaagccagtagtaacacctgaagcaaaggcgtttattcgacgatgcttggcctaccgaaaggaggaccgcattgatgtccagcagctggcctgtgatccctacttgttgcctcacatccgaaagtcagtctctacaagtagccctgctggagctgctattgcatcaacctctggggcgtccaataacagttcttctaattgagactgactccaaggccacaaactgttcaacacacacaaagtggacaaatggcgttcagcagcgggtttggaacatagcgaatccgaatggatctgatgaaacctgtaccaggtgcttttattttcttgcttttttcccatccatagagcatgacagcatcgattctcattgaggagaaaccttgggcagctccggccaggccttgtaggaaaaggccccgcccgaggttccagcgtcaacggccactgtgtgtggctgctctgagtgaggaaaaaattaaaaagaaaaactggttccatgtactgtgaacttgaaaacttgcagactcaggggggtccctgatgcagtgcttcagatgaagaatgtggacttgaaaatacagactgggctagtccagtgtctatatttaaacttgttcttttcttttaataaagtttaggtaacatctcctgaaaagcttgtagcacaaaggctcagctggggatggtgtttgacttcggaggaaaaaagttgctattgcccgttaaaggcactagagttagtgttttatccctaaataatttcaatttttaaaaacatgcagcttccctctccccttttttatttttgaaagaatacatttggtcataaagtgaaacccgtattagcaagtacgtggcaatgttcattccaatcagatgcagctttctcctccgtctggtctcctgtttgcaattgcttccctcatctcagtagggaaaaaattgagtgggagtactgagatgtgtgggtttttgccattggacaaagaatgaggttagaagactgcagcttggagtctctctaggttttcaactatttcttcacaatttgaacacttgacggttgtcccttttaatttatttgaagtgctatttttttaaataaaggttcatctgtccatgca

SEQ ID NO: 41444 - DNA, 673 bp, Homo sapiens
  misc_feature (651)..(651): n is a, c, g, or t
gtatccgcttagcgagaaactccttatagaaaagtcaaaacaagagaagatggcgtgtagagataagagcatgcaagaccgcttgagactgggccactttactactgtccgacacggagcctcatttactgaacagtggacagatggttatgcttttcagaatcttatcaagcaacaggaaaggataaattcacagagggaagagatagaaagacaacggaaaatgttagcaaagcggaaacctcctgccatgggtcaggcccctcctgcaaccaatgagcagaaacagcggaaaagcaagaccaatggagctgaaaatgaaacgttaacgttagcagaataccatgaacaagaagaaatcttcaaactcagattaggtcatcttaaaaagatcaggctgatccgcttaagggaaaatggaaagaagaaagtaactaaaagccttcctttcacagtttctggcatcactaccactactgattaaacaagaataagagaacattttatcatcatctgctttattcacataaatgaagttgtgatgaataaatctgcttttatgcagacacaaggaattaagtggcttcgtcattgtccttctacctcaaagataatttattccaaaagcttagataaatggaagactctggnactgttgactggtgtgaaatgc

SEQ ID NO: 41445 - DNA, 271 bp, Homo sapiens
cccccctcctatcatacactatgacctcaaaccaggtaatattcttttagtaaatggtacagcgtgtggagagataaaaattacagattttggtctttcgaagatcatggatgatgatagctacaattcagtggatggcatggagctaacatcacaaggtgctggtacttattggtatttaccaccggagtgttttgtggttgggaaagaaccaccaaagatctcaaataaagttgatgcatgatagagggggggatcctcagagtcacct

SEQ ID NO: 41446 - DNA, 3637 bp, Homo sapiens
ccgggcggggggttgcggcgctcaggagaggccccggctccgccccgggcctgcccagggggagagcggagctccgcagccgggtcgggtcggggcccctcccgggaggagcgtggagcgcggcggcggcggcggcagcagaaatgatggaagaattgcatagcctggacccacgacggcaggaattattggaggccaggtttactggagtaggtgttagtaagggaccacttaatagtgagtcttccaaccagagcttgtgcagcgtcggatccttgagtgataaagaagtagagactcccgagaaaaagcagaatgaccagcgaaatcggaaaagaaaagctgaaccatatgaaactagccaagggaaaggcactcctaggggacataaaattagtgattactttgagtttgctgggggaagcgcgccaggaaccagccctggcagaagtgttccaccagttgcacgatcctcaccgcaacattccttatccaatcccttaccgcgacgagtagaacagcccctctatggtttagatggcagtgctgcaaaggaggcaacggaggagcagtctgctctgccaaccctcatgtcagtgatgctagcaaaacctcggcttgacacagagcagctggcgcaaaggggagctggcctctgcttcacttttgtttcagctcagcaaaacagtccctcatctacgggatctggcaacacagagcattcctgcagctcccaaaaacagatctccatccagcacagacagacccagtccgacctcacaatagaaaaaatatctgcactagaaaacagtaagaattctgacttagagaagaaggagggaagaatagatgatttattaagagccaactgtgatttgagacggcagattgatgaacagcaaaagatgctagagaaatacaaggaacgattaaatagatgtgtgacaatgagcaagaaactccttatagaaaagtcaaaacaagagaagatggcgtgtagagataagagcatgcaagaccgcttgagactgggccactttactactgtccgacacggagcctcatttactgaacagtggacagatggttatgcttttcagaatcttatcaagcaacaggaaaggataaattcacagagggaagagatagaaagacaacggaaaatgttagcaaagcggaaacctcctgccatgggtcaggcccctcctgcaaccaatgagcagaaacagcggaaaagcaagaccaatggagctgaaaatgaaacgttaacgttagcagaataccatgaacaagaagaaatcttcaaactcagattaggtcatcttaaaaaggaggaagcagagatccaggcagagctggagagactagaaagggttagaaatctacatatcagggaactaaaaaggatacataatgaagataattcacaatttaaagatcatccaacgctaaatgacagatatttgttgttacatcttttgggtagaggaggtttcagtgaagtttacaaggcatttgatctaacagagcaaagatacgtagctgtgaaaattcaccagttaaataaaaactggagagatgagaaaaaggagaattaccacaagcatgcatgtagggaataccggattcataaagagctggatcatcccagaatagttaagctgtatgattacttttcactggatactgactcgttttgtacagtattagaatactgtgagggaaatgatctggacttctacctgaaacagcacaaattaatgtcggagaaagaggcccggtccattatcatgcagattgtgaatgctttaaagtacttaaatgaaataaaacctcccatcatacactatgacctcaaaccaggtaatattcttttagtaaatggtacagcgtgtggagagataaaaattacagattttggtctttcgaagatcatggatgatgatagctacaattcagtggatggcatggagctaacatcacaaggtgctggtacttattggtatttaccaccggagtgttttgtggttgggaaagaaccaccaaagatctcaaataaagttgatgtgtggtcggtgggtgtgatcttctatcagtgtctttatggaaggaagccttttggccataaccagtctcagcaagacatcctacaagagaatacgattcttaaagctactgaagtgcagttcccgccaaagccagtagtaacacctgaagcaaaggcgtttattcgacgatgcttggcctaccgaaaggaggaccgcattgatgtccagcagctggcctgtgatccctacttgttgcctcacatccgaaagtcagtctctacaagtagccctgctggagctgctattgcatcaacctctggggcgtccaataacagttcttctaattgagactgactccaaggccacaaactgttcaacacacacaaagtggacaaatggcgttcagcagcgggtttggaacatagcgaatccgaatggatctgatgaaacctgtaccaggtgcttttattttcttgcttttttcccatccatagagcatgacagcatcgattctcattgaggagaaaccttgggcagctccggccaggccttgtaggaaaaggccccgcccgaggttccagcgtcaacggccactgtgtgtggctgctctgagtgaggaaaaaattaaaaagaaaaactggttccatgtactgtgaacttgaaaacttgcagactcaggggggtccctgatgcagtgcttcagatgaagaatgtggacttgaaaatacagactgggctagtccagtgtctatatttaaacttgttcttttcttttaataaagtttaggtaacatctcctgaaaagcttgtagcacaaaggctcagctggggatggtgtttgacttcggaggaaaaaagttgctattgcccgttaaaggcactagagttagtgttttatccctaaataatttcaatttttaaaaacatgcagcttccctctccccttttttatttttgaaagaatacatttggtcataaagtgaaacccgtattagcaagtacgtggcaatgttcattccaatcagatgcagctttctcctccgtctggtctcctgtttgcaattgcttccctcatctcagtagggaaaaaattgagtgggagtactgagatgtgtgggtttttgccattggacaaagaatgaggttagaagactgcagcttggagtctctctaggttttcaactatttcttcacaatttgaacacttgacggttgtcccttttaatttatttgaagtgctatttttttaaataaaggttcatctgtccatgcagtcctcttggattctctgaatgtagtaactatgaagctatgccaaaggtaggcagaaaatgggcttgggagccagacactccagggatcagtagttcctacccatagtctttgtgtgcttgctaaatggtgtacatttcttgttaaccacgttattaaaacttgatcagcacataaaaaaaaaaaaaaaaacctgggggggggcccgggacccaaattgccctatagtggtcggattccattcactggccgcgttttaccacgttgggactgggaaaacctggcgtaccccaattaattgcttgggggaaatccct

SEQ ID NO: 41447 - DNA, 1358 bp, Homo sapiens
ccgggtattctaataatttatatttcttttttgtcccaggtatttaccaccggagtgttttgtggttgggaaagaaccaccaaagatctcaaataaagttgatgtgtggtcggtgggtgtgatcttctatcagtgtctttatggaaggaagccttttggccataaccagtctcagcaagacatcctacaagagaatacgattcttaaagctactgaagtgcagttcccgccaaagccagtagtaacacctgaagcaaaggcgtttattcgacgatgcttggcctaccgaaaggaggaccgcattgatgtccagcagctggcctgtgatccctacttgttgcctcacatccgaaagtcagtctctacaagtagccctgctggagctgctattgcatcaacctctggggcgtccaataacagttcttctaattgagactgactccaaggccacaaactgttcaacacacacaaagtggacaaatggcgttcagcagcgggtttggaacatagcgaatccgaatggatctgatgaaacctgtaccaggtgcttttattttcttgcttttttcccatccatagagcatgacagcatcgattctcattgaggagaaaccttgggcagctccggccaggccttgtaggaaaaggccccgcccgaggttccagcgtcaacggccactgtgtgtggctgctctgagtgaggaaaaaattaaaaagaaaaactggttccatgtactgtgaacttgaaaacttgcagactcaggggggtccctgatgcagtgcttcagatgaagaatgtggacttgaaaatacagactgggctagtccagtgtctatatttaaacttgttcttttcttttaataaagtttaggtaacatctcctgaaaagcttgtagcacaaaggctcagctggggatggtgtttgacttcggaggaaaaaagttgctattgcccgttaaaggcactagagttagtgttttatccctaaataatttcaatttttaaaaacatgcagcttccctctccccttttttatttttgaaagaatacatttggtcataaagtgaaacccgtattagcaagtacgtggcaatgttcattccaatcagatgcagctttctcctccgtctggtctcctgtttgcaattgcttccctcatctcagtagggaaaaaattgagtgggagtactgagatgtgtgggtttttgccattggacaaagaatgaggttagaagactgcagcttggagtctctctaggttttcaactatttcttcacaatttgaacacttgacggttgtcccttttaatttatttgaagtgctatttttttaaataaaggttcatctgtccatgca

SEQ ID NO: 41448 - DNA, 2849 bp, Homo sapiens
ccgggcggggggttgcggcgctcaggagaggccccggctccgccccgggcctgcccagggggagagcggagctccgcagccgggtcgggtcggggcccctcccgggaggagcgtggagcgcggcggcggcggcggcagcagaaatgatggaagaattgcatagcctggacccacgacggcaggaattattggaggccaggtttactggagtaggtgttagtaagggaccacttaatagtgagtcttccaaccagagcttgtgcagcgtcggatccttgagtgataaagaagtagagactcccgagaaaaagcagaatgaccagcgaaatcggaaaagaaaagctgaaccatatgaaactagccaagggaaaggcactcctaggggacataaaattagtgattactttgagtttgctgggggaagcgcgccaggaaccagccctggcagaagtgttccaccagttgcacgatcctcaccgcaacattccttatccaatcccttaccgcgacgagtagaacagcccctctatggtttagatggcagtgctgcaaaggaggcaacggaggagcagtctgctctgccaaccctcatgtcagtgatgctagcaaaacctcggcttgacacagagcagctggcgcaaaggggagctggcctctgcttcacttttgtttcagctcagcaaaacagtccctcatctacgggatctggcaacacagagcattcctgcagctcccaaaaacagatctccatccagcacagacagacccagtccgacctcacaatagaaaaaatatctgcactagaaaacagtaagaattctgacttagagaagaaggagggaagaatagatgatttattaagagccaactgtgatttgagacggcagattgatgaacagcaaaagatgctagagaaatacaaggaacgattaaatagatgtgtgacaatgagcaagaaactccttatagaaaagtcaaaacaagagaagatggcgtgtagagataagagcatgcaagaccgcttgagactgggccactttactactgtccgacacggagcctcatttactgaacagtggacagatggttatgcttttcagaatcttatcaagcaacaggaaaggataaattcacagagggaagagatagaaagacaacggaaaatgttagcaaagcggaaacctcctgccatgggtcaggcccctcctgcaaccaatgagcagaaacagcggaaaagcaagaccaatggagctgaaaatgaaacgttaacgttagcagaataccatgaacaagaagaaatcttcaaactcagattaggtcatcttaaaaaggaggaagcagagatccaggcagagctggagagactagaaagggttagaaatctacatatcagggaactaaaaaggatacataatgaagataattcacaatttaaagatcatccaacgctaaatgacagatatttgttgttacatcttttgggtagaggaggtttcagtgaagtttacaaggcatttgatctaacagagcaaagatacgtagctgtgaaaattcaccagttaaataaaaactggagagatgagaaaaaggagaattaccacaagcatgcatgtagggaataccggattcataaagagctggatcatcccagaatagttaagctgtatgattacttttcactggatactgactcgttttgtacagtattagaatactgtgagggaaatgatctggacttctacctgaaacagcacaaattaatgtcggagaaagaggcccggtccattatcatgcagattgtgaatgctttaaagtacttaaatgaaataaaacctcccatcatacactatgacctcaaaccaggtaatattcttttagtaaatggtacagcgtgtggagagataaaaattacagattttggtctttcgaagatcatggatgatgatagctacaattcagtggatggcatggagctaacatcacaaggtgctggtacttattggtatttaccaccggagtgttttgtggttgggaaagaaccaccaaagatctcaaataaagttgatgtgtggtcggtgggtgtgatcttctatcagtgtctttatggaaggaagccttttggccataaccagtctcagcaagacatcctacaagagaatacgattcttaaagctactgaagtgcagttcccgccaaagccagtagtaacacctgaagcaaaggcgtttattcgacgatgcttggcctaccgaaaggaggaccgcattgatgtccagcagctggcctgtgatccctacttgttgcctcacatccgaaagtcagtctctacaagtagccctgctggagctgctattgcatcaacctctggggcgtccaataacagttcttctaattgagactgactccaaggccacaaactgttcaacacacacaaagtggacaaatggcgttcagcagcgggtttggaacatagcgaatccgaatggatctgatgaaacctgtaccaggtgcttttattttcttgcttttttcccatccatagagcatgacagcatcgattctcattgaggagaaaccttgggcagctccggccaggccttgtaggaaaaggccccgcccgaggttccagcgtcaacggccactgtgtgtggctgctctgagtgaggaaaaaattaaaaagaaaaactggttccatgtactgtgaacttgaaaacttgcagactcaggggggtccctgatgcagtgcttcagatgaagaatgtggacttgaaaatacagactgggctagtccagtgtctatatttaaacttgttcttttcttttaataaagtttaggtaacatctcctga

SEQ ID NO: 41449 - DNA, 653 bp, Homo sapiens
gcctactactactaaataaacggccggtcgatgtgaacttgaaaacttgcagactcaggggggtccctgatgcagtgcttcagatgaagaatgtggacttgaaaatacagactgggctagtccagtgtctatatttaaacttgttcttttcttttaataaagtttaggtaacatctcctgaaaagcttgtagcacaaaggctcagctggggatggtgtttgacttcggaggaaaaaagttgctattgcccgttaaaggcactagagttagtgttttatccctaaataatttcaatttttaaaaacatgcagcttccctctccccttttttatttttgaaagaatacatttggtcataaagtgaaacccgtattagcaagtacgtggcaatgttcattccaatcagatgcagctttctcctccgtctggtctcctgtttgcaattgcttccctcatctcagtagggaaaaaattgagtgggagtactgagatgtgtgggtttttgccattggacaaagaatgaggttagaagactgcagcttggagtctctctaggttttcaactatttcttcacaatttgaacacttgacggttgtcccttttaatttatttgaagtgctatttttttaaataaaggttcatctgtccatgca

SEQ ID NO: 41450 - DNA, 884 bp, Homo sapiens
ccgggcggggggttgcggcgctcaggagaggccccggctccgccccgggcctgcccagggggagagcggagctccgcagccgggtcgggtcggggcccctcccgggaggagcgtggagcgcggcggcggcggcggcagcagaaatgatggaagaattgcatagcctggacccacgacggcaggaattattggaggccaggtttactggagtaggtgttagtaagggaccacttaatagtgagtcttccaaccagagcttgtgcagcgtcggatccttgagtgataaagaagtagagactcccgagaaaaagcagaatgaccagcgaaatcggaaaagaaaagctgaaccatatgaaactagccaagggaaaggcactcctaggggacataaaattagtgattactttgagtttgctgggggaagcgcgccaggaaccagccctggcagaagtgttccaccagttgcacgatcctcaccgcaacattccttatccaatcccttaccgcgacgagtagaacagcccctctatggtttagatggcagtgctgcaaaggaggcaacggaggagcagtctgctctgccaaccctcatgtcagtgatgctagcaaaacctcggcttgacacagagcagctggcgcaaaggggagctggcctctgcttcacttttgtttcagctcagcaaaacagtccctcatctacgggatctggcaacacagagcattcctgcagctcccaaaaacagatctccatccagcacagacagacccagtccgacctcacaatagaaaaaatatctgcactagaaaacagtaagaattctgacttagagaagaaggagggaagaatagatgatttattaagagtaagtattaaaatgtaagag

SEQ ID NO: 41451 - DNA, 218 bp, Homo sapiens
tcaaaacaagagaagatggcgtgtagagataagagcatgcaagaccgcttgagactgggccactttactactgtccgacacggagcctcatttactgaacagtggacagatggttatgcttttcagaatcttatcaagtaagtgaattgttatgattaaatggagaattgaaaagttcgtttgcattttttaggttttctgtaattgtagtcattaat

SEQ ID NO: 41452 - DNA, 182 bp, Homo sapiens
gcaacaggaaaggataaattcacagagggaagagatagaaagacaacggaaaatgttagcaaagcggaaacctcctgccatgggtcaggcccctcctgcaaccaatgagcagaaacagcggaaaagcaagaccaatggagctgaaaatgaaacgtatgttctttattgacgtgaacgctgag

SEQ ID NO: 41453 - DNA, 561 bp, Homo sapiens
aatagcacaatctaaaaatctctaatctaccctccctcattgtatagcagggcagaaaaaaggaggaggagcaagaaaggtctagtgtagctacactgagaccagcacccaagtcctgtggctctatagctggtgctgttcattgtaattacactgcctctttgaactgtgtaactttatactcagtatttgccatgttgatgttgattgtcaaactaccaacagcagctataattatatgtataatgtgttagatattctgggaattttgcaagcgtggaagactgtagtccatgatctcagggtgttacatgttccctgtttccacagatttaaagatcatccaacgctaaatgacagatatttgttgttacatcttttgggtagaggaggtttcagtgaagtttacaaggtaagtataaggaactggatacaaagactgggggttaaattatcggctcctaccaacttggagaacattaagaatactgataattgtaggttgatatccattggttgaaattcaaaaactttaaaaacctgtatctttgggaaaacagc

SEQ ID NO: 41454 - DNA, 3225 bp, Homo sapiens
ccgggcggggggttgcggcgctcaggagaggccccggctccgccccgggcctgcccagggggagagcggagctccgcagccgggtcgggtcggggcccctcccgggaggagcgtggagcgcggcggcggcggcggcagcagaaatgatggaagaattgcatagcctggacccacgacggcaggaattattggaggccaggtttactggagtaggtgttagtaagggaccacttaatagtgagtcttccaaccagagcttgtgcagcgtcggatccttgagtgataaagaagtagagactcccgagaaaaagcagaatgaccagcgaaatcggaaaagaaaagctgaaccatatgaaactagccaagggaaaggcactcctaggggacataaaattagtgattactttgagcgacgagtagaacagcccctctatggtttagatggcagtgctgcaaaggaggcaacggaggagcagtctgctctgccaaccctcatgtcagtgatgctagcaaaacctcggcttgacacagagcagctggcgcaaaggggagctggcctctgcttcacttttgtttcagctcagcaaaacagtccctcatctacgggatctggcaacacagagcattcctgcagctcccaaaaacagatctccatccagcacagacagacccagtccgacctcacaatagaaaaaatatctgcactagaaaacagtaagaattctgacttagagaagaaggagggaagaatagatgatttattaagagccaactgtgatttgagacggcagattgatgaacagcaaaagatgctagagaaatacaaggaacgattaaatagatgtgtgacaatgagcaagaaactccttatagaaaagtcaaaacaagagaagatggcgtgtagagataagagcatgcaagaccgcttgagactgggccactttactactgtccgacacggagcctcatttactgaacagtggacagatggttatgcttttcagaatcttatcaagcaacaggaaaggataaattcacagagggaagagatagaaagacaacggaaaatgttagcaaagcggaaacctcctgccatgggtcaggcccctcctgcaaccaatgagcagaaacagcggaaaagcaagaccaatggagctgaaaatgaaacgttaacgttagcagaataccatgaacaagaagaaatcttcaaactcagattaggtcatcttaaaaaggaggaagcagagatccaggcagagctggagagactagaaagggttagaaatctacatatcagggaactaaaaaggatacataatgaagataattcacaatttaaagatcatccaacgctaaatgacagatatttgttgttacatcttttgggtagaggaggtttcagtgaagtttacaaggcatttgatctaacagagcaaagatacgtagctgtgaaaattcaccagttaaataaaaactggagagatgagaaaaaggagaattaccacaagcatgcatgtagggaataccggattcataaagagctggatcatcccagaatagttaagctgtatgattacttttcactggatactgactcgttttgtacagtattagaatactgtgagggaaatgatctggacttctacctgaaacagcacaaattaatgtcggagaaagaggcccggtccattatcatgcagattgtgaatgctttaaagtacttaaatgaaataaaacctcccatcatacactatgacctcaaaccaggtaatattcttttagtaaatggtacagcgtgtggagagataaaaattacagattttggtctttcgaagatcatggatgatgatagctacaattcagtggatggcatggagctaacatcacaaggtgctggtacttattggtatttaccaccggagtgttttgtggttgggaaagaaccaccaaagatctcaaataaagttgatgtgtggtcggtgggtgtgatcttctatcagtgtctttatggaaggaagccttttggccataaccagtctcagcaagacatcctacaagagaatacgattcttaaagctactgaagtgcagttcccgccaaagccagtagtaacacctgaagcaaaggcgtttattcgacgatgcttggcctaccgaaaggaggaccgcattgatgtccagcagctggcctgtgatccctacttgttgcctcacatccgaaagtcagtctctacaagtagccctgctggagctgctattgcatcaacctctggggcgtccaataacagttcttctaattgagactgactccaaggccacaaactgttcaacacacacaaagtggacaaatggcgttcagcagcgggtttggaacatagcgaatccgaatggatctgatgaaacctgtaccaggtgcttttattttcttgcttttttcccatccatagagcatgacagcatcgattctcattgaggagaaaccttgggcagctccggccaggccttgtaggaaaaggccccgcccgaggttccagcgtcaacggccactgtgtgtggctgctctgagtgaggaaaaaattaaaaagaaaaactggttccatgtactgtgaacttgaaaacttgcagactcaggggggtccctgatgcagtgcttcagatgaagaatgtggacttgaaaatacagactgggctagtccagtgtctatatttaaacttgttcttttcttttaataaagtttaggtaacatctcctgaaaagcttgtagcacaaaggctcagctggggatggtgtttgacttcggaggaaaaaagttgctattgcccgttaaaggcactagagttagtgttttatccctaaataatttcaatttttaaaaacatgcagcttccctctccccttttttatttttgaaagaatacatttggtcataaagtgaaacccgtattagcaagtacgtggcaatgttcattccaatcagatgcagctttctcctccgtctggtctcctgtttgcaattgcttccctcatctcagtagggaaaaaattgagtgggagtactgagatgtgtgggtttttgccattggacaaagaatgaggttagaagactgcagcttggagtctctctaggttttcaactatttcttcacaatttgaacacttgacggttgtcccttttaatttatttgaagtgctatttttttaaataaaggttcatctgtccatgca

SEQ ID NO: 41455 - DNA, 3497 bp, Homo sapiens
ccgggcggggggttgcggcgctcaggagaggccccggctccgccccgggcctgcccagggggagagcggagctccgcagccgggtcgggtcggggcccctcccgggaggagcgtggagcgcggcggcggcggcggcagcagaaatgatggaagaattgcatagcctggacccacgacggcaggaattattggaggccaggtttactggagtaggtgttagtaagggaccacttaatagtgagtcttccaaccagagcttgtgcagcgtcggatccttgagtgataaagaagtagagactcccgagaaaaagcagaatgaccagcgaaatcggaaaagaaaagctgaaccatatgaaactagccaagggaaaggcactcctaggggacataaaattagtgattactttgagtttgctgggggaagcgcgccaggaaccagccctggcagaagtgttccaccagttgcacgatcctcaccgcaacattccttatccaatcccttaccgcgacgagtagaacagcccctctatggtttagatggcagtgctgcaaaggaggcaacggaggagcagtctgctctgccaaccctcatgtcagtgatgctagcaaaacctcggcttgacacagagcagctggcgcaaaggggagctggcctctgcttcacttttgtttcagctcagcaaaacagtccctcatctacgggatctggcaacacagagcattcctgcagctcccaaaaacagatctccatccagcacagacagacccagtccgacctcacaatagaaaaaatatctgcactagaaaacagtaagaattctgacttagagaagaaggagggaagaatagatgatttattaagagccaactgtgatttgagacggcagattgatgaacagcaaaagatgctagagaaatacaaggaacgattaaatagatgtgtgacaatgagcaagaaactccttatagaaaagtcaaaacaagagaagatggcgtgtagagataagagcatgcaagaccgcttgagactgggccactttactactgtccgacacggagcctcatttactgaacagtggacagatggttatgcttttcagaatcttatcaagcaacaggaaaggataaattcacagagggaagagatagaaagacaacggaaaatgttagcaaagcggaaacctcctgccatgggtcaggcccctcctgcaaccaatgagcagaaacagcggaaaagcaagaccaatggagctgaaaatgaaacgttaacgttagcagaataccatgaacaagaagaaatcttcaaactcagattaggtcatcttaaaaaggaggaagcagagatccaggcagagctggagagactagaaagggttagaaatctacatatcagggaactaaaaaggatacataatgaagataattcacaatttaaagatcatccaacgctaaatgacagatatttgttgttacatcttttgggtagaggaggtttcagtgaagtttacaaggcatttgatctaacagagcaaagatacgtagctgtgaaaattcaccagttaaataaaaactggagagatgagaaaaaggagaattaccacaagcatgcatgtagggaataccggattcataaagagctggatcatcccagaatagttaagctgtatgattacttttcactggatactgactcgttttgtacagtattagaatactgtgagggaaatgatctggacttctacctgaaacagcacaaattaatgtcggagaaagaggcccggtccattatcatgcagattgtgaatgctttaaagtacttaaatgaaataaaacctcccatcatacactatgacctcaaaccaggtaatattcttttagtaaatggtacagcgtgtggagagataaaaattacagattttggtctttcgaagatcatggatgatgatagctacaattcagtggatggcatggagctaacatcacaaggtgctggtacttattggtatttaccaccggagtgttttgtggttgggaaagaaccaccaaagatctcaaataaagttgatgtgtggtcggtgggtgtgatcttctatcagtgtctttatggaaggaagccttttggccataaccagtctcagcaagacatcctacaagagaatacgattcttaaagctactgaagtgcagttcccgccaaagccagtagtaacacctgaagcaaaggcgtttattcgacgatgcttggcctaccgaaaggaggaccgcattgatgtccagcagctggcctgtgatccctacttgttgcctcacatccgaaagtcagtctctacaagtagccctgctggagctgctattgcatcaacctctggggcgtccaataacagttcttctaattgagactgactccaaggccacaaactgttcaacacacacaaagtggacaaatggcgttcagcagcgggtttggaacatagcgaatccgaatggatctgatgaaacctgtaccaggtgcttttattttcttgcttttttcccatccatagagcatgacagcatcgattctcattgaggagaaaccttgggcagctccggccaggccttgtaggaaaaggccccgcccgaggttccagcgtcaacggccactgtgtgtggctgctctgagtgaggaaaaaattaaaaagaaaaactggttccatgtactgtgaacttgaaaacttgcagactcaggggggtccctgatgcagtgcttcagatgaagaatgtggacttgaaaatacagactgggctagtccagtgtctatatttaaacttgttcttttcttttaataaagtttaggtaacatctcctgaaaagcttgtagcacaaaggctcagctggggatggtgtttgacttcggaggaaaaaagttgctattgcccgttaaaggcactagagttagtgttttatccctaaataatttcaatttttaaaaacatgcagcttccctctccccttttttatttttgaaagaatacatttggtcataaagtgaaacccgtattagcaagtacgtggcaatgttcattccaatcagatgcagctttctcctccgtctggtctcctgtttgcaattgcttccctcatctcagtagggaaaaaattgagtgggagtactgagatgtgtgggtttttgccattggacaaagaatgaggttagaagactgcagcttggagtctctctaggttttcaactatttcttcacaatttgaacacttgacggttgtcccttttaatttatttgaagtgctatttttttaaataaaggttcatctgtccatgcagtcctcttggattctctgaatgtagtaactatgaagctatgccaaaggtaggcagaaaatgggcttgggagccagacactccagggatcagtagttcctacccatagtctttgtgtgcttgctaaatggtgtacatttcttgttaaccacgttattaaaacttgatcagcacataa

SEQ ID NO: 41456 - DNA, 3964 bp, Homo sapiens
ccgggcggggggttgcggcgctcaggagaggccccggctccgccccgggcctgcccagggggagagcggagctccgcagccgggtcgggtcggggcccctcccgggaggagcgtggagcgcggcggcggcggcggcagcagaaatgatggaagaattgcatagcctggacccacgacggcaggaattattggaggccaggtttactggagtaggtgttagtaagggaccacttaatagtgagtcttccaaccagagcttgtgcagcgtcggatccttgagtgataaagaagtagagactcccgagaaaaagcagaatgaccagcgaaatcggaaaagaaaagctgaaccatatgaaactagccaagggaaaggcactcctaggggacataaaattagtgattactttgagtttgctgggggaagcgcgccaggaaccagccctggcagaagtgttccaccagttgcacgatcctcaccgcaacattccttatccaatcccttaccgcgacgagtagaacagcccctctatggtttagatggcagtgctgcaaaggaggcaacggaggagcagtctgctctgccaaccctcatgtcagtgatgctagcaaaacctcggcttgacacagagcagctggcgcaaaggggagctggcctctgcttcacttttgtttcagctcagcaaaacagtccctcatctacgggatctggcaacacagagcattcctgcagctcccaaaaacagatctccatccagcacagacagacccagtccgacctcacaatagaaaaaatatctgcactagaaaacagtaagaattctgacttagagaagaaggagggaagaatagatgatttattaagagccaactgtgatttgagacggcagattgatgaacagcaaaagatgctagagaaatacaaggaacgattaaatagatgtgtgacaatgagcaagaaactccttatagaaaagtcaaaacaagagaagatggcgtgtagagataagagcatgcaagaccgcttgagactgggccactttactactgtccgacacggagcctcatttactgaacagtggacagatggttatgcttttcagaatcttatcaagcaacaggaaaggataaattcacagagggaagagatagaaagacaacggaaaatgttagcaaagcggaaacctcctgccatgggtcaggcccctcctgcaaccaatgagcagaaacagcggaaaagcaagaccaatggagctgaaaatgaaacgttaacgttagcagaataccatgaacaagaagaaatcttcaaactcagattaggtcatcttaaaaaggaggaagcagagatccaggcagagctggagagactagaaagggttagaaatctacatatcagggaactaaaaaggatacataatgaagataattcacaatttaaagatcatccaacgctaaatgacagatatttgttgttacatcttttgggtagaggaggtttcagtgaagtttacaaggcatttgatctaacagagcaaagatacgtagctgtgaaaattcaccagttaaataaaaactggagagatgagaaaaaggagaattaccacaagcatgcatgtagggaataccggattcataaagagctggatcatcccagaatagttaagctgtatgattacttttcactggatactgactcgttttgtacagtattagaatactgtgagggaaatgatctggacttctacctgaaacagcacaaattaatgtcggagaaagaggcccggtccattatcatgcagattgtgaatgctttaaagtacttaaatgaaataaaacctcccatcatacactatgacctcaaaccaggtaatattcttttagtaaatggtacagcgtgtggagagataaaaattacagattttggtctttcgaagatcatggatgatgatagctacaattcagtggatggcatggagctaacatcacaaggtgctggtacttattggtatttaccaccggagtgttttgtggttgggaaagaaccaccaaagatctcaaataaagttgatgtgtggtcggtgggtgtgatcttctatcagtgtctttatggaaggaagccttttggccataaccagtctcagcaagacatcctacaagagaatacgattcttaaagctactgaagtgcagttcccgccaaagccagtagtaacacctgaagcaaaggcgtttattcgacgatgcttggcctaccgaaaggaggaccgcattgatgtccagcagctggcctgtgatccctacttgttgcctcacatccgaaagtcagtctctacaagtagccctgctggagctgctattgcatcaacctctggggcgtccaataacagttcttctaattgagactgactccaaggccacaaactgttcaacacacacaaagtggacaaatggcgttcagcagcgggtttggaacatagcgaatccgaatggatctgatgaaacctgtaccaggtgcttttattttcttgcttttttcccatccatagagcatgacagcatcgattctcattgaggagaaaccttgggcagctccggccaggccttgtaggaaaaggccccgcccgaggttccagcgtcaacggccactgtgtgtggctgctctgagtgaggaaaaaattaaaaagaaaaactggttccatgtactgtgaacttgaaaacttgcagactcaggggggtccctgatgcagtgcttcagatgaagaatgtggacttgaaaatacagactgggctagtccagtgtctatatttaaacttgttcttttcttttaataaagtttaggtaacatctcctgaaaagcttgtagcacaaaggctcagctggggatggtgtttgacttcggaggaaaaaagttgctattgcccgttaaaggcactagagttagtgttttatccctaaataatttcaatttttaaaaacatgcagcttccctctccccttttttatttttgaaagaatacatttggtcataaagtgaaacccgtattagcaagtacgtggcaatgttcattccaatcagatgcagctttctcctccgtctggtctcctgtttgcaattgcttccctcatctcagtagggaaaaaattgagtgggagtactgagatgtgtgggtttttgccattggacaaagaatgaggttagaagactgcagcttggagtctctctaggttttcaactatttcttcacaatttgaacacttgacggttgtcccttttaatttatttgaagtgctatttttttaaataaaggttcatctgtccatgcagtcctcttggattctctgaatgtagtaactatgaagctatgccaaaggtaggcagaaaatgggcttgggagccagacactccagggatcagtagttcctacccatagtctttgtgtgcttgctaaatggtgtacatttcttgttaaccacgttattaaaacttgatcagcacataagctttcttctgttagatcttttggcagcaaacaaccttccccccaaacctctgaattttgtgggtgtgtggtggtgtgtgtctgtgtgtgcatgtacacacacactttgtctagctcactttaaaagattcatcaaatggaattttaaaaataatctgaaaagaaatagatatttcaggccgggcctggtggttcatgcctgtaatcccagcactttgggaggccgaggtgggtggatcacgaggtcgggagttcgagatcagtctggtcaacatggtgaaacgccatctctactaaaaatataaaaattagcctggcgtggtggcgtgtgcctctagtcccagctacccgggaggctgaggcaggagaatttctggaacccaggaggcggaggttgcagtgagccgagatggcaccactgcaatccagcctaggcaacagaatgagactctgtctcagaaaaaaaa

SEQ ID NO: 41457 - DNA, 1133 bp, Homo sapiens
ggtgtctagaggatcccaacaaatgaagcacatggcgtttattcgacgatgcttggcctaccgaaaggaggaccgcattgatgtccagcagctggcctgtgatccctacttgttgcctcacatccgaaagtcagtctctacaagtagccctgctggagctgctattgcatcaacctctggggcgtccaataacagttcttctaattgagactgactccaaggccacaaactgttcaacacacacaaagtggacaaatggcgttcagcagcgggtttggaacatagcgaatccgaatggatctgatgaaacctgtaccaggtgcttttattttcttgcttttttcccatccatagagcatgacagcatcgattctcattgaggagaaaccttgggcagctccggccaggccttgtaggaaaaggccccgcccgaggttccagcgtcaacggccactgtgtgtggctgctctgagtgaggaaaaaattaaaaagaaaaactggttccatgtactgtgaacttgaaaacttgcagactcaggggggtccctgatgcagtgcttcagatgaagaatgtggacttgaaaatacagactgggctagtccagtgtctatatttaaacttgttcttttcttttaataaagtttaggtaacatctcctgaaaagcttgtagcacaaaggctcagctggggatggtgtttgacttcggaggaaaaaagttgctattgcccgttaaaggcactagagttagtgttttatccctaaataatttcaatttttaaaaacatgcagcttccctctccccttttttatttttgaaagaatacatttggtcataaagtgaaacccgtattagcaagtacgtggcaatgttcattccaatcagatgcagctttctcctccgtctggtctcctgtttgcaattgcttccctcatctcagtagggaaaaaattgagtgggagtactgagatgtgtgggtttttgccattggacaaagaatgaggttagaagactgcagcttggagtctctctaggttttcaactatttcttcacaatttgaacacttgacggttgtcccttttaatttatttgaagtgctatttttttaaataaaggttcatctgtccatgca

SEQ ID NO: 41458 - DNA, 970 bp, Homo sapiens
ggtcgcccacgcgtccgcggacgcgtgggcagttcttctaattgagactgactccaaggccacaaactgttcaacacacacaaagtggacaaatggcgttcagcagcgggtttggaacatagcgaatccgaatggatctgatgaaacctgtaccaggtgcttttattttcttgcttttttcccatccatagagcatgacagcatcgattctcattgaggagaaaccttgggcagctccggccaggccttgtaggaaaaggccccgcccgaggttccagcgtcaacggccactgtgtgtggctgctctgagtgaggaaaaaattaaaaagaaaaactggttccatgtactgtgaacttgaaaacttgcagactcaggggggtccctgatgcagtgcttcagatgaagaatgtggacttgaaaatacagactgggctagtccagtgtctatatttaaacttgttcttttcttttaataaagtttaggtaacatctcctgaaaagcttgtagcacaaaggctcagctggggatggtgtttgacttcggaggaaaaaagttgctattgcccgttaaaggcactagagttagtgttttatccctaaataatttcaatttttaaaaacatgcagcttccctctccccttttttatttttgaaagaatacatttggtcataaagtgaaacccgtattagcaagtacgtggcaatgttcattccaatcagatgcagctttctcctccgtctggtctcctgtttgcaattgcttccctcatctcagtagggaaaaaattgagtgggagtactgagatgtgtgggtttttgccattggacaaagaatgaggttagaagactgcagcttggagtctctctaggttttcaactatttcttcacaatttgaacacttgacggttgtcccttttaatttatttgaagtgctatttttttaaataaaggttcatctgtccatgca

SEQ ID NO: 41459 - DNA, 444 bp, Homo sapiens
actatatcttggggcactttattatacagccacagtaactggaaaacttaactgccagaacgtctcaaatgaagtgttgggactggtttggggcatgcagcgattcatgtgtgaccaacaacactaaagttacagggctgaagtttgagaattttaaaaaaatgatggtaaattcagagtcagctcttcccactcccttccattccagaatgcttctttgagcaggagagacaggggttgcagccagttcgtgcacccataattttgcctaatcccagcacttgcttggcagaagcggcccttcatctcgtgtgccctggtgggaaagtagtgagtactgacagtttagaccctcaccagcccacacctggatggtgttgccagctttcttcctcactccttgtctctatttttatttttatttatttttttaagactaaggtc

SEQ ID NO: 41460 - DNA, 470 bp, Homo sapiens
agaaaaaatattaaatgatcgtaaagaaactgtgtctgtagggccagagagatgatgtaagaatcaaaattctcccagctaaaggaaatataactacaatccataaagtctaaaacttgaatttaactgctggtctcaaatatttccttcctaactcaaagtttaagaaagtcaacagcaaaatgattattgttggctgggcacggtgactcacacctgtaaccccaacactttgggaggccaaggagggcagatcacttgaggtaaggagcttaaaaccagttctggccaacatggcaaaatcctgtctctactcaaaatgccgggcatggtggcacatgcctgtagtccctgctacttgggaggctaaggcacgagaattgcttgaacccgtggggagaaggctgcagtgagctaagattgtgccactgtacttcagcctgggcaacagagcaagactctgtttcaaa

SEQ ID NO: 41461 - DNA, 870 bp, Homo sapiens
atagacaaaacagtcttctattggaaaaagatgctatctgggactttcttttttaaatttaattatttttttaagagacagtggcatgatcatagcacagtgtaaccttatactctggctaaagcaatcctcctgcccccccgagtagctagaactgcagatgcacacccaccacacccggctaactttataaaaacaatttttgtagagaggggggtcttggtatgttgcccaggctggtcttgaattcctggttcaagtggtcctcccatcttggcctcctgagtagttgggattacaagtacgtagtagccactatggccagcctgccatctaggactttcatagctagaggggagtagtcaatgtctggcttcaaaggacaggctgacactcttgttaggggctaaggcagctggtgactttaagttgaagcccgtgctcatttaccattccaaaaaccctagggaccttaagaattatgcaaaatatactttgcctgtgctttataagtggaacaacaaagcttagatgacagcacatctgtttatggcatgatttattgaatattttgaggccactgttgagacctcttgctcacaaaaaaagatttcttttaaaatatcactgtccattgacaatgaacctagacacctgagagctctgatggaaatgtacaaggagattaatgttttcatacctgccaacacagcgtctgttctgcagcctgtggatcaagaagtcatttcaacttatgagtcttattatttaagaaatatatttagttatttagtaaagctatagctgacatactttcttgagatggaatctactcctggtgaagatgctgtgaacatttgaaatgacagg

SEQ ID NO: 41462 - DNA, 600 bp, Homo sapiens
ggcttttgattttcacaggacaaatgtagcccagccatctggagcccgtttttctccaaaccagggcttcctccttctctcttgcagatttcaactggggctcaccattttctgcctcttcctcctccagttttaaagagacaccatatccttctctgctgggaccaacttcccatgtactgctgccctgcacctgtgaaaacagctgctgtgttttctgtcataaaaatagctgccttttggcagagaagcacacaacggtactacgtttctgagccttaatgcagtgctcaattatttaggtgtgcttcacctgagatacacagagcatcttggaactcctactaagcagggcttctacaggcattgctcagctcagtacaaggttttcctttctctgcttttgtgattaccaggcagaaaccttaaaatgtatgaacttacaaagaaattaaattgtgccaaattagattcccagcccctagagataaccactaattaaagttccgctggagcgttttgcctgtattttgtatataaacgtggattttgtatttgtatgtaaataaaggtaggaccctgctgtccataaaaaaaaaa

SEQ ID NO: 41463 - DNA, 444 bp, Homo sapiens
gccctcattcttcaagtaagtcagggcagctcaacttttgtcaactttcgtatcagtgttttacttctgacttctcttgaaaaatagcttgctgttgttaaaagaagaaaaggtatgatgaatattccaacttattaaggtcccttcaagctcttgactgctgagagtccataaacatttcttgggcctgttcattagggccaactccctaagtccttgtcccaccctgagaaggggcaggggagaaacacccagcatctgtggtttcattgttaaatagatggtaggtaagtaagcaggagagtggattttgaactttttcagggtacagcactgcagatggaggaggactagattcagggaattcctgcgattggcatagaggttttcctccagatattagcctaagttatcaaagatgtagtcacagacaacagccctgaa

SEQ ID NO: 41464 - DNA, 391 bp, Homo sapiens
ccttacttggcctagaattgtctttattgaactaaaattagtttaacaccatgtgccaaatttgaaggattttaaaagatctaggatgcctgtattatgaaacggtattgaccttactgtttactaagttgcaccattttatttttatgagaatttatcgaaggttattttcagtgactctgtaataggagttgttgtatctcttcctcatccaaaatggtttttgtattataaacaatcagaatcatgtccctaattttctcccattttccttgagcaaccagaaaccccagagtgaaattagtgacagacgtgtctggtatgtataccactctctctaacatgagctacataataccaaaaatcattattatcatttttattatcacta

SEQ ID NO: 41465 - DNA, 359 bp, Homo sapiens
attgccttctttctgattccctattctatccactctactacagaatctttaaaagaatttatcatactgggcatgatggctcatgcctataattgcagtgctttgggaggctgagtcaggaggatcacttgatgccaaagagttcaagaacagcgtgggcaacatggcaagacctcgtttctaccaaaaaaaaaaaaagttttttaaattaaaaaattagttgggcatggtggcatgtgcttgtagtcccagatactcaggaagttgaggcaggaggactgcttgagcccaagagttagcatgagctatgattgcgccattatactccagcctggaaaacagagggaaaccctgtctct

SEQ ID NO: 41466 - DNA, 312 bp, Homo sapiens
gtgggccaccaacattttctgccttttcatttgtttcttcccttccacatatgggatcaacagccaggcttatagtataccagaagtatcccaaaatgctgtctccacattgcaggggcttttctccatacactggaaattttccacagacttgcagggagccatggatgcctccaggacttaggaacatcctttcattgttggcccccaaagcctcagttagcaggagggaagtttaaagctgggtaggaagactgggaaggtctggagtgagtggcttagaaaagctctacagcaaggattaagaaaagc

SEQ ID NO: 41467 - DNA, 422 bp, Homo sapiens
gacttctccccagtcctgtggtctcagacagacatgtacataatcatgaatagttttacaacttaaagcgcaggtaagatggcaccagatggactggggacactcccaaactcacatttgatgggggaagggttaatacctgccccccttaatagactcctttatccccaccaaaaagacagcagaaatctctttaatacacttttggtggcagtgcagggaaagcctgtgttctaggtcaaagaaggaatggtcaggtgtcactatgcagagaatttgagagctggacaggcccatggagcacatcaaatgcaatacccccatttcacagataaggaaactgaggcacagggaatacagctagttactggaagagcccaagccagtgtcagaaccagtacttgtgggctgggcacaacagc

SEQ ID NO: 41468 - DNA, 365 bp, Homo sapiens
ctgtaccacattttatttacaaaaaaaaaaaatgtttttaaagaagcaatactagctcctggataaaggttgggttgagcagttacacagactacaatgctgccttcactaatctttagctgtgaaaaaggaagagaaaaacatgccattttgtttgctgatttgcacttgaaccccagcaaaatgtcatggtcctaaccctctggtgtaacctgtctggagcaatagcatggtttatttttagaatctgagtgacattttctgtttggtaatctgtctaatttcagatggagctatagatatggatatagataaaatttggcattttcaaacttgtactttcaaagaccttagaaccaaatgtc

SEQ ID NO: 41469 - DNA, 473 bp, Homo sapiens
aacaaacaaacaaaaaaacatgtccctcaagtgccttcgcttttcagcaccatgcccagtccataccacaatgtgcatttgggtgactgtggggtcaccctcaccccaccacacacacatgaccctgagcaccattaggacagtaatctgggctgttttgctccctgtggtatccctagtagccatacacaggaggagctgaatcaaagcatgctggatgagccatagctgaggaaagaaggccgggcacctgccctgattatgggcagggggccacataccctggtttgcttggggaggccatgttcacttgtctttcccacataataataatggtgccctgttcactctcaaatgtcccaatttggtgacatatgatcaatgtagttattggaaaggagaaggggttagccccgagcttctgctctttcccagccccacactggtttcccacttgcccccaacaagcacaa

SEQ ID NO: 41470 - DNA, 638 bp, Homo sapiens
ccttgtttgcgaagattcctgggaacccttaaggggaagactcaagaaaaataaagatacccagggtaattccaaaccagacttgaaagcagaaactgaaagcagagaaaaccactacatttaagatggtggcttaacgatagcagtggaaaagaaacagcatgcattgggcatagatatcacattcttccaagaacttcgttggaggacagtttctccgtgggactctcactttctgaacatcttgcaattagagacgctgacttcttttgttctgaaatatattttcaaggattctgcatggaaagtagccctgaaatacacagaatgtaccttctttgaggcactgacttcttttgctttgaaatatctttttcaaggattctgcatagaaagtagccttgaaagatacagaatttacctccagcaacagggtaggcatgcttactgtgcattgtaatggatttcagttccctggtttcagagttcttctcttgtcatgtggctcatgtgcaggtgtcacctggccttcttcacatcaccctgtggaaaatggggctcaaggaactgccacaaaaaattgatactctgcctattgctgtcaatctgagtaataaaattctttgtttccaacccag

SEQ ID NO: 41471 - DNA, 666 bp, Homo sapiens
gctggtcacacacattttaaccacccatctttgctacaagggaaaaaggccaaaccttgtgtgggtgaagaggcagactcaaatgctcccgatgcagaggaacgaggcggctaccactcaatcaccaattaccatttgcatgctacccaacctggacctttccagggcatactggaccactccccacttccttggggtgcaatgaattgcagacagtttaatccatgggcttttgctgattctgttttctctgcttggaatgcccttctacacagaggaagtctttcaagacccaggtcaaaggttagctctcctgtgaacacttgttccttttctatctggtataagcagccattttaactatcgttaaaggtcagggtttcttaacttgggtctgcgggtcattatgaataagttttagagggacatgtctgtatctatgtccacatatgttactctggaggccagggtcagagattccagattctcagattcggtgacctcaaaaaaaggtctcttttggccaggcacagtggctcatgcctgtaatcccagcactttgggagggtgaggcaggaggatggcttgagctcacaagttcaagaccagtctgggcaacatagcaaggtatcgtctctaaaaaaataataaaaaattttaaaaagc

SEQ ID NO: 41472 - DNA, 527 bp, Homo sapiens
gaacaacttacatcctttttaattttctctctttgcttaagatttggagatgctaagatacataggcatggaagataaagttaatggttgaaaactgaaacaatcttttcctggaaatttgagctgtagtggataggcaaactattatgtgacaatgtccacaaaacatatgcttttatattagttcagctgttccttctagatacataaatggaaaatagttaatatttgaaaattataatccttatctaaaagtcgaactatacagatagacaaattatatgttttaggaacaattgaactgcttcttcttggtaagcaactactcttgagttcaggtggagtattccttcaggaatcatcttggttatactgtattaaagatgctagctttaagatgagatgtggataactttattccttccattatccccactctctcctggagcttccatcaatgaccttcactaactctccagggatatcttcacttctgttttcaaacatgacagctctcttctatctgg

SEQ ID NO: 41473 - DNA, 2619 bp, Homo sapiens
atgcttggaaacacttgccatactcaaaaaacattgcttatttcctttttcgtcagccggctggaggagcatcggtccgggaggtctctgggctgaggcggcgacagctcctctagttccaccatgtccgcgggcggagacttcgggaatccgctgaggaaattcaagctggtgttcttggaggatggaacaatcgggcttcggctgtgggatacggcgggtcaggaacgtctccgtagcctcattcccaggtacatccgtgattctgctgcagctgtagtagtttacgatatcacaaatgttaactcattccagcaaactacaaagtggattgatgatgtcagaacagaaagaggaagtgatgttatcatcacgctagtaggaaatagaacagatcttgctgacaagaggcaagtgtcagttgaggagggagagaggaaagccaaagggctgaatgttacgtttattgaaactagggcaaaaactggatacaatgtaaagcagctctttcgacgtgtagcagcagctttgccgggaatggaaagcacacaggacggaagcagagaagacatgagtgacataaaactggaaaagcctcaggagcaaacagtcagcgaagggggttgttcctgctactctcccatgtcatcttcaacccttcctcagaagcccccttactctttcattgactgcagtgtgaatattggcttgaaccttttcccttcattaataacgttttgcaattcatcattgctgcctgtctcgtggaggtgatctattagcttcacaagcacaaaaaaagtcagcgtcttcattatttatattttacaaaaagccaaattatttcagcatattccggtgataactttaaaaattagatacattttcttaacatttttttcttttttaatgttatgataatgtacttcaaaatgatggaaatctcaacagtatgagtatggcttggttaacgagcagtatgttcacagcctgctttatctctccttgctcttctcacctctcccttaccccgttccctatttccgtgttcttacctagcctccccccacttcctcaaaacaaacaagagatggcaaagcagcagtccgaccaagcccactggaattatcctttaattttacagataccacttgctgtaggctgtggaccaagatgtccagaattattcttgagcactgatgtaaattacttagatcttctttgaggtcagaattcagcgatcacggtaggcagtgcttgaatgagaaaagcctcctggtgcatcttcaaaatgagtcctaaagaacatactgagtacttataagtagcagaacataaaatgtatttctgactaacacaaatggtcctttcacatgtgctttattagactctgggagagaaaagtaaccaagtgcttcagaacaggtttttagtatttacttcttcatggtaagataatgaagttctaatgaactatttctcccaaggttttaaaattgtcaagagttattctgtttgtttaaaaagtaagaaacctctgtaagcaatagattttgcttgggttttctttcttaaaaaaataatactatgcaggcaagacaccataaaagtttaattccttacagaagaaccagtggaagaatttaaatttggcactacgatcaaaactactgaattagcagaaataacgatatctaaagcttaccagcaaaagaaccctcagcagaatagcaaaaactttgctcaggacatttgaggtcaaattgaagacggaagacggaaaccggaaaccgttttcttgtaagcccctagaggcagatcaggtaaagcatacatagtagagggaaaggagagaatggaaataaaactgaatattatgcagatttatgccttattttttagcattttttaaggttgggtctttcaggctggttttggtttgtattagatctgtatagtttagtgatttagttttatatttaagctacgattaatattttttctttggcgatatttctttgctttttttttttaacaactttccatttttagatgtttcgttgaatctatttagagcttcaccatggcaatatgtatttcccttaaaacactgcaaacaaatatactaggagtgtgcccttttaatctttactagttattgtgagactgctgtgtaagctaataaacacatttgtaaaaacattgtttgcaggaagaaaacttcgagttacaggtcaggaaaagcctgctgaatttatgttgtaaacgttacttaacacagtataaagatgaaaagacaacaaaagtatcttcatacttcctcatcccctcattgcaacaaaaccttaaactgggagaaccttagtcccctctctttcctcttcctcctccacttcccacttattgccactttgtaatattcagagagcacttggattatggatctgaatagagaaatgcttacagataatcattagcccacataccagtaacttatacttaaagatgggatggagttataaagtgcttttataatccaatataattgctaaaggcaagggttgactctttgttttattttgacatggcatgtcctgaaataaatattggttcactatg

SEQ ID NO: 41474 - DNA, 3065 bp, Homo sapiens
ggggcactcagcaggttgggctgcggcggcggcggctggggaagccgaagcgccgcgcgtgagagatcccggatacatctgcggtttgggctccgccaccctccgtctctctcccgcaggtctctgagccgggtgcggaaggagggaacggccctagccttgggaagccaaagcacacccctggctcccgccgacaccgccctccttcccttcccagccgcgggcctcgctccgtgctcggctactctgccgggaggcggcggcggctgccagtctgtggcgagccctgctgccctccagccgggcttctccagccgggctcctccaccggcccttgcaggggcacagagagctcggcgcccgcccttccgctcgcctttttcgtcagccggctggaggagcatcggtccgggaggtctctgggctgaggcggcgacagctcctctagttccaccatgtccgcgggcggagacttcgggaatccgctgaggaaattcaagctggtgttcctgggggagcaaagcgttgcaaagacatctttgatcaccagattcaggtatgacagttttgacaacacctatcaggcaataattggcattgactttttatcaaaaactatgtacttggaggatggaacaatcgggcttcggctgtgggatacggcgggtcaggaacgtctccgtagcctcattcccaggtacatccgtgattctgctgcagctgtagtagtttacgatatcacaaatgttaactcattccagcaaactacaaagtggattgatgatgtcagaacagaaagaggaagtgatgttatcatcacgctagtaggaaatagaacagatcttgctgacaagaggcaagtgtcagttgaggagggagagaggaaagccaaagggctgaatgttacgtttattgaaactagggcaaaaactggatacaatgtaaagcagctctttcgacgtgtagcagcagctttgccgggaatggaaagcacacaggacggaagcagagaagacatgagtgacataaaactggaaaagcctcaggagcaaacagtcagcgaagggggttgttcctgctactctcccatgtcatcttcaacccttcctcagaagcccccttactctttcattgactgcagtgtgaatattggcttgaaccttttcccttcattaataacgttttgcaattcatcattgctgcctgtctcgtggaggtgatctattagcttcacaagcacaaaaaaagtcagcgtcttcattatttatattttacaaaaagccaaattatttcagcatattccggtgataactttaaaaattagatacattttcttaacatttttttcttttttaatgttatgataatgtacttcaaaatgatggaaatctcaacagtatgagtatggcttggttaacgagcagtatgttcacagcctgctttatctctccttgctcttctcacctctcccttaccccgttccctatttccgtgttcttacctagcctccccccacttcctcaaaacaaacaagagatggcaaagcagcagtccgaccaagcccactggaattatcctttaattttacagataccacttgctgtaggctgtggaccaagatgtccagaattattcttgagcactgatgtaaattacttagatcttctttgaggtcagaattcagcgatcacggtaggcagtgcttgaatgagaaaagcctcctggtgcatcttcaaaatgagtcctaaagaacatactgagtacttataagtagcagaacataaaatgtatttctgactaacacaaatggtcctttcacatgtgctttattagactctgggagagaaaagtaaccaagtgcttcagaacaggtttttagtatttacttcttcatggtaagataatgaagttctaatgaactatttctcccaaggttttaaaattgtcaagagttattctgtttgtttaaaaagtaagaaacctctgtaagcaatagattttgcttgggttttctttcttaaaaaaataatactatgcaggcaagacaccataaaagtttaattccttacagaagaaccagtggaagaatttaaatttggcactacgatcaaaactactgaattagcagaaataacgatatctaaagcttaccagcaaaagaaccctcagcagaatagcaaaaactttgctcaggacatttgaggtcaaattgaagacggaagacggaaaccggaaaccgttttcttgtaagcccctagaggcagatcaggtaaagcatacatagtagagggaaaggagagaatggaaataaaactgaatattatgcagatttatgccttattttttagcattttttaaggttgggtctttcaggctggttttggtttgtattagatctgtatagtttagtgatttagttttatatttaagctacgattaatattttttctttggcgatatttctttgctttttttttttaacaactttccatttttagatgtttcgttgaatctatttagagcttcaccatggcaatatgtatttcccttaaaacactgcaaacaaatatactaggagtgtgcccttttaatctttactagttattgtgagactgctgtgtaagctaataaacacatttgtaaaaacattgtttgcaggaagaaaacttcgagttacaggtcaggaaaagcctgctgaatttatgttgtaaacgttacttaacacagtataaagatgaaaagacaacaaaagtatcttcatacttcctcatcccctcattgcaacaaaaccttaaactgggagaaccttagtcccctctctttcctcttcctcctccacttcccacttattgccactttgtaatattcagagagcacttggattatggatctgaatagagaaatgcttacagataatcattagcccacataccagtaacttatacttaaagatgggatggagttataaagtgcttttataatccaatataattgctaaaggcaagggttgactctttgttttattttgacatggcatgtcctgaaataaatattggttcactatg

SEQ ID NO: 41475 - DNA, 915 bp, Homo sapiens
gaacaaatgttgcaaacgaaaatcaccctgccaaagcaaatcatacagtttcacaaaagtagtaaatttggcactcgttcacaactgacagtgcagattattcagacaatgtgttctgtttttattgtttatgttaaattgttatcattatgtttcccataattacctagattgaacattagtacaacctacatttcaacggacttaagagtcttttatcatcttaaaatgaaagtgataaattaaaatttacccctaaagtgctactgctatttaacaccattagtctgtactgctctgtgttctagggcccctggatatttattcaggaatgtgaatcagcttcagtcctcttattgcgcccaaactctccaggagacaggcaggagggggatgatggtactgagagagtatgtgtcccagagcttgtcaggacacagtggcagaattgctctcatcctcttctacttctctgtcctgcagattcctgcaggtttatgttgattggcatggcataaggatattaccatcagacattctctgaagaatatcagaaagcagatatttagtagatacggtattttatctagtatgaattgtgcagtttgaagatgtctgttaatgactagccctatcagattttttgagccatttcccagcatttctatgcttaatgtaaatatttgttgcatggacttggatgctttaatttaagaggatttcagatgtcagcctccagttattatgatatttttagtttacatcttttttggggggtggggtggctgggtatatttgaaaagagacagctggataaaggctgtatagccaagttaatgtatacagaacttcttcggtgaagatttgattgtgattgagtctctaaacacatatacaattgtttctttggtaaaa

SEQ ID NO: 41476 - DNA, 496 bp, Homo sapiens
tatgtattacttatataattaaatgcaaattaattacattagtgaaagcaagtaaattataggtattgagaaatgaaggctgaggattgaatttataacaattttgaaatatatgaaaacattacagaatatagctacaggtaggataagaaggaatgaatattcacaatagctaaaagatggaaataacccaaatgttcattggtagaggaatggataaacaaaatatacaatagaatattactcagctttaaaaagcaaattgtgacacatgctacactgtggatgaaccttatagacattacaataagtaaaaaaagctaatcatgtggggtggggggaggggggagggatagcattggtagatatacctaatgctagatgacaagttagtaggtgcagcgcaccagcatggcacatgtatacatatgtaactaacctgcacattgtgcacatgtaccctaaaacttaaagtataataatgattaaaaaaaaa

SEQ ID NO: 41477 - DNA, 261 bp, Homo sapiens
taattaacaaggaagaactgcaaagccccaaatacaaccaaaaacaaaccatgtgctattttaaagcagagaagttacgtatgtatttctggatgaataaatctgggttctgggctctataggcaagcactacaaggtctatagaagattactgaggttgctcattgatatcccttttccttcgtaagttttgcacctgctaagtggaccaggtgagcagccttcatacagatggcctctttgcccactctgggctatcta

SEQ ID NO: 41478 - DNA, 783 bp, Homo sapiens
gttatttgtgacatagtgggtactccataaatattagtaattattagaaattgactaagatttacattgagtaagattattacattgaataagattttttttttaatcctgagcttcagttttcgcatctctaaataagaatctattcaatcaacagatacttatctggctcctggagctatacagcaaaagacctgtggctatagcagagcgtagaattcagggagttaataacacctacctgcagaatgtatgtgaaaatttaatgagacaatgtatagttgaagtacttgcttgttacacttcctgggcatactttattcactaaataaatgttaatttctttcctttctcctttttagttggtggaaaaaatcttaccctctttcttataaagtttaaatatacacttcaggaggctggcgtgggcagatcacttgaggttaggagtttgagaccagcccgggctaacacggggaaacctcgtctctccctaaaaatataaaaattagtcaggtgtggtgcaggcacttgtaatcccagctattcaggaggctgaggcaggagaatctcttgaacctgagaggtggaggttgcagtgagctgagatcgcaccactgccctccagcctgggcaactttcaataatataatagcttggctaatgggaaaatcatttgttttcttatcactttaatataaatggtatgtgttgatggtatgtgatttattacagcaatcacatacataatgccaaattattttgaattagattggtgttaca

SEQ ID NO: 41479 - DNA, 610 bp, Homo sapiens
aggctggcccaagaatagcctggacaatcacctgctggggacaccgggctgcccctcctccgcccacagcctcaggccacctgtctcatccgtgaccgagaaacggagctgcagtgggaggcgggacatgctgggatctacccatggccaggccaagctgcgccaatcactcaagcttcactttgatcacttgctctaccaaataaaacagaacaaaataacaccatgtcctcctttccacacactcccaagcctcccatcccacttcccggtgctgaccccatgagaacactttgtgcgtctttctaggtattttctatcctcctcaagcacagaaccgcacgcagagtgatttttttttttttaaacagaaatggcaccagggcagatgatgattttttgtaccatttcttgactttcttgggcattttccacaccaggacagatggaccctgctctccttcctccccgcccacagctacctcgcagcagccacacactgagccataaaccctagaacgaaactgcgtatctcaagatacacaacgtcctcactgacaaaacacaacctcctcactgttaaaacacaacatcttcagctgaaaaacac

SEQ ID NO: 41480 - DNA, 239 bp, Homo sapiens
gccttgcttgcctctgtccctctgctgtgcccctgagcattgtcagtgttggaggctggaaactgtcccatggccctctgtggttcagagtggccatgacccatcctggccttgacccatgggtttctcctggcatttacaggacctgaggatgggggcgtgaaggcatccccagtgcccagtgaccctgagaagccaggcaccccaggtgaagggatgcttagctctgacttagacag

SEQ ID NO: 41481 - DNA, 891 bp, Homo sapiens
ggagggccccgtcagccctgatgtggagcctggcaaagaggagaccgaggaaagcaaaaaacgcaagcgtaaaccatatcggcctggcattggtggtttcatggtgcgacagcggaaatcccacacacgcacgaaaaaggggcctgctgcacaggcggaggtgttgagtggggatgggcagcccgacgaggtgatacctgctgacctgcctgcagagggcgccgtggagcagagcttagctgaaggggatgagaagaagaagcaacagcggcgagggcgcaagaagagcaaactggaggacatgttccctgcttacttgcaggaagccttctttgggaaggagctgctggacctgagccgtaaggccctttttgcagttggggtgggccggccaagctttggactagggaccccaaaagccaagggagatggaggctcagaaaggaaggaactccccacatcgcagaaaggagatgatggtccagatattgcagatgaagaatcccgtggcctcgagggcaaagccgatacaccaggacctgaggatgggggcgtgaaggcatccccagtgcccagtgaccctgagaagccaggcaccccaggtgaagggatgcttagctctgacttagacaggatttccacagaagaactgcccaagatggaatccaaggacctgcagcagctcttcaaggatgttctgggctctgaacgagaacagcatctgggttgtggaacccctggcctagaaggcagccgtacgccactgcagaggccctttcttcaaggtggactccctttgggcaatctgccctccagcagcccaatggactcctacccaggcctctgccagtccccgttcctggattctagggagcgcgggggcttctttag

SEQ ID NO: 41482 - DNA, 757 bp, Homo sapiens
ttataatgagaaaaccacatataaaaaagtaagaaatagacatagagcaacatgtggtctagctagctccatctcagtgcaacaggtcagagggagacattgggaaaagcttgtgctttagatgaagaggttgactcattgggaaagggctggcatgaggctatacactcctgagtctctgggcactgcttattgcatctcccattgagtcttgctgagtgaatgtatgcaataaattatgtagttgcatacccacattgtcttacctgttttgcaagttggtttcacttgctaaaaggaacctcaactcagatagaagctcacactgttttattgcctggcatcgaagccatctaggcaggctgcgactgagacttgtttctatccttaattttgttcatgaggttgggcccatacctggagttgggagcaagagcattgattaattttcttctctttggagggttagttcagttgaaaagcttgagaagtacagggggtatgttccttactaaaatggatgaattaaataataaagctagaagtaatatttttccttttgtctattttccaaattgactcgatattgatggctacttttgtaagtttttatttaagtttaaagggaatatttattgatcacctctatgtgctcagtactgcactaggcagagatggagtaagaaagaactggaggctacatttcttgtcttaaaggagttaacaatcttgttgaagcaatgagacaaaaaaaaaa

SEQ ID NO: 41483 - DNA, 319 bp, Homo sapiens
ttttgttctatcaacatgataaattatcttcttcctttagcaaaaggctgtaagaaacagtatctcttcctccagaacacatattcaaatcccggaggagaaaaaacatcctgagaatataagacagctataaaaagctcctgaagccagccctttctttcagctcccagtcttctcttgaattaccaatttttggggctaggcataatagttcacacctgtaatcccagcactttgggaggctgaggcgggcagatggcttgagcacaggagttcgagacctacctaggcaacatggcgaaaccccgtctctaccaaa

SEQ ID NO: 41484 - DNA, 401 bp, Homo sapiens
atagagattggagtttacttaaagaatcaaaggaagctgtgtgggaaggtatctttgtttaacatctgtctgccatttaccaccatttgtaccccacagggagaaaggagaggctgcctcagagctaaatttaagttgcaagggtataagcagcacttttaaaggaagacagataacagcttcctgtctgggaaagattactgaaaaggaaactttgattcaacatttccttactcttttggtgagaatgattcctactccctacataaagtccagggaggagctatttgtagctagttaagtaagatgttttaagtcctcataagtcttttcttcaaagtaaatatttattctcttcaaaagccaactagtgtttaaaatcttcgcttcttttattttct

SEQ ID NO: 41485 - DNA, 381 bp, Homo sapiens
tgagatggagtgtcactccattgcccaggctagaatgcaatggcgcgttattggctcactgcaaactccacctcctaggttcaagtgattctcttgtcgcagtctcctgagtagctgggatcacaggcacacgtcaccatgcccggctacttttttgtatttttagcagagatgaagttttaccaggttggtcaggctggtctcaaactcctgacctcaagtgatccacccgcctcggcctcccaaagtgctgagattacaggcatgagccaccataccaggcccacaaacaccaatttttaaaaactttggttttagcagaaagatcttaggggaaccaggattccatctgaaagtagacttcagcccacttctctcagt

SEQ ID NO: 41486 - DNA, 481 bp, Homo sapiens
aaaatgctacagtgaagtaaatctctttttcttacctttgtgtacatagacagttttccaataaatcaaattatctggtaaaataatatgtatattcttaagactttagatagaatttgaaagtcttgaatggagctttgaaattgaaatgtcttgcctgatttggttggtcagatgagtaggaggaaatcagttcttttagccgtgtttggttaaaggttatgttttataaagtgtgttttcaaaattttcagaagtgcttaggtactccttgacacagtttcatgactttaaaaaacttgccttgtgcttccgtttaatttgaaaaacaaatttcacatcagcaaagtatagcagtctattaaaatagaagctaattctgcaaaatcgtttataccattgtttttcttaaatttgaatatatatactgtgcaaaatagaatgaccaccaaaaagtgtacttttttgttaaaagtggaat

SEQ ID NO: 41487 - DNA, 414 bp, Homo sapiens
gcggcgtgtggaggctgccgttaccttctcatgtttttaatgtaacagccagcagcatgtttacgaaactcatgctccttcaagtatacacatgaaacacaagccatgggacgtgtggcgctgttcgcagaggtcggggctgggtggggggctgggacacggagaccccaaccgcgtgctcaggccccagcgttactcgggcccctgatgaccctaaatgactggggtgatgcaggcatccctgccgagggcggcacttggtatctggggagagggttggcgggagtcgcatctataaagtttcatttttataatcatatgacttagtttaacaagcaggagaaaaatccattgtattacttcttttgttaaaataattaattatagctcagcacctaacttagccaaattgat

SEQ ID NO: 41488 - DNA, 753 bp, Homo sapiens
taaaagaaacctcaaaatctaacatggttcagttaatggaatgtctacatgatgtgacacagtctacaagtctctctacacatttctggaatccacagggctctggaaacagagaggtgttcatcagctcatatggtggcacagtatccctttaagtgaagtgcagctattatggtcattatttatcccagttagtagaaatattcatgtgtttgttacaggaggttgctgtgtttgattaaaatactgttcccaggcctcatcagggataagtaccatcaatatatgtttaagttttttactaaatcatttttaaatcgtggttatatatatatatatataacgtaaaatttgccatttgaactattttaagtatacagttcaatagcatcaaatacactcaaataactatgcagttttcacggccgttcattcattttgtgaaactgaaactctgtattcattaaacaacaactcctcatgcttcctccccttaatccctgacaatcactatctgtgtcgtgtctctgtggatttgactaagtacctcatgtgagtggaatcatacgctatttgtccttttgtgactggtttatttcacttagcataatgtccttgatgtttatccatgttgtagcatgtgtcagaatctccttacttaaatttttattttttcttacttcaacattcaagggaatctccttactttttgaggccaaatagattccattgtatgtatgaaccacactttgt

SEQ ID NO: 41489 - DNA, 699 bp, Homo sapiens
taaaagaaacctcaaaatctaacatggttcagttaatggaatgtctacatgatgtgacacagtctacaagtctctctacacatttctggaatccacagggctctggaaacagagaggtgttcatcagctcatatggtggcacagtatccctttaagtgaagtgcagctattatggtcattatttatcccagttagtagaaatattcatgtgtttgttacaggaggttgctgtgtttgattaaaatactgttcccaggcctcatcagggataagtaccatcaatatatgtttaagttttttactaaatcatttttaaatcgtggttatatatatatatatataacgttcaaataactatgcagttttcacggccgttcattcattttgtgaaactgaaactctgtattcattaaacaacaactcctcatgcttcctccccttaatccctgacaatcactatctgtgtcgtgtctctgtggatttgactaagtacctcatgtgagtggaatcatacgctatttgtccttttgtgactggtttatttcacttagcataatgtccttgatgtttatccatgttgtagcatgtgtcagaatctccttacttaaatttttattttttcttacttcaacattcaagggaatctccttactttttgaggccaaatagattccattgtatgtatgaaccacactttgt

SEQ ID NO: 41490 - DNA, 1385 bp, Homo sapiens
ccttctttccagagcatcctccgctctcagcagagctgcttctgcccacccatccctctactatagcactgagcactgtttgcccgtgtcagaatccctcacccacatgtttagcttggtatccgagtttgggaggccggcaatgactttcaacatgaattgctccatctacccatccatgcatttggcctacttatcttgaccccgtgcttttggccttttcttctcctgaaagcaaaccctttcattttgggtgggctgtgtagcgccatgggctgtggttatgaagcaaacaccctttcttgtagctgcctcctccggggttactgccctgagcacgtcccagctggatctcgtctgccactgtcacccatagcttcttccccatggtgctttccatgtgtcacacaccacgactgtgacccagggtcggggtcaagagtagcctggggccaagccctcccacccatgagcggagaagtcctccccaggcctcaccttgcctggcgcatggtccctcccatgagctttgctttcagcctttcagcttcctccacagggtggcagtggttgtaactcatccattcatcccttcatcccttcattcattcactcacagccaacagacgtttttaaaaaattagccagtgctatactagagctggctcccaaggacccgctgccgcattgccttttgaaacaaaacaatgaacacgttggtaaaggggccgtgcttgtgtgtcggtgacaaggcgagatccctgagtcaggtcaggcttgtagattcgagttctgttgcgagtttgattgcccctctgactttgtcccctgtacaactaggttgattaggaatcagccaactgtgttccctgggtgctcagaaatcacagcccatatcctcgagaggccaaaatgagagccagggggttccaagatgagtggctgcttctggccgggagcaggttttcaagtcattagaacactctggcctttcctggaggtgatcttggagccattcctgcccctttcaagaggagttaatgcccagctctgtttagagaaaattgggggagatgattgctcatgtgggtgataagaatcacctcccgtgcaggggtctgcatagaacactccataggcaaacctgggtgtccaaggcacgtggcattttgcaaactctgggtgcagctccgagctgtcctgcaggtcccagaccaggtgagaactccctgagttcctgctgcctgggtcgggggtgaggcataggtcttgggggttcaacctggaattctgaatgtcattcattgcattggagaggaaggagagtaggcaaagccaagaccctggaactggtttcaagaagcaggaactggggggatcctcta

SEQ ID NO: 41491 - DNA, 675 bp, Homo sapiens
aaaaataacagattagtttccaaggctggttgctgcagattgtgggacagagttctgtttttgcatattgattttctcctcagggaaacacattttaggaaaatctagtgtagggcggaagtcaatgtaccatgagcaggaccagcttctcctgccactttctagttgtgtgatttgtgccaagttgctagacttctttcaccctcagtttcctcatctgtaaaattgagatactgcataagagtttgatgaggattaaataaaccaatatacataaagtccttagcatagtgcctagaacatggaaagtagcaaattaatgtcatctgctgttaatgtaatcttactaatatctttttttacctgacttaatccaggaacttaaccagagaaaggggataaaattccaagggatagcatttcagggaaaatccactggagaggtttcataggccatgaagcatatattgagtgctctgtgtgataataaaaagactaattgggaaaagtctgtatatacctcaccccaagagaaggataccatcagagagttgcctttaaatatttaatatcttatgtttgattgataaataatatgcctgagaataaatttactccagagacagttacatggcagcattgtaaaaaaaaaaaaaaaaaaaaagtatagtagag

SEQ ID NO: 41492 - DNA, 649 bp, Homo sapiens
cagtgcctgtgccagcacctggagctgcctgccccaccacagcagccagcgtgcctggctgtgcacagaggccagacctgtgctcactcactcacacgcccctcaccactctgtgcctggctcacccttggcaggcatgggatctcggccagtagcacgagccaagcacagcctgctgggccaagtgggtaaaacgagcccagtgggtgcgagcaagactcaagcagaggcaccaccagccgccgaggcaccaccagccacagaggtttctggctggtgaagcaacacctgaagaatcctatggcattttcctgactttgaaatttacccacttagtcaagaaaatatgaagctattcattccctttacttgtctagcagaatatttccacatagaagattttagtctttgtcatcaagactgcgtaacatttaacactccaccacatcaaaatgctacttacacatacataataaacactcagagaggaatgctgcctcagacatcatcttttcttcactctgtctaaagcatgaatgtccttagatgttcattcaaaattagtgccagggagtgctatttggcaaggccacttagaatatagtaattaattagaatgcatttattaaattaagctgaaactatcctc

SEQ ID NO: 41493 - DNA, 476 bp, Homo sapiens
aacacccaactccagtaagctctagacttccacgtgggagaaggaagctactcaactccagcccattccagccactttgtcccactggggtagggagtgggtactgaagagaagcataggggacattcacagccaagggactcaggctcactaaaacactcaggctcactaaaaaccctcatacttacagcacactgatttctgacaaaggtgccaagacaattcagtgggggaaaagcagtctttctttcaacaagtgattactgagacaacttgataaccgcacacacacaagaatgaagtgggagctctacctcacaccatatgcaataattaaattaactgaaaatgaatcacaggcttaaacgtaagaactaagaacgataaaactctgagaagaaaatgtaacagtaaatcttcaagatcttgggtcaggcaaagtgttactagatataataccaagaacacacaacaaa

SEQ ID NO: 41494 - DNA, 614 bp, Homo sapiens
ccactcacgatacctcaaactccttggctcaagtgctcctccctgcctccgccttcagaggagccagactagaggcatttgccaccaggctggaaaaatttttttttttctagagacagggtctctctgtatttcccagggtggtcttgaattcctaggcccaagcaatccttctgtcttagtatcccaaagtgttgggattacaggcacgagccaccatacctggacagaaatacaaattaaaaccacagtgagacagcattttattcccattagaatggctaaagtttaaaaagatggacagttccaagaattggtgagaatgtagagcagtagttcaggcctgttgcttgtaggagtgtgacatggtacagccactttggaaagtttgtcagtttcttacaaggttagatatatacttattcaatttagcaatactactcttaggtgtttgttacccaagagaaatgaaaacatacagtcaacaaaaaaccatgtgaatgttcatagcagctttattcacaatagctggaaaaattggaaacaacccaaatgccatcaacaggtgaatggataaacaagttggataaataaacaatggattactacttaga

SEQ ID NO: 41495 - DNA, 385 bp, Homo sapiens
attcacaaaaattaaagataaaaagatttatgggtgaaaaaattgtctattttttcaggccgcatttgtcaaaaggaagctgaatagttggcttttaatatgtaatattaaatagggtttatcaactgttgtgttcccatggtctttagaatatgaatatgtagaaaacaaaagttgaaaacttaaatttagttcattatttaatttttttctagaatggtgattttcctagtttgttaactatgttttagccaattttgattttaactattaaaatctttcctttaatggttttaatatggtgttgatttttggttatacaattttacacaaccagagagtcactttctttaagagatcctaatgtacatggaaaaatagaaag

SEQ ID NO: 41496 - DNA, 455 bp, Homo sapiens
tacagtacttaactggcaaactccgagtttataaatgacgggaaacgcgccctttcagaaatgcctcaaacagtagggaagaaggaattggcagcctagtgaagcagagcaagagctggaattggcatagtgcgtgtcgccttagctggatggtcttggcagcatacagttggattggcagaagtaatcccaagggctgctggcttcagttttgatagcctctttggagtcttctcagaagtctccaaaatgatagtgtaatcttaaaatggctagctttctgcttatgaaagaggcaagagagattagcacttttttaggcttaaggtactctttaagaaacaaagggccaggcgcggtggtttatgcctgtaatcccagcactttgggaggccaaggtaagaggattgcttgagatcaggctgggcaacatagggagaactctgtctctacaa

SEQ ID NO: 41497 - DNA, 255 bp, Homo sapiens
gtgggaggtggaagtaggattgaaatccagccctgcctgtgcctgaagccaccgtactggttgtaaccaccaccctgacagatcccactgcagggacttaaccatcaggtgatatcagggaccagggtgtcagtactcctggctttgcggccgtgctatctctgctggaacccttaaccccgctgctgccatgcagtcagccagagactgtccataaaccaatgggcatggttgcgtttcaataaaactttattt

SEQ ID NO: 41498 - DNA, 361 bp, Homo sapiens
aaggaaacctgatgttttagttagcctatgtaaccccatcacaggttgatgtacagtttccattaggttctggaggaaatactgaaagcagtgtgtgtacctgcccactgccttcacacacccaggcctggggttttaattacttcaagcaggccagcctcaggtgcccacagccctgagaaccagtctgtgcccagtttctttctcttctctcagattatgaactccccaaaggcaccatccaggtttttaccccgcttgtcaaattcccctctggcccagggctggctgctcagcaggagtgtttaataagcacttaattgcccggtgagtacagaccattccagctcaccttaactgt

SEQ ID NO: 41499 - DNA, 464 bp, Homo sapiens
cttgctgtaacccctattcctgcccaaattaagcctgagctctccaagtgcctttggacaaacgcattggcctccaattgctggccccagaacttggtaagtttccccagacccttgtcccttcctggttctggattcctcagccacagaatgttataagaacttccagaataacgtacagactaaacactgcttaccaaaattaccgtacatcaggaatattcagccaaaaacaactgtaacatttccaagtcattccacatctaaatagaaataaaatcttgtagagatattgcccaaaagcctcagttcattgtagctattaacaagaagaggaaaaaaatggctcttgaataaaagaatcactagagtacttaagtgagttttgagaacttgctatcaggaaaatatacatgtatagaaattagtcattggaagtcttaactagtaacatctcctagtac

SEQ ID NO: 41500 - DNA, 406 bp, Homo sapiens
agatggattggatttttcaacctcattggaagccagaagacaatggggtggatttcctgtttcagtgacatggtagcttgagctaaagttagaaccgctcccattacaatcacttaaaatgctatataagctataacaacagaataagaaagaaaaacagagaaccgaaagcaaagcaggaatataaagccagagcagagtaggcagctctggggaggggcaaggtgggttcattggaccctgaaatcgaccctaacaataatagaggtttggatttgcatgaacacgtgaagcatggagttgaaacagaaatcccctcaaaagagccattcccaggtaaaagggatgcaagaaaatttcccccatgggatcagagaaatgtcaagggagctgatcattgccccac

SEQ ID NO: 41501 - DNA, 423 bp, Homo sapiens
gaaatttgccaacgatgcttataagacaggtttcatcttggcaaatttacttcgtctctctacctagaacactctacaactcccagaaaattccaatgtactcaagggtccatgcaattgaagggtgctgatgatgctgaagcataatttacttccttgggaatccacctctggtcagtagaatgtctaaatgcattttgtttcccaaatgttgcctcttagggatatgagaaaaaagttacattgcatcgttttgtaacagttgctctataactaaaactgacagtatctgtattgtgtctatattcaattctaacttaaaagacacataacccgtaaacttattacagtgccaagcaataaaaagcaaaattcatttacacttatttgtctcaaaaattcttgtcaagaaagcttggttat

SEQ ID NO: 41502 - DNA, 2870 bp, Homo sapiens
gcggccactcggggactgtcccttgctccaggcgctcactttgcgggcggcactttttccaggttgttaatccagctaatggagaaggatagatgcacgctacttggtttagaaaaaaaaacaaaaatgagcaaacgagacgccccttccgttttatgataactaagctgcagggaaataaatcggctggccctactgcaatctactgcactcgagaaacatcacagaaaattctttgatttatcttaatagtgacaagtgagcctgcttctgtcaattactgaagctataaggagattttttaaaaattaaacttcaacacaatgaggtgttgccacatctgcaaacttcctgggagagtaatggggattcgagtgcttcgattatctttggtggtcatcctcgtattattactggtagctggtgctttgactgccttacttcccagtgttaaagaagacaagatgctcatgttgcgtagggaaataaaatcccagggcaagtccaccatggactcctttactctcataatgcagacgtacaacagaacagatctcttattgaaacttttaaatcattatcaggctgtaccaaatctgcacaaagtgattgtggtatggaacaatattggagagaaggcaccagatgaattatggaattctctagggccccaccctatccctgtgatcttcaaacaacagacagcaaacaggatgagaaatcgactccaggtctttcctgaactggaaaccaatgcagtgttgatggtagatgatgacacactcatcagcaccccagaccttgtttttgctttctcagtttggcagcaatttcctgatcaaattgtaggatttgttcctagaaagcacgtctctacttcatcaggtatctacagttatggaagttttgaaatgcaagcaccagggtctggaaatggtgaccagtactctatggtgctgattggagcctcattcttcaatagcaaatatcttgaattatttcagaggcaacctgcagctgtccatgctttgatagatgatactcaaaactgtgatgatattgccatgaattttatcattgccaagcatattggcaagacttcagggatatttgtgaagcctgtaaacatggacaatttggaaaaagaaaccaacagtggctattctggaatgtggcatcgagctgagcacgctctgcagaggtcttattgtataaataagcttgttaatatctatgatagcatgcccttaagatactccaacattatgatttcccagtttggttttccatatgccaactacaaaagaaaaatataaaagtaaaacaaacaaaaacaaacctgaaaactgcttggcatttgagtagcttctccatgctatgtatttttttaagcaacatcatgaattttatctactccagaagtctctacaatagaaaaaaaagtgcagtgcttctaggatataaaattcacattacttttgaaagccaagaagttggtcttatccagttaggtcttcttatgaagagttttcatccagggatataactccttggtcagtgattttattgtttacatcctgagactgttctacagtttctttgactcctggcatttgccttaaggacctatagcaagctgtttctaggatcagaaactcaagagaggcatttctctgctttttcactaaaggtcagttgttttaatttgaaacctgaaatgcctctttagcaaaagcctgtggtatggggtaaagccatgtaagaagagaatagtctcagtcacatatgaagaggaaaatttgcagctgccagtgctttccttgtggccctgccaaccagctcttccaggacgaactcagtccagcatggttttgatgtaaccatccatgcttttatttttgttaagtcttttgtgactgggacagttaattttagtagctgaagaacgtctagttgtttgcttgatatttgtgaacatttactgcatggatcacaaaacaatataccctgtatttcttacacgccacttatatgcagcaaggagtaaatgtgttactagattcgggtagtgcattttgtcactgaatctgaccttgagaatgtacattaattcttatattttacataatgtatgtgttgtttaagaaatgtataaaaaacctgaaaaaaatgagtaagaactggcagaagttaaaaccctttgtatcaaaagatctttattggtagagcactggttatcttctggatactaaaaagttgtattacaaagccaaacacttgcattcacaactttaaaaaaagatccaaggaactattcataatgatgaaattccaactacatacaaggaggagaaaataagaacccagtcataacagaggaattctataggagtctgcatcaattcattcttaaggttgcctactctctgttatgtgaattagcgtctgtgtttcacccattgtctgtgtttagtccttgttcaccactagggcaaggaattcttaactaggcctctgtttaccaacttctctttctcctcctttccctcttattcctccttctcctcttccttcttatataatgctagtatattctcaaaattgcaaagctgtgagaatattaaaataatcatggctaatgttccaataatgaggtctttgtgcatttagttccgcatatgatggttttttttttacattaaagagtatatgtgtcttaatgcagtcagattgtaaaaaacaaaaacaaagaaactaagaatcttactaaaaatcgataatgtcagttatctgttttgtccaatattggtagtacttttttgcctcttatgattcctctagcagataaataaaagaaacttttgccatcc

SEQ ID NO: 41503 - DNA, 605 bp, Homo sapiens
gcggccactcggggactgtcccttgctccaggcgctcactttgcgggcggcactttttccaggttgttaatccagctaatggagaaggatagatgcacgctacttggtttagaaaaaaaaacaaaaatgagcaaacgagacgccccttccgttttatgataactaagctgcagggaaataaatcggctggccctactgcaatctactgcactcgagtgacaagtgagcctgcttctgtcaattactgaagctataaggagattttttaaaaattaaacttcaacacaatgagatttgtgaaaaaagtaacaggaattaagaagaacctcgtaagaatagaagagctacttaggaaaaagggaggggaaatcattttggaaggagagcatagaattggtagaaaatgagaaaagctgtatggcatttctaaaacaacaatgaaaagaatgactttcctgaatgtgggtaaaaaccttacatcaaaaactcttccccgaatcttgtatagcacctggaaaagacttgtgaagaaaaatgacctttcatgtaccatttctggcattttgtattttgcaatgcaataaattctagtttatgctgcttat

SEQ ID NO: 41504 - DNA, 2858 bp, Homo sapiens
gcggccactcggggactgtcccttgctccaggcgctcactttgcgggcggcactttttccaggttgttaatccagctaatggagaaggatagatgcacgctacttggtttagaaaaaaaaacaaaaatgagcaaacgagacgccccttccgttttatgataactaagctgcagggaaataaatcggctggccctactgcaatctactgcactcgagtgacaagtgagcctgcttctgtcaattactgaagctataaggagattttttaaaaattaaacttcaacacaatgagaacctggaacagtggtggcacaaagtgttgccacatctgcaaacttcctgggagagtaatggggattcgagtgcttcgattatctttggtggtcatcctcgtattattactggtagctggtgctttgactgccttacttcccagtgttaaagaagacaagatgctcatgttgcgtagggaaataaaatcccagggcaagtccaccatggactcctttactctcataatgcagacgtacaacagaacagatctcttattgaaacttttaaatcattatcaggctgtaccaaatctgcacaaagtgattgtggtatggaacaatattggagagaaggcaccagatgaattatggaattctctagggccccaccctatccctgtgatcttcaaacaacagacagcaaacaggatgagaaatcgactccaggtctttcctgaactggaaaccaatgcagtgttgatggtagatgatgacacactcatcagcaccccagaccttgtttttgctttctcagtttggcagcaatttcctgatcaaattgtaggatttgttcctagaaagcacgtctctacttcatcaggtatctacagttatggaagttttgaaatgcaagcaccagggtctggaaatggtgaccagtactctatggtgctgattggagcctcattcttcaatagcaaatatcttgaattatttcagaggcaacctgcagctgtccatgctttgatagatgatactcaaaactgtgatgatattgccatgaattttatcattgccaagcatattggcaagacttcagggatatttgtgaagcctgtaaacatggacaatttggaaaaagaaaccaacagtggctattctggaatgtggcatcgagctgagcacgctctgcagaggtcttattgtataaataagcttgttaatatctatgatagcatgcccttaagatactccaacattatgatttcccagtttggttttccatatgccaactacaaaagaaaaatataaaagtaaaacaaacaaaaacaaacctgaaaactgcttggcatttgagtagcttctccatgctatgtatttttttaagcaacatcatgaattttatctactccagaagtctctacaatagaaaaaaaagtgcagtgcttctaggatataaaattcacattacttttgaaagccaagaagttggtcttatccagttaggtcttcttatgaagagttttcatccagggatataactccttggtcagtgattttattgtttacatcctgagactgttctacagtttctttgactcctggcatttgccttaaggacctatagcaagctgtttctaggatcagaaactcaagagaggcatttctctgctttttcactaaaggtcagttgttttaatttgaaacctgaaatgcctctttagcaaaagcctgtggtatggggtaaagccatgtaagaagagaatagtctcagtcacatatgaagaggaaaatttgcagctgccagtgctttccttgtggccctgccaaccagctcttccaggacgaactcagtccagcatggttttgatgtaaccatccatgcttttatttttgttaagtcttttgtgactgggacagttaattttagtagctgaagaacgtctagttgtttgcttgatatttgtgaacatttactgcatggatcacaaaacaatataccctgtatttcttacacgccacttatatgcagcaaggagtaaatgtgttactagattcgggtagtgcattttgtcactgaatctgaccttgagaatgtacattaattcttatattttacataatgtatgtgttgtttaagaaatgtataaaaaacctgaaaaaaatgagtaagaactggcagaagttaaaaccctttgtatcaaaagatctttattggtagagcactggttatcttctggatactaaaaagttgtattacaaagccaaacacttgcattcacaactttaaaaaaagatccaaggaactattcataatgatgaaattccaactacatacaaggaggagaaaataagaacccagtcataacagaggaattctataggagtctgcatcaattcattcttaaggttgcctactctctgttatgtgaattagcgtctgtgtttcacccattgtctgtgtttagtccttgttcaccactagggcaaggaattcttaactaggcctctgtttaccaacttctctttctcctcctttccctcttattcctccttctcctcttccttcttatataatgctagtatattctcaaaattgcaaagctgtgagaatattaaaataatcatggctaatgttccaataatgaggtctttgtgcatttagttccgcatatgatggttttttttttacattaaagagtatatgtgtcttaatgcagtcagattgtaaaaaacaaaaacaaagaaactaagaatcttactaaaaatcgataatgtcagttatctgttttgtccaatattggtagtacttttttgcctcttatgattcctctagcagataaataaaagaaacttttgccatcc

SEQ ID NO: 41505 - DNA, 2758 bp, Homo sapiens
gcggccactcggggactgtcccttgctccaggcgctcactttgcgggcggcactttttccaggttgttaatccagctaatggagaaggatagatgcacgctacttggtttagaaaaaaaaacaaaaatgagcaaacgagacgccccttccgttttatgataactaagctgcagggaaataaatcggctggccctactgcaatctactgcactcgaggtgttgccacatctgcaaacttcctgggagagtaatggggattcgagtgcttcgattatctttggtggtcatcctcgtattattactggtagctggtgctttgactgccttacttcccagtgttaaagaagacaagatgctcatgttgcgtagggaaataaaatcccagggcaagtccaccatggactcctttactctcataatgcagacgtacaacagaacagatctcttattgaaacttttaaatcattatcaggctgtaccaaatctgcacaaagtgattgtggtatggaacaatattggagagaaggcaccagatgaattatggaattctctagggccccaccctatccctgtgatcttcaaacaacagacagcaaacaggatgagaaatcgactccaggtctttcctgaactggaaaccaatgcagtgttgatggtagatgatgacacactcatcagcaccccagaccttgtttttgctttctcagtttggcagcaatttcctgatcaaattgtaggatttgttcctagaaagcacgtctctacttcatcaggtatctacagttatggaagttttgaaatgcaagcaccagggtctggaaatggtgaccagtactctatggtgctgattggagcctcattcttcaatagcaaatatcttgaattatttcagaggcaacctgcagctgtccatgctttgatagatgatactcaaaactgtgatgatattgccatgaattttatcattgccaagcatattggcaagacttcagggatatttgtgaagcctgtaaacatggacaatttggaaaaagaaaccaacagtggctattctggaatgtggcatcgagctgagcacgctctgcagaggtcttattgtataaataagcttgttaatatctatgatagcatgcccttaagatactccaacattatgatttcccagtttggttttccatatgccaactacaaaagaaaaatataaaagtaaaacaaacaaaaacaaacctgaaaactgcttggcatttgagtagcttctccatgctatgtatttttttaagcaacatcatgaattttatctactccagaagtctctacaatagaaaaaaaagtgcagtgcttctaggatataaaattcacattacttttgaaagccaagaagttggtcttatccagttaggtcttcttatgaagagttttcatccagggatataactccttggtcagtgattttattgtttacatcctgagactgttctacagtttctttgactcctggcatttgccttaaggacctatagcaagctgtttctaggatcagaaactcaagagaggcatttctctgctttttcactaaaggtcagttgttttaatttgaaacctgaaatgcctctttagcaaaagcctgtggtatggggtaaagccatgtaagaagagaatagtctcagtcacatatgaagaggaaaatttgcagctgccagtgctttccttgtggccctgccaaccagctcttccaggacgaactcagtccagcatggttttgatgtaaccatccatgcttttatttttgttaagtcttttgtgactgggacagttaattttagtagctgaagaacgtctagttgtttgcttgatatttgtgaacatttactgcatggatcacaaaacaatataccctgtatttcttacacgccacttatatgcagcaaggagtaaatgtgttactagattcgggtagtgcattttgtcactgaatctgaccttgagaatgtacattaattcttatattttacataatgtatgtgttgtttaagaaatgtataaaaaacctgaaaaaaatgagtaagaactggcagaagttaaaaccctttgtatcaaaagatctttattggtagagcactggttatcttctggatactaaaaagttgtattacaaagccaaacacttgcattcacaactttaaaaaaagatccaaggaactattcataatgatgaaattccaactacatacaaggaggagaaaataagaacccagtcataacagaggaattctataggagtctgcatcaattcattcttaaggttgcctactctctgttatgtgaattagcgtctgtgtttcacccattgtctgtgtttagtccttgttcaccactagggcaaggaattcttaactaggcctctgtttaccaacttctctttctcctcctttccctcttattcctccttctcctcttccttcttatataatgctagtatattctcaaaattgcaaagctgtgagaatattaaaataatcatggctaatgttccaataatgaggtctttgtgcatttagttccgcatatgatggttttttttttacattaaagagtatatgtgtcttaatgcagtcagattgtaaaaaacaaaaacaaagaaactaagaatcttactaaaaatcgataatgtcagttatctgttttgtccaatattggtagtacttttttgcctcttatgattcctctagcagataaataaaagaaacttttgccatcc

SEQ ID NO: 41506 - DNA, 2350 bp, Homo sapiens
gaaggattggactctttggtgactggaatttgttaatgtcagataatgtttgaattaggagaacatttgtaagggtagaatatttgttttcagagatgtttgggttgtgatgccatttgacctgtaaacatatcagaacacagatttatgaagttacctggagctagataaaactgaaatgtagaaaccaggaataaggaagagttgacaaatcagtttcattctctctgtaataaatcattgcctttttcactatgtcttctctaaaaatatgtgacattttattgttctttttccctcttttcagcaatttcctgatcaaattgtaggatttgttcctagaaagcacgtctctacttcatcaggtatctacagttatggaagttttgaaatgcaagcaccagggtctggaaatggtgaccagtactctatggtgctgattggagcctcattcttcaatagcaaatatcttgaattatttcagaggcaacctgcagctgtccatgctttgatagatgatactcaaaactgtgatgatattgccatgaattttatcattgccaagcatattggcaagacttcagggatatttgtgaagcctgtaaacatggacaatttggaaaaagaaaccaacagtggctattctggaatgtggcatcgagctgagcacgctctgcagaggtcttattgtataaataagcttgttaatatctatgatagcatgcccttaagatactccaacattatgatttcccagtttggttttccatatgccaactacaaaagaaaaatataaaagtaaaacaaacaaaaacaaacctgaaaactgcttggcatttgagtagcttctccatgctatgtatttttttaagcaacatcatgaattttatctactccagaagtctctacaatagaaaaaaaagtgcagtgcttctaggatataaaattcacattacttttgaaagccaagaagttggtcttatccagttaggtcttcttatgaagagttttcatccagggatataactccttggtcagtgattttattgtttacatcctgagactgttctacagtttctttgactcctggcatttgccttaaggacctatagcaagctgtttctaggatcagaaactcaagagaggcatttctctgctttttcactaaaggtcagttgttttaatttgaaacctgaaatgcctctttagcaaaagcctgtggtatggggtaaagccatgtaagaagagaatagtctcagtcacatatgaagaggaaaatttgcagctgccagtgctttccttgtggccctgccaaccagctcttccaggacgaactcagtccagcatggttttgatgtaaccatccatgcttttatttttgttaagtcttttgtgactgggacagttaattttagtagctgaagaacgtctagttgtttgcttgatatttgtgaacatttactgcatggatcacaaaacaatataccctgtatttcttacacgccacttatatgcagcaaggagtaaatgtgttactagattcgggtagtgcattttgtcactgaatctgaccttgagaatgtacattaattcttatattttacataatgtatgtgttgtttaagaaatgtataaaaaacctgaaaaaaatgagtaagaactggcagaagttaaaaccctttgtatcaaaagatctttattggtagagcactggttatcttctggatactaaaaagttgtattacaaagccaaacacttgcattcacaactttaaaaaaagatccaaggaactattcataatgatgaaattccaactacatacaaggaggagaaaataagaacccagtcataacagaggaattctataggagtctgcatcaattcattcttaaggttgcctactctctgttatgtgaattagcgtctgtgtttcacccattgtctgtgtttagtccttgttcaccactagggcaaggaattcttaactaggcctctgtttaccaacttctctttctcctcctttccctcttattcctccttctcctcttccttcttatataatgctagtatattctcaaaattgcaaagctgtgagaatattaaaataatcatggctaatgttccaataatgaggtctttgtgcatttagttccgcatatgatggttttttttttacattaaagagtatatgtgtcttaatgcagtcagattgtaaaaaacaaaaacaaagaaactaagaatcttactaaaaatcgataatgtcagttatctgttttgtccaatattggtagtacttttttgcctcttatgattcctctagcagataaataaaagaaacttttgccatcc

SEQ ID NO: 41507 - DNA, 450 bp, Homo sapiens
cgacaggaagtggagcgtcaccgaaagggaggggcggccactcggggactgtcccttgctccaggcgctcactttgcgggcggcactttttccaggttgttaatccagctaatggagaaggatagatgcacgctacttggtttagaaaaaaaaacaaaaatgagcaaacgagacgccccttccgttttatgataactaagctgcagggaaataaatcggctggccctactgcaatctactgcactcgaggtaaggagacacagcaaaatgctccagtattagtatttttctttttgtagtgaggatatatgcatgttttgctctcgttctgagaactttgtgtgtgtgtatggagtattcggtggttttatttttgaaaatatgtacttattctacaattttgaaaaatgttaattaaaactgctgtgtaaaaacagctaggtttcagaa

SEQ ID NO: 41508 - DNA, 374 bp, Homo sapiens
gcgtagggaaataaaatcccagggcaagtccaccatggactcctttactctcataatgcagacgtacaacagaacagatctcttattgaaacttttaaatcattatcaggctgtaccaaatctgcacaaagtgattgtggtatggaacaatattggagagaaggcaccagatgaattatggaattctctagggccccaccctatccctgtgatcttcaaacaacagacagcaaacaggatgagaaatcgactccaggtctttcctgaactggaaaccaatggtgagttgcagtgtagttctcagcctggaaaggctgccgctgtccagagctgggacagacatgtgaatttctggccttctgcttaaccgtctg

SEQ ID NO: 41509 - DNA, 2834 bp, Homo sapiens
gcggccactcggggactgtcccttgctccaggcgctcactttgcgggcggcactttttccaggttgttaatccagctaatggagaaggatagatgcacgctacttggtttagaaaaaaaaacaaaaatgagcaaacgagacgccccttccgttttatgataactaagctgcagggaaataaatcggctggccctactgcaatctactgcactcgagtgacaagtgagcctgcttctgtcaattactgaagctataaggagattttttaaaaattaaacttcaacacaatgaggtgttgccacatctgcaaacttcctgggagagtaatggggattcgagtgcttcgattatctttggtggtcatcctcgtattattactggtagctggtgctttgactgccttacttcccagtgttaaagaagacaagatgctcatgttgcgtagggaaataaaatcccagggcaagtccaccatggactcctttactctcataatgcagacgtacaacagaacagatctcttattgaaacttttaaatcattatcaggctgtaccaaatctgcacaaagtgattgtggtatggaacaatattggagagaaggcaccagatgaattatggaattctctagggccccaccctatccctgtgatcttcaaacaacagacagcaaacaggatgagaaatcgactccaggtctttcctgaactggaaaccaatgcagtgttgatggtagatgatgacacactcatcagcaccccagaccttgtttttgctttctcagtttggcagcaatttcctgatcaaattgtaggatttgttcctagaaagcacgtctctacttcatcaggtatctacagttatggaagttttgaaatgcaagcaccagggtctggaaatggtgaccagtactctatggtgctgattggagcctcattcttcaatagcaaatatcttgaattatttcagaggcaacctgcagctgtccatgctttgatagatgatactcaaaactgtgatgatattgccatgaattttatcattgccaagcatattggcaagacttcagggatatttgtgaagcctgtaaacatggacaatttggaaaaagaaaccaacagtggctattctggaatgtggcatcgagctgagcacgctctgcagaggtcttattgtataaataagcttgttaatatctatgatagcatgcccttaagatactccaacattatgatttcccagtttggttttccatatgccaactacaaaagaaaaatataaaagtaaaacaaacaaaaacaaacctgaaaactgcttggcatttgagtagcttctccatgctatgtatttttttaagcaacatcatgaattttatctactccagaagtctctacaatagaaaaaaaagtgcagtgcttctaggatataaaattcacattacttttgaaagccaagaagttggtcttatccagttaggtcttcttatgaagagttttcatccagggatataactccttggtcagtgattttattgtttacatcctgagactgttctacagtttctttgactcctggcatttgccttaaggacctatagcaagctgtttctaggatcagaaactcaagagaggcatttctctgctttttcactaaaggtcagttgttttaatttgaaacctgaaatgcctctttagcaaaagcctgtggtatggggtaaagccatgtaagaagagaatagtctcagtcacatatgaagaggaaaatttgcagctgccagtgctttccttgtggccctgccaaccagctcttccaggacgaactcagtccagcatggttttgatgtaaccatccatgcttttatttttgttaagtcttttgtgactgggacagttaattttagtagctgaagaacgtctagttgtttgcttgatatttgtgaacatttactgcatggatcacaaaacaatataccctgtatttcttacacgccacttatatgcagcaaggagtaaatgtgttactagattcgggtagtgcattttgtcactgaatctgaccttgagaatgtacattaattcttatattttacataatgtatgtgttgtttaagaaatgtataaaaaacctgaaaaaaatgagtaagaactggcagaagttaaaaccctttgtatcaaaagatctttattggtagagcactggttatcttctggatactaaaaagttgtattacaaagccaaacacttgcattcacaactttaaaaaaagatccaaggaactattcataatgatgaaattccaactacatacaaggaggagaaaataagaacccagtcataacagaggaattctataggagtctgcatcaattcattcttaaggttgcctactctctgttatgtgaattagcgtctgtgtttcacccattgtctgtgtttagtccttgttcaccactagggcaaggaattcttaactaggcctctgtttaccaacttctctttctcctcctttccctcttattcctccttctcctcttccttcttatataatgctagtatattctcaaaattgcaaagctgtgagaatattaaaataatcatggctaatgttccaataatgaggtctttgtgcatttagttccgcatatgatggttttttttttacattaaagagtatatgtgtcttaatgcagtcagattgtaaaaaacaaaaacaaagaaactaagaatcttactaaaaatcgataatgtcagttatctgttttgtccaatattggtagtacttttttgcctcttatgattcctctagcagataaataaaagaaacttttgccatcc

SEQ ID NO: 41510 - DNA, 1119 bp, Homo sapiens
  misc_feature (1082)..(1082): n is a, c, g, or t
  misc_feature (1086)..(1086): n is a, c, g, or t
  misc_feature (1116)..(1116): n is a, c, g, or t
  misc_feature (1119)..(1119): n is a, c, g, or t
gcggccactcggggactgtcccttgctccaggcgctcactttgcgggcggcactttttccaggttgttaatccagctaatggagaaggatagatgcacgctacttggtttagaaaaaaaaacaaaaatgagcaaacgagacgccccttccgttttatgataactaagctgcagggaaataaatcggctggccctactgcaatctactgcactcgagtgacaagtgagcctgcttctgtcaattactgaagctataaggagattttttaaaaattaaacttcaacacaatgaggtgttgccacatctgcaaacttcctgggagagtaatggggattcgagtgcttcgattatctttggtggtcatcctcgtattattactggtagctggtgctttgactgccttacttcccagtgttaaagaagacaagatgctcatgttgcgtagggaaataaaatcccagggcaagtccaccatggactcctttactctcataatgcagacgtacaacagaacagatctcttattgaaacttttaaatcattatcaggctgtaccaaatctgcacaaagtgattgtggtatggaacaatattggagagaaggcaccagatgaattatggaattctctagggccccaccctatccctgtgatcttcaaacaacagacagcaaacaggatgagaaatcgactccaggtctttcctgaactggaaaccaatgcagtgttgatggtagatgatgacacactcatcagcaccccagaccttgtttttgctttctcagtttggcagcaatttcctgatcaaattgtaggatttgttcctagaaagcacgtctctacttcatcaggtatctacagttatggaagttttgaaatgcaagcaccagggtctggaaatggtgaccagtactctatggtgctgattggagcctcattcttcaatagcaaatatcttgaattatttcagaggcaacctgcagctgtccatgctttgatagatgatactcaaaactgtgatgatattgccatgaattttatcattttgcccaagccattatttgggcaaagaacttccaggggnatanttttgttgaaagccctggttaaacattggnacn

SEQ ID NO: 41511 - DNA, 407 bp, Homo sapiens
ggaaaaaaacatgaaaacacagggactcgtaagaatgctaacatttgtatgttgtttccatttctactccaggtgttgccacatctgcaaacttcctgggagagtaatggggattcgagtgcttcgattatctttggtggtcatcctcgtattattactggtagctggtgctttgactgccttacttcccagtgttaaagaagacaagatgctcatgttgcgtagggaaataaaatcccagggcaagtccaccatggactcctttactctcataatgcagacgtacaacagaacagatctcttattgaaacttttaaatcattatcaggctgtaccaaatctgcacaaagtgattgtggtatggaacaatattggagagaaggcaccagatgaattatggaattctc

SEQ ID NO: 41512 - DNA, 2501 bp, Homo sapiens
agctctccccaccaataaaaggaccagggaggatcagagagagcagaaggatcctgagcctcgcactctgccgcccgcaccaccttccgctgcctctcagactctgctcagcctcacacgatgtcgtgccgctcctacaggatcagctcaggatgcggggtcaccaggaacttcagctcctgctcagctgtggcccccaaaactggcaaccgctgctgcatcagcgccgccccctaccgaggggtgtcctgctaccgagggctgacgggcttcggcagccgcagcctctgcaacctgggctcctgcgggccccggatagctgtaggtggcttccgagccggctcctgcggacgcagcttcggctaccgctccgggggcgtgtgcggacccagccccccatgcatcactaccgtgtcggtcaacgagagcctcctcacgcccctcaacctggagatcgaccccaacgcacagtgcgtgaagcaggaggagaaggagcagatcaagtccctcaacagcaggttcgcggccttcatcgacaaggtgcgcttcctggagcagcagaacaagctgctggagaccaagtggcagttctaccagaaccagcgctgctgcgagagcaacctggagccactgttcagtggctacatcgagactctgcggcgggaggccgagtgcgtggaggccgacagcgggaggctggcctcagagctcaaccatgtgcaggaggtgctggagggctacaagaagaagtatgaagaggaggtggccctgagagccacagcagagaatgagtttgtcgttctaaagaaggacgtggactgtgcctacctgcggaaatcagacctggaggccaatgtggaggccctggtggaggagtctagcttcctgaggcgcctctatgaagaggagatccgcgttctccaagcccacatctcagacacctcggtcatagtcaagatggacaacagccgagacctgaacatggactgcatcatcgctgagatcaaggctcagtatgacgatgttgccagccgcagccgggccgaggctgagtcctggtaccgtagcaagtgtgaggagatgaaggccacggtgatcaggcatggggagaccctgcgccgcaccaaggaggagatcaacgagctgaaccgcatgatccagaggctgacggccgagattgagaatgccaagtgccagcgtgccaagctggaggctgctgtggctgaggcagagcagcagggtgaggcggccctcagcgatgcccgctgcaagctggctgagctggagggcgccctgcagaaggccaagcaggacatggcctgcctgctcaaggagtaccaggaggtgatgaactccaagctgggcctggacatcgagatcgccacctacaggcgcctgctggagggcgaggaacacaggctgtgtgaaggtgtgggctctgtgaatgtctgtgtcagcagctcccgtggtggagtctcctgtgggggcctctcctacagcaccaccccagggcgccagatcacttctggcccctcagccataggcggcagcatcacggtggtggcccctgactcctgtgccccctgccagcctcgttcctccagcttcagctgcgggagtagccggtcggtccgctttgcctagtagagtcatggagccagggcttcctgccaagcacctgcctgcctgcatcactgcactgaatggcatgtgaatggaaaatgtgtgcttgcttccagaatcttctggatgttcctacagagggaaagacctacagagggaaagaccctcgggccgctcccctgcgccttttcatgctagggagatgcatcctagttgtcctcctggcagctgttttcagaggcattcccagcccttcacttaactcctacttagctccaaaatacctgtatccaatttgtattattcccccagctctcagggacaagaccagtcccccagcgtggtggtcagcacggaagctccaccttctgggtggaggcgccatcctaaccatccagccaggccacccacaacccgagaatcagggagaaagtccctccccagcagccccctcctcctggctgggaagaatggtcccccagcaagcacttgcctgttcattcccgttcatgttttgcttctctctcagactgccttcctgcttctgggctaacctgttccagccaggctcctcatgtgacctcgcagttgagaagcccattatcgtggggcatccttttgcctacagcccctggttagggcactttggacaggtcttgctattcagtgaacctttgtacatttcaaagaagactccatggctgctccagatgcccccttgctgggtgcaggtggggactgtccaatgcagagctggcgggacagagagttaagccacttcctgggtctccttcttatgactgtctatgggtgcattgccttctgggttgtctcgatctgtgtttcaataaatgccgctgcaatgcaaaaaaaaatgg

SEQ ID NO: 41513 - DNA, 372 bp, Homo sapiens
gatttcccagtcttcattttccaccggaaagcactttcttctcttgattgctgtgtctgattgcctttcccctctcttgcttagctgatagcctatgaagatggtctttcaggttgtttcattcatgcagtgtagacctgggttgactgctgatgttcacagtggctttcctgggtctgctcacttttctctgcctctgtgtgtgcttcacctccccaccgccgccaccccaccccctctgcactttctgaaccaggaatttcattcttatgaagcttggtttgctttacctttgtgttcttctccctttcctctaataaatactgaaaatagattgggaatatttagtaaatattccctctagtaaatact

SEQ ID NO: 41514 - DNA, 463 bp, Homo sapiens
cttgtaaataggttgcagtatgtctccaatgaactttgctgtatttcaagagaaagaatctgaattcatttcaccatttttgtctccattaatgtgcgtggcaggttatccttacctttctttgcgttttcaagtgtgtttttgcaatcagtccattgagtagcatgttcaacaattaacaaataattactaagcaggaactatgaagcaaagcaatgtgctggccttctttcctatacttcacgagactttattggatgctttaatgctcagtaaatatttactactttgcatttttcttttcaactagagaattgctaacaaccaggcaatagccccaatgcacaatgaagatatggagctgtgtttaagcagatgtatctaccagagacagtaggtagaataaaaaccatggcttttggaactgtattagtccattctcatgctgctgataaagacatac

SEQ ID NO: 41515 - DNA, 451 bp, Homo sapiens
gcttaacttcgctttaatgcttttatgtagaacccagtgcaccccatttttgagaagtgcctggaatgtggagttgcatgcttgcaactagagttaaacagagaaaaagtagttccggaaggagagcaactgacccttaactcgacctcaggggcctttaggcactcagaactgaaacttggatagtttgtaagggataagcttgtccattcatagttatatgtacaaataaaaagagcctcagtgaagttagttacctataatgtgggagttaaggatgggtttataacacaatatgtatttaatgtatttgttcaatgaaaagaaaaaaatgttacctagttgttggcctgatgaacattggcattttataatgcacaaattgtcccaaaccagttggtatttaattacatttgtttggtttctgcataataaacaagtcttccgatta

SEQ ID NO: 41516 - DNA, 548 bp, Homo sapiens
ggtgcagcccacggagggcaagctgaagcagcgcctcacctgggaagcgcaaggggtcaggggatttccctttcttagccaagggaatccatgacagtctgtacttggaggaacggtacattcctgcccaaatactgcgcttttcccatagtcttcgcaacccacagaccaggaaattccctcctgtgcctggctcagcaggtctcacgcccatggaggcttgctcacagctagtgcagcagtctgagatcaacctgcaatgctgcagcttggtgggggaggggcgtccgccattgctgaggcttgaatgggtggttttgtgctcacagtgtaaacaaagaggccaggaagctcgaactgggtggagcccaccatagctcagcaaggcctactgcctttctagattccacttctgggcagtgcctaccagaagaaaaggcagcagacagcttcagcagacctaattttccctgtctgacagctctgaagagagcagtggctctcccagcatggcgtttgagctctgagaacggacagactgcctcctc

SEQ ID NO: 41517 - DNA, 446 bp, Homo sapiens
agaggctactgatagtggcaggaggcagacaaaggcctaggcagacagtggcaggtctacagtgaaaccccacctccaagctgaagacagtttaaagcctgaaagccaagctagaagtcaaatccacagatcggattgaaaacctgtgttcctgtctggcatgctttctctgactgatccccacccttcacctattttacttatatctaccctttcctaattgcttttctacactgctatgcccaactttgagtggtgcctttgctttagcctttctttgcatactcagcaatcagcacacactcccctattctgagcccataaaaaaccccggacacagccatactgacagagagagagaaaccacctggagtcccctttcctcttccatcgctcaataaaattcttctctgcccatccagacccttctaattgtcagtgtatcc

SEQ ID NO: 41518 - DNA, 844 bp, Homo sapiens
ttatttttgagacagagtcttgctctatcgcccaggctagagtgcaatggcacgatctcggctcactgcaacctctgcctcccaggttcatgcaattctcctgcctcagcctcccaagtagttcggattacaggtgcctgccaccaaacccagctaatttttgtattttttttagagatggggtttcgtcatgttggtcaggctgatcttgaactactgacgtcaggtgatctgcccgccttggcctccccaagtgctgggattacaggcataagccactgcgcccagcctcccattttttcaatctcctcagttcttctattctcaacgttttttgacttcacctttcgtttccctgatttgattttaattctccttcatgagtttcaaagttgaactcaattggcctgttgctatttcattgtttatctccgattctggttgggctactgtatatgtgatggccttctttatctctgaaaacaagactctaggccattgtttgaaatcctcgagtttccctgttgggagatcccatttcaggtattagattttatccgtgtccttgctgttctgatccattcttcctcaaaataagccaataactaattccataaaattttctttttgtctgtacttctgctttaattatctgattccttgctgttaataccaaacagcacacaacatttggttttgggttttatgagacaaagtctcactctgttgcctggacgagtacagtggcaccatcactgctaactgaagcctccacctcctgtgttcaagcgatcttcccgcctcagcatccctactagctgggactacagacttgcagcaccac

SEQ ID NO: 41519 - DNA, 388 bp, Homo sapiens
gttatctgtcctggtcatcacactctgctcccagaacctggcacggtgcctggaacaccaaagacaccacacgtgatgtcagaatgaacaaagacagaaaggagtgatgggatctgcctaacagggagagaacaggcccttaaaaaaaagagaatctggtcgggcgcggtggctcacgcctgtaatcccagcactttgggaagccaaggcgggcagatcacgaggtcaggagatcaagaccatcctggctaacacggtgaaatgccatctctactaaaaaatacaaaaaattagccgggtgtggtggcgggtgcctgcggtcccagctactcgggaggctgaggcaggagaatggcgtgaacccaggaggtggagcttgcagtgagcc

SEQ ID NO: 41520 - DNA, 883 bp, Homo sapiens
gcccttagaaaaagtagatcttttacatggcttggctcacaatttaagtggttataaatatatatacatatgatatagtggtataaatagatttataaatatacatcattttttgctacactttgaacaccaacatgtaatctttgggcttagcagaataaaagatagaataacacaaagtctatcttgctggagcacatttactcggtttctcctctagagaagcaaatcattagataagacatcatttcctgcactactggacacactcaatgaggtaactgttgttgaacaactttgcaatgccctttcatcttccattaaattaaccataaaatgtaaaaacacaaatactgaggaaaatctgagttttacagaaaaaatacaattgatgtgttggggataggaatgttcattacccgcttttaccccaagatgactagaatacccgttttttgttgtttgtgtgtttgtttttaaagtgtggcctgagcctatctacctcgaatccttcctggtagagcaccatgtttgtgcaattttgacattaaaaaaaaaaaaaaaaaaaaagcaacaaaaaccaacaacaaaacaccacccagactcaagcccccaaatcgcacacacacaaagccacctatgctttggggaaattttcgcagtggttttaaaacatggcatttttttcttcttcacattttctgataatacaatggatgcaaaagtcatgtggccgctctgaatggccacaggactcggtggggagggcagggcggtgggaggattctgctcttttggagggagagacaggttggtaaagccttcctgtcacccttccggtaaaattgtggctgggggaaaaacatgaactatcaacaaaaat

SEQ ID NO: 41521 - DNA, 791 bp, Homo sapiens
  misc_feature (16)..(16): n is a, c, g, or t
ggtcggtccggacatnggattcgctacactttgaacaccaacatgtaatctttgggcttagcagaataaaagatagaataacacaaagtctatcttgctggagcacatttactcggtttctcctctagagaagcaaatcattagataagacatcatttcctgcactactggacacactcaatgaggtaactgttgttgaacaactttgcaatgccctttcatcttccattaaattaaccataaaatgtaaaaacacaaatactgaggaaaatctgagttttacagaaaaaatacaattgatgtgttggggataggaatgttcattacccgcttttaccccaagatgactagaatacccgttttttgttgtttgtgtgtttgtttttaaagtgtggcctgagcctatctacctcgaatccttcctggtagagcaccatgtttgtgcaattttgacattaaaaaaaaaaaaaaaaaaaaagcaacaaaaaccaacaacaaaacaccacccagactcaagcccccaaatcgcacacacacaaagccacctatgctttggggaaattttcgcagtggttttaaaacatggcatttttttcttcttcacattttctgataatacaatggatgcaaaagtcatgtggccgctctgaatggccacaggactcggtggggagggcagggcggtgggaggattctgctcttttggagggagagacaggttggtaaagccttcctgtcacccttccggtaaaattgtggctgggggaaaaacatgaactatcaacaaaaat

SEQ ID NO: 41522 - DNA, 443 bp, Homo sapiens
gcctcagacttggcttggactatgggttccatccatagggttggcctcattgatcagcgttacaggaaggcttcgaggtggctccctgtgaccgtgttgtgagcaaaccattcctggcatcccaccttgcaggtgaggagactgcctcctagccgtggtaagtcccagcaccccacgctgcctctgtgggtttggaggtctggctcattctgttcacgtgggatggtgggattcagcaaaaatgggagagttgggctgtgaactcttgaaggtcagctcgtccaggaactcatttcgtgcatgtatactggcacctgctatgcagtggacaccgttctaggcacttgggatacatcaggggacaaaacagatgaatagccctgccttcctagagctgacattgtaggaaagaaggaagatggataataaacaatagatcaaca

SEQ ID NO: 41523 - DNA, 407 bp, Homo sapiens
ctgcaagagcaaaggatgcccagaggtcagggctggctgcccacccagctcgcccaccatccccaagagaagtaggcacagacccctagaggcgactctgcctcccagagccccggtggggagcatctgcagaacttccctcaggggctggggcaggcctctcctgtttgtctttgcctccaagttgaggaagagcagggactggcctctgcaggctctgcagtttgtgcaggtcctggcttgtggccctctcctaggacagcccctgacctttgtctctctggttttccagaggaggaagccaagggtggcctgcctcggtgcaagcagctgcttctctatggtggcaaaatttggaattaactgccttgtgacaggatggtttaatgatatttatttgtgttttc

SEQ ID NO: 41524 - DNA, 383 bp, Homo sapiens
gcttagtttgtaataacttgttatgcagctccagaaaacttgcgcgttagtgggggttctccagagaaacagatctgataggctgagaagtcccacaatctgccgtctacaaactagagaaccaggaaatctggtggtggaattcaatccaagtttgaaggcctgagaaccaggagcactgatgtccatggacagaagatgaatgtctcagctaaaacagcaagtccaccagctgcctgtttaaattctgtttaggcaacagattgtacaatgcccatccacattggtgaggatgatctttacttagtctacctattcaaatactaatctcttccaggaataccctcaaagacacacccagaaataatgctttaccagctatc

SEQ ID NO: 41525 - DNA, 391 bp, Homo sapiens
cagttgatgctactgaaaactgctatgtcacttgaggaacctgcttcctgttctgtttcagatgtttcttcttcattaactttttaattaaaaagctttacagatcaccctaaacttagaaaataagaataatgctctcagtttttttctctcttttgtgtgtgtttatataatctgtaattctccagctctattaaaataagtgccttcctgcaagctgaaataagcctaaagtataatgtgtcttggttctctaattatctcatggatttctaccattgtattaattcatctctaaacttcatggatctgttgactttactggctctcaatatcatctgctttcagtgttgttcatagttaaaaaaaattaaatcaaccttttcctata

SEQ ID NO: 41526 - DNA, 448 bp, Homo sapiens
ggctttctctacatggttgttcatgtagaactttgggcaactcactgtgccctcaagttatgagtccaataacctgttgctccagatgcttgatttcctcaactccagtgcccttcaggtgaggtccacctcactttgctgatagtggcagaggcagtcaaatgcctaggccgatggggcgggtccccaatgaaaccccccttcaaaccaaagacagttcaaagcctgaaatccaagctacaagtcttgggataaatccatgggaccaaattgaggaacctctcttttcgtttggcatgctttcctctgattaatccccaccttccacctattttacatatacctactcttccctaagtggtttcttgcactgtgtttcttacctacctttgagtgggtgcctttgttttagcctttcttgcatactcataaaccaatcagcatgcac

SEQ ID NO: 41527 - DNA, 367 bp, Homo sapiens
tgtccccactgcttggcaccgatgatgagctcaacacaagaggcttcatgcacggcccttgccaggcagcgaaggggagcgtgaggagcaggtgaggtcactggactggcacacgggctcattttaggagactcttgaagctcttcaaatcggtactttaaatctaggccaaattgtacatcaataccttctgttaagaagggaaggatagaccgggtgcggtggctcacacctgtaatcccagcctcccaagtagctgggattacaggcgtccaccaccatgctcagctaattttttgttttgttttgttttgttttgtttgtctgtttgttttttgagatggagtatccctctgttgccaggctg

SEQ ID NO: 41528 - DNA, 359 bp, Homo sapiens
gaccagtggaggtgcctcagtttacttgggagcttggcctctccagcttgccctcctactgcctggaagaagattagtgtcctcttgccttctctagcccctttcccaagaaccctcccagaatttcgtcctatgaagggccagggggtgcaagcacaatgacaggacccaccagcaataccagaagttggccagccctactcatccaaattcccttctgccagctggacatcacaaggatttcagactgccatcctgtgacaactccattttggggtctggggatgtaagggttactgtattagtccattctcactctgctaataaagacatacctgagactgggtaatttataaaga

SEQ ID NO: 41529 - DNA, 628 bp, Homo sapiens
  misc_feature (550)..(550): n is a, c, g, or t
  misc_feature (563)..(563): n is a, c, g, or t
  misc_feature (624)..(624): n is a, c, g, or t
atactttataaagtatattacagtgcagccatatcataagtgcatttcacttaatccaactccaggcccctgaagaaaaaaaaaacaaaatttaggccaagtgtggtggctcatgcctgtactcccaaagtgctagggttacaggggtgagccactgcacccagcctcaatactactttttaaaaatgagtttatctattttttttcctgttgtcttaattattttcaatttctccttaaattttgctagatcttctaatacttagaggatagatacctacagactactgtagggtaacactgttcatttatatttgtgaatattccagagacctaaagcttttctctgcatactttataaagtatattacaatgcagccatatcataagtgcatttcacttaatccaactccaggcccctgaagaaaaaaaaaacaaaatttaggccaagtgtggtggctcatgcctgtaatcccaaagtgctagggttacaggggtgagccactgcaccccagcctcaatacctactttttaaaaatggagtttatcntattttttttccnggtggccttaattaatttccaatttcccccctaaaatttggccaagatcctcctaataccnaaga

SEQ ID NO: 41530 - DNA, 650 bp, Homo sapiens
  misc_feature (572)..(572): n is a, c, g, or t
  misc_feature (585)..(585): n is a, c, g, or t
  misc_feature (646)..(646): n is a, c, g, or t
ttctattaaaagtacagaagttagccagacgtggtggtgggtgcctgtaattcctgctactcgggaggctgaggcgggaaaaccgcttgaacccaggaggctagtcttgaactcctggcctcaagtgatcctcctgccttggcctcccaaagtgctagggttacaggggtgagccactgcacccagcctcaatactactttttaaaaatgagtttatctattttttttcctgttgtcttaattattttcaatttctccttaaattttgctagatcttctaatacttagaggatagatacctacagactactgtagggtaacactgttcatttatatttgtgaatattccagagacctaaagcttttctctgcatactttataaagtatattacaatgcagccatatcataagtgcatttcacttaatccaactccaggcccctgaagaaaaaaaaaacaaaatttaggccaagtgtggtggctcatgcctgtaatcccaaagtgctagggttacaggggtgagccactgcaccccagcctcaatacctactttttaaaaatggagtttatcntattttttttccnggtggccttaattaatttccaatttcccccctaaaatttggccaagatcctcctaataccnaaga

SEQ ID NO: 41531 - DNA, 878 bp, Homo sapiens
  misc_feature (658)..(658): n is a, c, g, or t
  misc_feature (664)..(665): n is a, c, g, or t
  misc_feature (668)..(668): n is a, c, g, or t
  misc_feature (671)..(671): n is a, c, g, or t
  misc_feature (679)..(679): n is a, c, g, or t
  misc_feature (681)..(681): n is a, c, g, or t
  misc_feature (683)..(683): n is a, c, g, or t
  misc_feature (685)..(685): n is a, c, g, or t
  misc_feature (690)..(691): n is a, c, g, or t
  misc_feature (698)..(699): n is a, c, g, or t
  misc_feature (705)..(707): n is a, c, g, or t
  misc_feature (729)..(729): n is a, c, g, or t
  misc_feature (731)..(731): n is a, c, g, or t
  misc_feature (739)..(739): n is a, c, g, or t
aaatgtagactcagacttatttataatgcaacagaatagatgatggtgcctgcaattgtggaccatcccaaatgttctcctacttctccccctttctggttcatttaggaaattattcaattcctggtcatcattgtgggctgctaaacttggtttactctctcccctcaccaaagggaagacagttagttgaccctggctgctgcagttcacattctgctagagcctgggggaaagctgttgtcatttgtctttaggtttattcataatgttgggtttacacatacgttttacatttttatgtagttaaatgtcttgtcctttatgggttctggcttgattgtgcttagaaaggtctttcctcctccaagattgtgaaaataatgtcatgtgttctttgctggcacttgtacgatttcatttttgcatttaaatcagaacttgtaagctggtggactgtgggacagatctggtcaacatatgggttttggttagcctgtcacggaattctgaaagaaattatctgccagtgttttttacataacaatcttctatcttctcatgaaaaatgtaagatttagcaaccctgggcttgcattgtcatatagcaatgctcagaaagaattgaatagcttcggctctttacggacacagctcnatcagnntcnatngtggcacnangntncagtnncagagtnntcggcnnncctaggtacaggctactactcngngatatgtncgtgcaaactggcaaaaaaaagttatgagcactatcttgtgggtttcggcgtacagggaaggcaattgcctccggctgcggcctactacgacgcgacgtggggaacccaccctcggagggtcaaaggccgttcccgcta

SEQ ID NO: 41532 - DNA, 819 bp, Homo sapiens
aaatgtagactcagacttatttataatgcaacagaatagatgatggtgcctgcaattgtggaccatcccaaatgttctcctacttctccccctttctggttcatttaggaaattattcaattcctggtcatcattgtgggctgctaaacttggtttactctctcccctcaccaaagggaagacagttagttgaccctggctgctgcagttcacattctgctagagcctgggggaaagctgttgtcatttgtctttaggtttattcataatgttgggtttacacatacgttttacatttttatgtagttaaatgtcttgtcctttatgggttctggcttgattgtgcttagaaaggtctttcctcctccaagattgtgaaaataatgtcatgtgttctttgctggcacttgtacgatttcatttttgcatttaaatcagaacttgtaagctggtggactgtgggacagatctggtcaacatatgggttttggttagcctgtcacggaattctgaaagaaattatctgccagtgttttttacataacaatcttctatcttctcatgaaaaatgtaagatttagcaaccctgggcttgcattgtcatatagcaatgctcagaaagaattgaatagcttcggctcttttaagcggaacacaggctttctaattcagaacttcccaattggtgtgccatcaaatgcttttcaggtgtgccacgatgttgattccccgccccccagcctaaaggtcagccagagctcctatctaatttcctcctgcagacatcatctgctttgtccgtttgccccagagacttga

SEQ ID NO: 41533 - DNA, 243 bp, Homo sapiens
tgccattatgctcaaacctgggcaacagagcaagacttcatctcaaaaaaaaaaaaaaaaaaaagattcctaccccagaaacacccatcacagcaggttcctgtgcataatttctgcagaggtggagcagagccctgccaagcagaggctgggccacagcggacttcctcttccttatctttgtagctgggactgattttgaattgttttccatttttgcattctcaaggacacattgagtac

SEQ ID NO: 41534 - DNA, 960 bp, Homo sapiens
  misc_feature (951)..(951): n is a, c, g, or t
gcgccgggcgctccatggccgcgccgtaacggggacccagccgcctccccgcccagcccagcccagcccttccgcccgcccaggatggaggcgcccgccagcgcgcagaccccgcacccgcacgagcccatcagcttcggcatcgaccagatccttaacagcccggaccaggacagcgcacccgccccgcggggccccgacggcgccagctacctgggagggccccccgggggccgtccgggcgccacatacccgtctctgcccgcctcctttgcgggcctcggcgcgcccttcgaggacgcgggatcttacagtgtgaacctgagcctagcgcccgcaggcgtgatccgggtgccggcgcacaggccgctgcccggggccgtgccaccgcctctgccaagcgcgctacccgccatgccctccgtgcccacggtctccagccttggcggtctcaatttcccctggatggagagcagccgccgcttcgtgaaagaccgcttcacagcggcggccgcactcacgcccttcaccgtgacccggcgcatcggccacccctaccagaaccggacgccgcccaagcgtaagaagccgcgcacgtccttttcccgggtgcagatctgcgagctggaaaagcgcttccatcgccagaagtacctggcctctgccgagagggcggcgctcgccaagtccctcaaaatgacggacgcgcaggtcaagacctggttccaaaaccggaggaccaagtggcggcggcagacggcggaggagcgggaggcggaccggcagcaggcgagccggctcatgctgcagctgcaacacgacgccttccaaaagagcctcaacgactccatccagcctgacccgctctgtctgcacaactcgtcactctttgctctgcagaatctgcagccctgggaggaggatagttccaaggttcccgctgtcacctcnctggtgtga

SEQ ID NO: 41535 - DNA, 800 bp, Homo sapiens
gcgccgggcgctccatggccgcgccgtaacggggacccagccgcctccccgcccagcccagcccagcccttccgcccgcccaggatggaggcgcccgccagcgcgcagaccccgcacccgcacgagcccatcagcttcggcatcgaccagatccttaacagcccggaccaggacagcgcacccgccccgcggggccccgacggcgccagctacctgggagggccccccgggggccgtccgggcgccacatacccgtctctgcccgcctcctttgcgggcctcggcgcgcccttcgaggacgcgggatcttacagtgtgaacctgagcctagcgcccgcaggcgtgatccgggtgccggcgcacaggccgctgcccggggccgtgccaccgcctctgccaagcgcgctacccgccatgccctccgtgcccacggtctccagccttggcggtctcaatttcccctggatggagagcagccgccgcttcgtgaaagaccgcttcacagcggcggccgcactcacgcccttcaccgtgacccggcgcatcggccacccctaccagaaccggacgccgcccaagcgtaagaagccgcgcacgtccttttcccgggtgcagatctgcgagctggaaaagcgcttccatcgccagaagtacctggcctctgccgagagggcggcgctcgccaagtccctcaaaatgacggacgcgcaggtcaagacctggttccaaaaccggaggaccaagtggcggtgagagaggcctgacccggcccaccttacacctgcccttcacctgtcccg

SEQ ID NO: 41536 - DNA, 412 bp, Homo sapiens
gacaaagctgggatttgaactcatgaatgtcctatcgtcaatttgggaggcttaaacatgctgacatgttgccttcaggtggccatcacataggtggatagtatttctgccccgggtttccagaatggtctttgaagagctcactgatcatggtgtattccatggtgcataacagacagattctgtggtagtacctaatgcaggcagaggtgccttcctgcaggtgtgccagagtctttggtaatgagccattatgctccgtcagtcattctgctgtaaccatgcatagtcatcctgtttccttcctcacagtatatggagttgggatgcattgtttcttggtagaatttactttgtctgccatattgataatatccacttcagcagctacactatgacattcccttaaaaa

SEQ ID NO: 41537 - DNA, 388 bp, Homo sapiens
gagcaagaacgttgagaccttcaagaaccttttctcatgtctcattggccagaattgggtcatctgcccgtccccaaatcagtcactgttacccttagaatttataggctcactcctggagtgaggtcagttttccagattatattgctgctgctcaaaaagggtgagatggaggttggagacccaacagcaatgttcactgtaaatagtttcatcactttgtttctaagttccagttaaactttgcacctttagaaacggaataaattggctggtatggtggctcactcctgtaattctagcactctgggaggccgaggtgggcagattgtttgaactcaggagtttaagactagtctgggtcggccgggcgtggtggctcacacct

SEQ ID NO: 41538 - DNA, 314 bp, Homo sapiens
gccacgacgcatgagcttggcctccagagggcctccgtgaggcaggagctgggcctgcggaggccgtcccgaggtgggagcctggcccgaggaggccacggcgaggcaagaggtgggcctggagggcacactgttgaggtagaggctgggcctctagtggctgtcaacaggcaggaggccaggcctggagaggccgactggtggtcaagttcggggcctgcagaggccgcggaaagtcaaaagcagggcctgggaaggccaccgggaggcatgagctgggctgggctgaaagaggccactgggagacaggagga

SEQ ID NO: 41539 - DNA, 361 bp, Homo sapiens
gagagatcttaagccccatcagtcaccaaagtggttcccttcatcacaatctgccctagaggaaataggcaagtaaaatgatatataaagccatactatgtgctttctgagtatatactgcacttacctttgtgagcggctgtaggagggtctatcctcgaagctagcattttctggcatttaagtttgtagataatcactgttgtttgagttatttattagatattatttatttaatttatttctctcttcctttcacgaaaattcctttagccccatagatgtgcttgcaaacccttcctaaaattttatttggaaagtagctcataattttgctaagaactgctgagttttggagtga

SEQ ID NO: 41540 - DNA, 334 bp, Homo sapiens
tatttagagacaaggtcttgctctcttgcccaggctggagtgcagtggcatgatcttggctcactgcagcttcagcctcccaggctcaagcaattctccttcctcagcttcctgagtagctgggactacaagtgcgtaccaccatgcccggctaattaatttttttatattttgtagagatggagtttcaccatgttgcccaggttggttgaactcctgagctcaagtgatcctcccgccttggcctccccaaatgctcagattatagtcatgagccgctgacttggccccatctacattttagaataatcttgactatatttggaaaaaaaac

SEQ ID NO: 41541 - DNA, 837 bp, Homo sapiens
aggagaacatggatgggtcttatactcccaagtattgcccacatgacagtcctatgttctaccaggtaggcagaggagtccctggacggaataaatgaaaaaacattcagctcaacttacacgcctctctcttgctatggcatatctctgatatatagtgagaagtgaagtaatagctcagatcctttttatgcattatttaagccacaaggcgaagacaaatcatgtttctcagctatcagccactgcacattctttgcctctatgcagtttccctacagtacatttaacccttgcaaacacctccaatacagtccttttcacttctaccttggggatgctgattccttcagctcagatttcctgaggccttgtgttcttcctttctccagaaatgcagacgctgcgtgaggttttggcaacactgggcttaggagcgtctgctcttgccaatacccttgcttttgcccatggaaatgaagtaattcccaccataatcaggtacagaaccttaagtatgccctgtcaggttcaaaatggacctttctcagataattgacactttttgcgggaagaaatctaagactggttcattaagaaaataaatcataacagtcataaacacaaataattatagaccaactttatctcaagctgactttttgccactgtattaagtcctttgatgtattatagtatcccacataaccttctgagccacctgagaggttggtgctaaggatagcagtatttcctaaatgatgaaaatgcatctaatgcacttgtgaactgaaaaattaattgctagcaaataaaagtgaaaatttcaaacacagg

SEQ ID NO: 41542 - DNA, 342 bp, Homo sapiens
taaacctcacttctctaaactaaaccaaggttgattttgttttcgttaggcttaaaagtaataaacttaaaggctggcacacagtaggtaccaataaatgtttgctggattttatctaaatctttctttatcaaatttacaactttgaaaagtatagagaagaactggggtatgtgcttccttatcttttcaaatgctgtcaattactgcggccctactttttttttttttaaataaaatgaacggtaaatatttattttatttttttcctacgagtccagaaatccagaaggattgtaagtgtatgaatatgattattgacttttaaaagaacatatgaca

SEQ ID NO: 41543 - DNA, 446 bp, Homo sapiens
cagtctggctttagaccccttgctctgaactatcactttattgcttatcactgttactgttgttccagtattaagagcatggctgttttaggctgattgccttctctcctgggacctggcatcaccaaagcactatgtctcggaaatccattatctttccccagtctttcctccgttattgtgaggccttttgaaaatgtaccttccggcctccctgatgtcagagggaggcactaggtgctgcccattgtgattagatgggttctggtcttctgcctgcagtgcccctgctcccctttgtccctgtgctcacctctaacatgctctttgaggctgaagggaggaataaaagagcaaaaacaaccgggcacagtggcttacgcctgtaatcccagcactttgggaggccgaggcgggtggatcacaaggtcaggggttcaagacca

SEQ ID NO: 41544 - DNA, 417 bp, Homo sapiens
ctgcatctctaacattacaaaaaagaacaaaaaacagctgatacaaaagggacactctgacctcctttttaaaaataaaaataaattggtcctattttacagatgggaaactgatacaaaagagatctaacggcaggtagtaagattaaattttaggctattttcgaacttgggtcactattaaaaacagaatattaattcaggttgcttcgtaagtctcctgtctgctctttcctgcactgtgaagcatacctgcagtggcagaatttttcttaccaagttccttcctcctgcaatgtggtactggaaattctacagtaaagtaatccagtcacactgagctctcccttctcattgacctgagtctatttcaaaacatggcttaggttttacctcttcctgaaatgttcttgagta

SEQ ID NO: 41545 - DNA, 561 bp, Homo sapiens
aaaaaaatctctaagcacttttttttaatctagaaagtatccttaaatttttctgtcaccggtgtcaccctaggctgcttttgacctgactttagacagctcactggttttaagtcacatttcatcaacccttagccataataatcaggatcctctggttaagtggaatgtctaaccaaaacaaaacaaaaactgatttctttcatactcttttaaatgttcattctgcagacatactgtagattatatttgtaaaaaaaaatcaatttttggtggttacccccacttcccccaaaagaatcacagagaaaggaaagaggaataggtaaagttttaaacttcgtctcaggtaaatgggaaacgagcttgatttttcagggtcttagataagacacttgtatatactgaacaggtgctgcttttggcttgtatcaccaatgaggcagcaaagttagaactcgaaactagggtggggggtggtggctgtataattaggtcacaaagaaatgtggtaaggactttgcatgaataaagtaggtgctttataaggattcaataaga

SEQ ID NO: 41546 - DNA, 405 bp, Homo sapiens
ctaaaaagatttgaaatcattctaatccggctgggctcatgtcacacgacactggcttccggggtttccatgagctagaagtgcattaacattccccaaaggtcacaatgggactaagaaagggcctccaggcctgtgatatgggagagaaagaactttgagagagtgatctttaaaaaatcgtaacgaaatctttggaaccccgactctttctgcaaagaagcaggttttgtccagctcttctaggctccctgaaagtcaataagacccagggagagtggaatgagccaaacggtgccaacacccaaagccctactaggaggaaatcttgtagacaactgcaactgtctggaagtctattaagttggggtaagattaatcctaaacttggattataaggccaga

SEQ ID NO: 41547 - DNA, 923 bp, Homo sapiens
aggtctggggattacagcatggaaatatttggggtagggtggtcattcactctgcttaccacttttggtactatgtatgtgtacagtgtgtgaagtcaagcacagtcacttgcatacgtagagctactcaacagtcagtggtaaatcatgtggtcttgatatggttaggctttgtgtcctcacccatatctcatttgaattgtaatccccataatccccacaatccccacgtgtcaagggagaggccaggtggaggtaattgaatcacggaggcagtttcccccatgctgtgctcttgatagtgagttctcacaagatctgatggttttataaggggctcttccttccctgccttgcttcaccttccaccatgattgtaagtttcctgtggcctccccagccatgctgaactgtgagtccatgagccctctttcctttgtaaattacctagtctccagaagttgtttataacagtgtgaaaacagactaatagaggtataatgtacatggatgcactttggtcaagagtaggccaaggcaggcatccgagcctgcatgactcagtgagtttagggcacaggtgcatactccatttgttataaccggtttgtgtaagtttgtacttggttctggaccactattgtctgtaaaaggtataactgtcctgctgacgctatacaggtgctcgtgcccagagaaagagagagctagagctgtccgtcttttccgtctttgcagacggacagtgaggagccaggacacagctcggcctgcttatgtccagagagagaaagagttaagctgctgaccctgaaggcagggagagccacccacacaggtatacgtgggagcagccggctcaagcagccgagacagagcagaaagtgtaagagagatgctgaataaagctgtatttcacctat

SEQ ID NO: 41548 - DNA, 649 bp, Homo sapiens
gccggactatgggctgtgcctcaagaaaagaagcgcctgccggcgcaccagcgcgtcccactggctctccacgcctcccgcctctcgcactcggagccgccctcggccacaccatcgccagcgctcagcgtggagagcctgtcgtctgagagcgccagccagactgcaggtgcagagcttctggagccgccagctgtgcccaagagctcctcagagcctgctgtccgtgcacctgtgtattcctttcatctttctcattataggatttctgacaggactctgggcccctccccagctccactccctacctcaagaatgtgaccatttggaaaaggcaaagagaaaaggagcaaaatgaagcattcccccaggcttcagccctgggctctgaggggaaagagtggggcattgtttttctaacctaacctttccctctggtgatgttggggtagagaagccgagagaccctgtcctccctaatgcactgtggcccagtccccttgcctttttcctgttctgtttggagtggagaagggcagcacctctgtgtttaatggaagtagcccatagtctcctggatttttggaacatctttttcagcctattttgtgtcctaatgattcactcaataaacatgtttgaatccaca

SEQ ID NO: 41549 - DNA, 429 bp, Homo sapiens
cgctgcacacaaatcagggattaggaggatgttattctgttagtccctgggggcggagtctggagccggagggaggggatcccaccaccatctggtgctgtcccaaccacctggagtcccatgcagccctgaactcctgacgaccccctcaacctaggcccagcagcgccgtctgactccttctcaggttgcaaagagaaagtaggggatcagaggcctgaccccagcccctggataagcctaggaaatcgccgatccccctgcagccccctttggattgcagcgtctcacccagggcccagccccgacacagcggctaccgggtcacgggaggacaagcgacccgagcctgtgggggcggtaccggccttggtgacgtctcaatgtcatatgcaaatagaacgacgtcatggtctaccgggcgtgcgg

SEQ ID NO: 41550 - DNA, 2673 bp, Homo sapiens
tggccgtgcgccggaggcagcggcggcgtggcgcagcggcgacagtaagtgcgggccggctcgggctcttccggctacggtcccggccgcccccagactcgcgctcagcgacctccctcccggaccctgggggcggctgcgggctgccaggggagccgcaggaccctaccccatccgtggtcccttccccaccgtccctcctctccctccttgctctctgccacccctctttctgggtctctatcttctcttccccaaatcctctcccctcctcctccgtgagactggacctcaccgcctgtatggtgggggcctggtatggacccgtcggcccgaagtatccagacggtggctgattctctcggtcccagctgcggggcctgaggctggggctgtttacaccgcaaagccggttctgctgcggccagtaggcggtgccctgcgcttcccagtgccttcccacagtggccgttgtctcagaggacgactttcagcacagttcaaactccacctacagaaccacaagcagcagtctccgagctgaccaggaggcactgcttgagaagctgctggaccgcccgccccctggcctgcagaggcccgaggaccgcttctgtggcacatacatcatcttcttcagcctgggcattggcagtctactgccatggaacttctttatcactgccaaggagtactggatgttcaaactccgcaactcctccagcccagccaccggggaggaccctgagggctcagacatcctgaactactttgagagctaccttgccgttgcctccaccgtgccctccatgctgtgcctggtggccaacttcctgcttgtcaacagggttgcagtccacatccgtgtcctggcctcactgacggtcatcctggccatcttcatggtgataactgcactggtgaaggtggacactttctcctggacccgtggcttttttgcggtcaccattgtctgcatggtgatcctcagcggtgcctccactgtcttcagcagcagcatctacggcatgaccggctcctttcctatgaggaactcccaggcactgatatcaggaggagccatgggcgggacggtcagcgccgtggcctcattggtggacttggctgcatccagtgatgtgaggaacagcgccctggccttcttcctgacggccaccatcttcctcgtgctctgcatgggactctacctgctgctgtccaggctggagtatgccaggtactacatgaggcctgttcttgcggcccatgtgttttctggtgaagaggagcttccccaggactccctcagtgccccttcggtggcctccagattcattgattcccacacaccccctctccgccccatcctgaagaagacggccagcctgggcttctgtgtcacctacgtcttcttcatcaccagcctcatctaccccgccgtctgcaccaacatcgagtccctcaacaagggctcgggctcactgtggaccaccaagtttttcatccccctcactaccttcctcctgtacaactttgctgacctatgtggccggcagctcaccgcctggatccaggtgccagggcccaatagcaaggcgctcccagggttcgtgctcctccggacctgcctcatccccctcttcgtgctctgtaactaccagccccgcgtccacctgaagactgtggtcttccagtccgatgtgtaccccgcactcctcagctccctgctggggctcagcaacggctacctcagcaccctggccctcctctacgggcctaagattgtgcccagggagctggctgaggccacgggagtggtgatgtccttttatgtgtgcttgggcttaacactgggctcagcctgctctaccctcctggtgcacctcatctagaagggaggacacaaggacattggtgcttcagagcctttgaagatgagaagagagtgcaggagggctgggggccatggaggaaaggcctaaagtttcacttggggacagagagcagagcacactcgggcctcatccctcccaagatgccagtgagccacgtccatgcccattccgtgcaaggcagatattccagtcatattaacagaacactcctgagacagttgaagaagaaatagcacaaatcaggggtactcccttcacagctgatggttaacattccaccttctttctagcccttcaaagatgctgccagtgttcgccctagagttattacaaagccagtgccaaaacccagccatgggctctttgcaacctcccagctgcgctcattccagctgacagcgagatgcaagcaaatgctcagctctccttaccctgaaggggtctccctggaatggaagtcccctggcatggtcagtcctcaggcccaagactcaagtgtgcacagacccctgtgttctgtgggtgaacaactgcccactaaccagactggaaaacccagaaagatgggccttccatgaatgcttcattccagagggaccagagggcctccctgtgcaagggatcaagcatgtctggcctgggttttcaaaaaaagagggatcctcatgacctggtggtctatggcctgggtcaagatgagggtctttcagtgttcctgtttacaacatgtcaaagccattggttcaagggcgtaataaatacttgcgtattcaatgta

SEQ ID NO: 41551 - DNA, 2040 bp, Homo sapiens
tggccgtgcgccggaggcagcggcggcgtggcgcagcggcgacatggccgttgtctcagaggacgactttcagcacagttcaaactccacctacagaaccacaagcagcagtctccgagctgaccaggaggcactgcttgagaagctgctggaccgcccgccccctggcctgcagaggcccgaggaccgcttctgtggcacatacatcatcttcttcagcctgggcattggcagtctactgccatggaacttctttatcactgccaaggagtactggatgttcaaactccgcaactcctccagcccagccaccggggaggaccctgagggctcagacatcctgaactactttgagagctaccttgccgttgcctccaccgtgccctccatgctgtgcctggtggccaacttcctgcttgtcaacagggttgcagtccacatccgtgtcctggcctcactgacggtcatcctggccatcttcatggtgataactgcactggtgaaggtggacactttctcctggacccgtggcttttttgcggtcaccattgtctgcatggtgatcctcagcggtgcctccactgtcttcagcagcagcatctacggcatgaccggctcctttcctatgaggaactcccaggcactgatatcaggaggagccatgggcgggacggtcagcgccgtggcctcattggtggacttggctgcatccagtgatgtgaggaacagcgccctggccttcttcctgacggccaccatcttcctcgtgctctgcatgggactctacctgctgctgtccaggctggagtatgccaggtactacatgaggcctgttcttgcggcccatgtgttttctggtgaagaggagcttccccaggactccctcagtgccccttcggtggcctccagattcattgattcccacacaccccctctccgccccatcctgaagaagacggccagcctgggcttctgtgtcacctacgtcttcttcatcaccagcctcatctaccccgccgtctgcaccaacatcgagtccctcaacaagggctcgggctcactgtggaccaccaagtttttcatccccctcactaccttcctcctgtacaactttgctgacctatgtggccggcagctcaccgcctggatccaggtgccagggcccaatagcaaggcgctcccagggttcgtgctcctccggacctgcctcatccccctcttcgtgctctgtaactaccagccccgcgtccacctgaagactgtggtcttccagtccgatgtgtaccccgcactcctcagctccctgctggggctcagcaacggctacctcagcaccctggccctcctctacgggcctaagattgtgcccagggagctggctgaggccacgggagtggtgatgtccttttatgtgtgcttgggcttaacactgggctcagcctgctctaccctcctggtgcacctcatctagaagggaggacacaaggacattggtgcttcagagcctttgaagatgagaagagagtgcaggagggctgggggccatggaggaaaggcctaaagtttcacttggggacagagagcagagcacactcgggcctcatccctcccaagatgccagtgagccacgtccatgcccattccgtgcaaggcagatattccagtcatattaacagaacactcctgagacagttgaagaagaaatagcacaaatcaggggtactcccttcacagctgatggttaacattccaccttctttctagcccttcaaagatgctgccagtgttcgccctagagttattacaaagccagtgccaaaacccagccatgggctctttgcaacctcccagctgcgctcattccagctgacagcgagatgcaagcaaatgctcagctctccttaccctgaaggggtctccctggaatggaagtcccctggcatggtcagtcctcaggcccaagactcaagtgtgcacagacccctgtgttctgtgggtgaacaactgcccactcccgtaccagggggatccctctagagt

SEQ ID NO: 41552 - DNA, 2198 bp, Homo sapiens
tggccgtgcgccggaggcagcggcggcgtggcgcagcggcgacatggccgttgtctcagaggacgactttcagcacagttcaaactccacctacagaaccacaagcagcagtctccgagctgaccaggaggcactgcttgagaagctgctggaccgcccgccccctggcctgcagaggcccgaggaccgcttctgtggcacatacatcatcttcttcagcctgggcattggcagtctactgccatggaacttctttatcactgccaaggagtactggatgttcaaactccgcaactcctccagcccagccaccggggaggaccctgagggctcagacatcctgaactactttgagagctaccttgccgttgcctccaccgtgccctccatgctgtgcctggtggccaacttcctgcttgtcaacagggttgcagtccacatccgtgtcctggcctcactgacggtcatcctggccatcttcatggtgataactgcactggtgaaggtggacactttctcctggacccgtggcttttttgcggtcaccattgtctgcatggtgatcctcagcggtgcctccactgtcttcagcagcagcatctacggcatgaccggctcctttcctatgaggaactcccaggcactgatatcaggaggagccatgggcgggacggtcagcgccgtggcctcattggtggacttggctgcatccagtgatgtgaggaacagcgccctggccttcttcctgacggccaccatcttcctcgtgctctgcatgggactctacctgctgctgtccaggctggagtatgccaggtactacatgaggcctgttcttgcggcccatgtgttttctggtgaagaggagcttccccaggactccctcagtgccccttcggtggcctccagattcattgattcccacacaccccctctccgccccatcctgaagaagacggccagcctgggcttctgtgtcacctacgtcttcttcatcaccagcctcatctaccccgccgtctgcaccaacatcgagtccctcaacaagggctcgggctcactgtggaccaccaagtttttcatccccctcactaccttcctcctgtacaactttgctgacctatgtggccggcagctcaccgcctggatccaggtgccagggcccaatagcaaggcgctcccagggttcgtgctcctccggacctgcctcatccccctcttcgtgctctgtaactaccagccccgcgtccacctgaagactgtggtcttccagtccgatgtgtaccccgcactcctcagctccctgctggggctcagcaacggctacctcagcaccctggccctcctctacgggcctaagattgtgcccagggagctggctgaggccacgggagtggtgatgtccttttatgtgtgcttgggcttaacactgggctcagcctgctctaccctcctggtgcacctcatctagaagggaggacacaaggacattggtgcttcagagcctttgaagatgagaagagagtgcaggagggctgggggccatggaggaaaggcctaaagtttcacttggggacagagagcagagcacactcgggcctcatccctcccaagatgccagtgagccacgtccatgcccattccgtgcaaggcagatattccagtcatattaacagaacactcctgagacagttgaagaagaaatagcacaaatcaggggtactcccttcacagctgatggttaacattccaccttctttctagcccttcaaagatgctgccagtgttcgccctagagttattacaaagccagtgccaaaacccagccatgggctctttgcaacctcccagctgcgctcattccagctgacagcgagatgcaagcaaatgctcagctctccttaccctgaaggggtctccctggaatggaagtcccctggcatggtcagtcctcaggcccaagactcaagtgtgcacagacccctgtgttctgtgggtgaacaactgcccactaaccagactggaaaacccagaaagatgggccttccatgtctggcctgggttttcaaaaaaagagggatcctcatgacctggtggtctatggcctgggtcaagatgagggtctttcagtgttcctgtttacaacatgtcaaagccattggttcaagggcgtaataaatacttgcgtattcaatgta

SEQ ID NO: 41553 - DNA, 1404 bp, Homo sapiens
  misc_feature (1001)..(1001): n is a, c, g, or t
tggccgtgcgccggaggcagcggcggcgtggcgcagcggcgacagtaagtgcgggccggctcgggctcttccggctacggtcccggccgcccccagactcgcgctcagcgacctccctcccggaccctgggggcggctgcgggctgccaggggagccgcaggaccctaccccatccgtggtcccttccccaccgtccctcctctccctccttgctctctgccacccctctttctgggtctctatcttctcttccccaaatcctctcccctcctcctccgtgagactggacctcaccgcctgtatggtgggggcctggtatggacccgtcggcccgaagtatccagacggtggctgattctctcggtcccagctgcggggcctgaggctggggctgtttacaccgcaaagccggttctgctgcggccagtaggcggtgccctgcgcttcccagtgccttcccacagtggccgttgtctcagaggacgactttcagcacagttcaaactccacctacagaaccacaagcagcagtctccgagctgaccaggaggcactgcttgagaagctgctggaccgcccgccccctggcctgcagaggcccgaggaccgcttctgtggcacatacatcatcttcttcagcctgggcattggcagtctactgccatggaacttctttatcactgccaaggagtactggatgttcaaactccgcaactcctccagcccagccaccggggaggaccctgagggctcagacatcctgaactactttgagagctaccttgccgttgcctccaccgtgccctccatgctgtgcctggtggccaacttcctgcttgtcaacaggttgcagtccacattcctgtgtccttggccttgactcaacagtgtctgaaactcccggtcgtctagctgaagaatactaatagagagttatgcctgggcatcggtggctgggcatcgccatgtaaatcccaagcatactcagaggaggcttgangtcatggcagaatcacgttgacacctgggacggtggatgttcgcagtgagcgtgagacgcatgccattggacgtatgccaaggtgtctagaaggcttcccataagagcctatttcgcttgtgaagaactagcattggtgacgtggatagtcaagagaggacgaaaggagaccagatcatgacgatggagcgtctctctcaatgagtcctgcagaaagaccatgaattcacccccaagacttgtggcaagcccctctggagccagtgaattcaggccccttttgcttgctcttggcagaaaatgcaactgggcttcattggtgccccttgaagagggctgacttgaaaccagaaagcagtcaagtaatccagaccgggtggcaggcatgttcattgctccccag

SEQ ID NO: 41554 - DNA, 2252 bp, Homo sapiens
tggccgtgcgccggaggcagcggcggcgtggcgcagcggcgacatggccgttgtctcagaggacgactttcagcacagttcaaactccacctacagaaccacaagcagcagtctccgagctgaccaggaggcactgcttgagaagctgctggaccgcccgccccctggcctgcagaggcccgaggaccgcttctgtggcacatacatcatcttcttcagcctgggcattggcagtctactgccatggaacttctttatcactgccaaggagtactggatgttcaaactccgcaactcctccagcccagccaccggggaggaccctgagggctcagacatcctgaactactttgagagctaccttgccgttgcctccaccgtgccctccatgctgtgcctggtggccaacttcctgcttgtcaacagggttgcagtccacatccgtgtcctggcctcactgacggtcatcctggccatcttcatggtgataactgcactggtgaaggtggacactttctcctggacccgtggcttttttgcggtcaccattgtctgcatggtgatcctcagcggtgcctccactgtcttcagcagcagcatctacggcatgaccggctcctttcctatgaggaactcccaggcactgatatcaggaggagccatgggcgggacggtcagcgccgtggcctcattggtggacttggctgcatccagtgatgtgaggaacagcgccctggccttcttcctgacggccaccatcttcctcgtgctctgcatgggactctacctgctgctgtccaggctggagtatgccaggtactacatgaggcctgttcttgcggcccatgtgttttctggtgaagaggagcttccccaggactccctcagtgccccttcggtggcctccagattcattgattcccacacaccccctctccgccccatcctgaagaagacggccagcctgggcttctgtgtcacctacgtcttcttcatcaccagcctcatctaccccgccgtctgcaccaacatcgagtccctcaacaagggctcgggctcactgtggaccaccaagtttttcatccccctcactaccttcctcctgtacaactttgctgacctatgtggccggcagctcaccgcctggatccaggtgccagggcccaatagcaaggcgctcccagggttcgtgctcctccggacctgcctcatccccctcttcgtgctctgtaactaccagccccgcgtccacctgaagactgtggtcttccagtccgatgtgtaccccgcactcctcagctccctgctggggctcagcaacggctacctcagcaccctggccctcctctacgggcctaagattgtgcccagggagctggctgaggccacgggagtggtgatgtccttttatgtgtgcttgggcttaacactgggctcagcctgctctaccctcctggtgcacctcatctagaagggaggacacaaggacattggtgcttcagagcctttgaagatgagaagagagtgcaggagggctgggggccatggaggaaaggcctaaagtttcacttggggacagagagcagagcacactcgggcctcatccctcccaagatgccagtgagccacgtccatgcccattccgtgcaaggcagatattccagtcatattaacagaacactcctgagacagttgaagaagaaatagcacaaatcaggggtactcccttcacagctgatggttaacattccaccttctttctagcccttcaaagatgctgccagtgttcgccctagagttattacaaagccagtgccaaaacccagccatgggctctttgcaacctcccagctgcgctcattccagctgacagcgagatgcaagcaaatgctcagctctccttaccctgaaggggtctccctggaatggaagtcccctggcatggtcagtcctcaggcccaagactcaagtgtgcacagacccctgtgttctgtgggtgaacaactgcccactaaccagactggaaaacccagaaagatgggccttccatgaatgcttcattccagagggaccagagggcctccctgtgcaagggatcaagcatgtctggcctgggttttcaaaaaaagagggatcctcatgacctggtggtctatggcctgggtcaagatgagggtctttcagtgttcctgtttacaacatgtcaaagccattggttcaagggcgtaataaatacttgcgtattcaatgta

SEQ ID NO: 41555 - DNA, 2150 bp, Homo sapiens
  misc_feature (4)..(4): n is a, c, g, or t
ccgngcggcgtggcgcacggcgacatggccgttgtctcagaggacgactttcagcacagttcaaactccacctacagaaccacaagcagcagtctccgagctgaccaggaggcactgcttgagaagctgctggaccgcccgccccctggcctgcagaggcccgaggaccgcttctgtggcacatacatcatcttcttcagcctgggcattggcagtctactgccatggaacttctttatcactgccaaggagtactggatgttcaaactccgcaactcctccagcccagccaccggggaggaccctgagggctcagacatcctgggttgcagtccacatccgtgtcctggcctcactgacggtcatcctggccatcttcatggtgataactgcactggtgaaggtggacactttctcctggacccgtggcttttttgcggtcaccattgtctgcatggtgatcctcagcggtgcctccactgtcttcagcagcagcatctacggcatgaccggctcctttcctatgaggaactcccaggcactgatatcaggaggagccatgggcgggacggtcagcgccgtggcctcattggtggacttggctgcatccagtgatgtgaggaacagcgccctggccttcttcctgacggccaccatcttcctcgtgctctgcatgggactctacctgctgctgtccaggctggagtatgccaggtactacatgaggcctgttcttgcggcccatgtgttttctggtgaagaggagcttccccaggactccctcagtgccccttcggtggcctccagattcattgattcccacacaccccctctccgccccatcctgaagaagacggccagcctgggcttctgtgtcacctacgtcttcttcatcaccagcctcatctaccccgccgtctgcaccaacatcgagtccctcaacaagggctcgggctcactgtggaccaccaagtttttcatccccctcactaccttcctcctgtacaactttgctgacctatgtggccggcagctcaccgcctggatccaggtgccagggcccaatagcaaggcgctcccagggttcgtgctcctccggacctgcctcatccccctcttcgtgctctgtaactaccagccccgcgtccacctgaagactgtggtcttccagtccgatgtgtaccccgcactcctcagctccctgctggggctcagcaacggctacctcagcaccctggccctcctctacgggcctaagattgtgcccagggagctggctgaggccacgggagtggtgatgtccttttatgtgtgcttgggcttaacactgggctcagcctgctctaccctcctggtgcacctcatctagaagggaggacacaaggacattggtgcttcagagcctttgaagatgagaagagagtgcaggagggctgggggccatggaggaaaggcctaaagtttcacttggggacagagagcagagcacactcgggcctcatccctcccaagatgccagtgagccacgtccatgcccattccgtgcaaggcagatattccagtcatattaacagaacactcctgagacagttgaagaagaaatagcacaaatcaggggtactcccttcacagctgatggttaacattccaccttctttctagcccttcaaagatgctgccagtgttcgccctagagttattacaaagccagtgccaaaacccagccatgggctctttgcaacctcccagctgcgctcattccagctgacagcgagatgcaagcaaatgctcagctctccttaccctgaaggggtctccctggaatggaagtcccctggcatggtcagtcctcaggcccaagactcaagtgtgcacagacccctgtgttctgtgggtgaacaactgcccactaaccagactggaaaacccagaaagatgggccttccatgaatgcttcattccagagggaccagagggcctccctgtgcaagggatcaagcatgtctggcctgggttttcaaaaaaagagggatcctcatgacctggtggtctatggcctgggtcaagatgagggtctttcagtgttcctgtttacaacatgtcaaagccattggttcaagggcgtaataaatacttgcgtattcaatgta

SEQ ID NO: 41556 - DNA, 2203 bp, Homo sapiens
tggccgtgcgccggaggcagcggcggcgtggcgcagcggcgacatggccgttgtctcagaggacgactttcagcacagttcaaactccacctacagaaccacaagcagcagtctccgagctgaccaggaggcactgcttgagaagctgctggaccgcccgccccctggcctgcagaggcccgaggaccgcttctgtggcacatacatcatcttcttcagcctgggcattggcagtctactgccatggaacttctttatcactgccaaggagtactggatgttcaaactccgcaactcctccagcccagccaccggggaggaccctgagggctcagacatcctgaactactttgagagctaccttgccgttgcctccaccgtgccctccatgctgtgcctggtggccaacttcctgcttgtcaacagggttgcagtccacatccgtgtcctggcctcactgacggtcatcctggccatcttcatggtgataactgcactggtgaaggtggacactttctcctggacccgtggcttttttgcggtcaccattgtctgcatggtgatcctcagcggtgcctccactgtcttcagcagcagcatctacggcatgaccggctcctttcctatgaggaactcccaggcactgatatcaggaggagccatgggcgggacggtcagcgccgtggcctcattggtggacttggctgcatccagtgatgtgaggaacagcgccctggccttcttcctgacggccaccatcttcctcgtgctctgcatgggactctacctgctgctgtccaggctggagtatgccaggtactacatgaggcctgttcttgcggcccatgtgttttctggtgaagaggagcttccccaggactccctcagtgccccttcggtggcctccagattcattgattcccacacaccccctctccgccccatcctgaagaagacggccagcctgggcttctgtgtcacctacgtcttcttcatcaccagcctcatctaccccgccgtctgcaccaacatcgagtccctcaacaagggctcgggctcactgtggaccaccaagtttttcatccccctcactaccttcctcctgtacaactttgctgacctatgtggccggcagctcaccgcctggatccaggtgccagggcccaatagcaaggcgctcccagggttcgtgctcctccggacctgcctcatccccctcttcgtgctctgtaactaccagccccgcgtccacctgaagactgtggtcttccagtccgatgtgtaccccgcactcctcagctccctgctggggctcagcaacggctacctcagcaccctggccctcctctacgggcctaagattgtgcccagggagctggctgaggccacgggagtggtgatgtccttttatgtgtgcttgggcttaacactgggctcagcctgctctaccctcctggtgcacctcatctagaagggaggacacaaggacattggtgcttcagagcctttgaagatgagaagagagtgcaggagggctgggggccatggaggaaaggcctaaagtttcacttggggacagagagcagagcacactcgggcctcatccctcccaagatgccagtgagccacgtccatgcccattccgtgcaaggcagatattccagtcatattaacagaacactcctgagacagttgaagaagaaatagcacaaatcaggggtactcccttcacagctgatggttaacattccaccttctttctagcccttcaaagatgctgccagtgttcgccctagagttattacaaagccagtgccaaaacccagccatgggctctttgcaacctcccagctgcgctcattccagctgacagcgagatgcaagcaaatgctcagctctccttaccctgaaggggtctccctggaatggaagtcccctggcatggtcagtcctcagtgcccactaaccagactggaaaacccagaaagatgggccttccatgaatgcttcattccagagggaccagagggcctccctgtgcaagggatcaagcatgtctggcctgggttttcaaaaaaagagggatcctcatgacctggtggtctatggcctgggtcaagatgagggtctttcagtgttcctgtttacaacatgtcaaagccattggttcaagggcgtaataaatacttgcgtattcaatgta

SEQ ID NO: 41557 - DNA, 255 bp, Homo sapiens
taattttctgttaactcgagaatacccagatatgatagttttgtggctaggggttagacatagaaagtgtaactatgaatgcatgtatctgtttgacttcttgtacccccaaaataaaggctaaaataaatataatcagctaaccaaagctatagccacagtcatatatactgtgtaagaaaaaagcctctgatggaggttgcagtgagccgagatcatgccactgcactccagcctgggcgacggggccagact

SEQ ID NO: 41558 - DNA, 488 bp, Homo sapiens
atgctgcaaaccaaatccagcaacatataaaaataattatgcaccatcaccaagtaggatttatcccagggatataagattggcttaacatgtgaaaatcaatgtaatacattatatcaatataataaaaaagtcatctctactgatgcaaaaatagctgcatttgaataaatccaacaccctttcatcataaaaatgtttgaaaaacgaggaacggaaggaaactaccttaacctgataaagaacatctatgaaaaatctacagctttctttatacttaatggtgaaaaactgaatgctttcccactgagattagaaataagacaaggatgcccattatcacacttctatttaacattgtactggagggtctaagccattgcaattatgcaagaagaaaataaaggttggaaaggaagaagaaagactgttcacaaatgacatgatcttgtatgtagaagattctagggaatccaccaaaaaaaaaa

SEQ ID NO: 41559 - DNA, 501 bp, Homo sapiens
tctccatcttggtcacgcttgactcgaactcccgacctcaggtgatctgcctgccttggcctcccaaagtgctgggattacaggcatgagccacctcaccaggctaacaagattgtttttaaaagaatgtactaataaagtatctagtttttttgtttctttgtattactttatcagtggcattctgggttaccaaactgtagtaggattgcacaagttttttagttggttttgttttaactttaaggacttgcacatttcattttacatttaattctgttttttgagaaatgattaaagtgatctacctccaaaatgtttaacaatccgatatgcttctaagtatcctgccaatgtacttaatcaaatgtacttaaaaatcagttttcttaaagaagcatacactgtaattcacctggaaaaatagcatttttaagtaaaattaggcaattagcctaaaaatatgatttgcctctattctggaaaataattcatttaatt

SEQ ID NO: 41560 - DNA, 339 bp, Homo sapiens
aatggagtgagtgctgtttatctaacttccattcgatttgattcctacaaaagctcctgaagaggcgattccatccaggtcacatcagaatcagtttctgggtacccacgcatgagatttcattgcttcttttatcacaggagttggtatcctgtgatgattactccagatttctctttctccttctcttcatttatatctttaaattttttttagattgtttaaatttatttatttatttttattttttatttccgtaggttttgggggaccaggtggtatttggttacatgaataagttctttggtggtgatttctgagattttggtgcacccatta

SEQ ID NO: 41561 - DNA, 465 bp, Homo sapiens
agggaactttccagattcaacatgcccagccccactctcacagattctgtttcaaccagtctggggttgggcccagaaacttgaaaagtggttgtgatttgcacttttaataatctctaatccactataacaagttgtctctaatacctcaccagctcttcaactgcaggggccattttattaataattgtaaacatctatgtaaacatataggttcacttctttaggaaaattgaataaaatcacttatttcaccttatgctgtcttccacctgtgaatgtgttgtataacttcttaagacaaatctggcaccctgtgaatcaaatgagacaagttgatggtcacctgtgagattattcaaataagtgaagatgtttatgcaatttttgattgtcatactctgatgcctgttgagaaattttcttcttccttatatgaaataaatgccactttcacaattctgt

SEQ ID NO: 41562 - DNA, 995 bp, Homo sapiens
tgctttaacattgtaattaccaaacgacctctgtttgagagaggaacatacagaggaccaagggtaagctgtaacttgaaacttacataaaactttttagttacctgtggtggttaaatacttcatggttttggacttactccacattttgaatgtgttaattcagcaaacatttattttaagagtacttaacctactctgtgctaagcagtgtgcaagatattggggaaatagtaggtaacaagacatgaaatgactcacttcattttatttaccatttagcaggaaagataggtgttgaagtctgggaacatcaggaaacacttccctggtgtaatgtttatctcagcttggaaggatgaagaatactttgctggggcaaaaggatgggattggagacctgtgaaagcgttataggtttggtgaacagattgtatggaggtcctaaaaatggacaaaaaagatatgttggaggaattgaaagaaatagaaaaaagcaaaggagaagaatggcagtggaaagctccagagataggagccagatcacacaggactttgttgagtcatgtttaagactttggatgttattgaaggatagtgggaagccagtgaagggttttagggcaagagggttttcagatggatgtttaaaaaaaaaaaaaaaagcctggctgtgttttcagcgtgaaatagaagtctgcatatctgtatttactgtttcataacttctgtacatgtatcagggttctgagtttcataaattattgaaaataattttcaatgtctttttcataaattgagaattttgaactttattaaaattgtcatcttgaaatgcttaagattgatgttttgttatctcaaagatttgcttagtcatacttgccaataatatgaaactaaatgttagtcttttttctaacatttcgttttgatgatgagaagtcctgaaaaaaaaattaagctcctttgttgtagtaaacttttaaacaaac

SEQ ID NO: 41563 - DNA, 351 bp, Homo sapiens
ccagctaatttttgtattttttagtagagacgaagtttcaccacgatggccaggctggtctcgaactcctgacgtcaggagtttgtcctgacgttacccgcctcagcctcccaatctgggtttcgtatcaagtgtagaaatatttactcaagctattttatttagtaaacactatgatcacagatcttaggtctgtgagcatctcaaaaaaaacctataaaaatatttgaaacacaaaataaaatattttttgccctagaaaacaaaaagaaaattgctaagtctaagtaattaaatgcttattttaactaaatgtctaaaaatatagcattatatcactttcagtaacta

SEQ ID NO: 41564 - DNA, 426 bp, Homo sapiens
gacttccataccacctgctcccattgtttaattcacatgaagcgatggatcaaaatgaagtgaaaactaaagagagaaaacatacagtgtcattgagacatgtttccagtgtcaaggactatgtaaaccatccgcctcctcttaaggcgttagacttaatccatactttcaagttatctttccgcaatggttttggatacactgatgtcattcggtgattctttatccatatgacatatgccatttttcactcatgaaaagcgttgtttaagaagtaaatttaaatgataattcatgtttagggaagaaatgatactggtgctacagtgagtcctgcatcctaacagccttatataatttctgaaggaagtttcactggataaatccacgtagttcataagaaatagagactattccagtcataac

SEQ ID NO: 41565 - DNA, 278 bp, Homo sapiens
gaattaaaaagaagaaatgggctgggcatggtacctgtaatcccagcactttgggaggccaagctgagaggattgcttgagacctggctgggtaacacagtgagacctcatctccaaaaaaatcagaaaattagcctgatgtggtggcatacatctatagtcccagctactcgggaggctgaggtgggagaatcgcttgagctggggaagtcgaggctaaagtgaaccacagtcgcgccactgcactccagcctggatgaaagtgagactctgtctca

SEQ ID NO: 41566 - DNA, 1275 bp, Homo sapiens
  misc_feature (1)..(1): n is a, c, g, or t
  misc_feature (5)..(6): n is a, c, g, or t
ngccnnggcaggctattccggacgccagccctggaagctgagcctgacccagcaggtcccagcagcctggcagcccggccagcatgcagcagcagcctctgcccgggcctggcgcccccacaactgagccaaccaagcctccctacagctacatcgcccttattgctatggccatccagagctcaccggggcagcgggccaccctcagtggcatctaccgctacatcatgggccgattcgccttctaccgccacaaccggcccggctggcagaacagcatccgccacaacctgtcactcaacgagtgctttgtcaaggtgccccgcgatgaccgcaagccaggcaagggcagctactggacgctggaccctgactgccacgacatgtttgagcacggcagcttcctacgccgccgccgccgcttcacccggcagacaggtgctgagggcacccggggccccgccaaggcacgccgtggacccctcagggcgaccagccaggacccaggagtccccaacgccacgaccggcaggcagtgctcattcccaccagagctgccagatcccaagggcctaagctttgggggtctggtgggggccatgccagccagtatgtgcccagcaaccactgatggcaggcctcggccacccatggagcccaaagagatttccacgcccaagcctgcatgcccaggggagctccccgtggcacctcatcttcctcatgcccagcgtttggctttcctgccggcttctcagaggctgagagttttaataaggcccctacgcccgtcttgtccccggaatcaggcatcgggagcagctaccagtgtcggctgcaggcactgaatttttgcatgggggctgacccaggccttgagcacctcttggcctcagcagccccctcccctgcaccacccacccctccaggctcactccgggccccactgcccctgccaactgaccacaaggaaccctgggttgcaggtggcttccctgtccagggaggctccggctacccattggggctgaccccctgcctataccggacgccaggaatgttcttctttgagtaaaggcagcctcacctcgggcagtccctgcaggtcccctggtgagccaaggacaaccacacagaaagccaggattgaagcggtgctcagccaggcccctggggcctccggacaaacttgggggtgaggggaagcagggcctcttgggatttactctgtggctctcagggccaataaagccatgtgatgatgaaaaaaaaaaa

SEQ ID NO: 41567 - DNA, 1332 bp, Homo sapiens
  misc_feature (1)..(1): n is a, c, g, or t
  misc_feature (5)..(6): n is a, c, g, or t
ngccnnggcaggctattccggacgccagccctggaagctgagcctgacccagcaggtcccagcagcctggcagcccggccagcatgcagcagcagcctctgcccgggcctggcgcccccacaactgagccaaccaagcctccctacagctacatcgcccttattgctatggccatccagagctcaccggggcagcgggccaccctcagtggcatctaccgctacatcatgggccgattcgccttctaccgccacaaccggcccggctggcagaacagcatccgccacaacctgtcactcaacgagtgctttgtcaaggtgccccgcgatgaccgcaagccaggcaagggcagctactggacgctggaccctgactgccacgacatgtttgagcacggcagcttcctacgccgccgccgccgcttcacccggcagacaggtgctgagggcacccggggccccgccaaggcacgccgtggacccctcagggcgaccagccaggacccaggagtccccaacgccacgaccggcaggcagtgctcattcccaccagagctgccagatcccaagggcctaagctttgggggtctggtgggggccatgccagccagtatgtgcccagcaaccactgatggcaggcctcggccacccatggagcccaaagagatttccacgcccaagcctgcatgcccaggggagctccccgtggcacctcatcttcctcatgcccagcgtttggctttcctgccggcttctcagaggctgagagttttaataaggcccctacgcccgtcttgtccccggaatcaggcatcgggagcagctaccagtgtcggctgcaggcactgaatttttgcatgggggctgacccaggccttgagcacctcttggcctcagcagccccctcccctgcaccacccacccctccaggctcactccgggccccactgcccctgccaactgaccacaaggaaccctgggttgcaggtggcttccctgtccagggaggctccggctacccattggggctgaccccctgcctataccggacgccaggaatgttcttctttgagtaaaggcagcctcacctcgggcagtccctgcaggtccctcaccctccgggctgagcctggctctaggacctgaagaactctcgaaggacccagccctggtgagccaaggacaaccacacagaaagccaggattgaagcggtgctcagccaggcccctggggcctccggacaaacttgggggtgaggggaagcagggcctcttgggatttactctgtggctctcagggccaataaagccatgtgatgatgaaaaaaaaaaa

SEQ ID NO: 41568 - DNA, 488 bp, Homo sapiens
tttttttttttaaatccccagacagagtctcactctgccacccaggttggagtgcggtggccaatctcggctcactgcaacctctgcttcctgggttcaagcgattctcctgccttagcctcccgagtagctgggattataggcatgcaccaccacgcccagctaatttttttgtatttttagtagagatggggtttcaccatgttggccaggatggtctcgatctcctgaccttgggatccacccaccttagcctcccaaagtgctgggattacaggtgtgagccaccgtgcccagcccacaacttttttttaaagctgtgtttcttctaggagcctcttctccacgccaggcataaggaggaggtttattttaatgactttcaccttccaggtctttccagacataaagcaactaatgtgtaagtgcattaattgccaaatctcacaaaccacactactatgattcttgtcttgcagccgtctaac

SEQ ID NO: 41569 - DNA, 420 bp, Homo sapiens
agagatgaggtctcactctattgcccaggatggtcttgaactcctagactcaaacaatcctcccaagatgttggaattcaggtgtgagccactgtgtccagctgagattgagtaccctttcatgctatgggccatttgtattttgtgggagataaactgcctgttgggtctttttctcttttttttaattaaaaaagttctgaaaaattttaagtataaaaaaatacacagggtgttataatagccatgcatgtacctgtcacataaaatgaacaaatgttagtattttctaaagtgcatccaaatattttccttcccttccctcttaaaggaagaacatcactgataaaattaaattcctaaaaaaaaaaaagttaaaattcctgtaagtacccattcacccacctttccaggagcaat

SEQ ID NO: 41570 - DNA, 603 bp, Homo sapiens
tctttccccaaccccgttacccctgagcgagtttgggggcaagcataggtttgtaggcactgcaaagaagaactctcacgctgtggtgcaggaccgtggccttggcctctggatatctgggccaggtgggtgcatttgggcctcttccctacagtgcctggtcagactgcaagagacataggaagcagccagggcaggctatcttaagaggagggagcatatttgataaagttagaaaatgattctcagctgtccataggaaaagggaaggaaggaaggaaagaaggaaggaaggaagaaagaaggaaagaaagaagattcattattctgtcctctgaacctgagtgaagaaatatactctgtcctttgtacctgcgtgaagaaagaagagaaaagaaagaaaagaaagaaagaaagaaagaaacgaaggaaggaagaaagaaagagtgtaaagaaataaaaggctgtaaagaaataaaataatgtaaagaaagaaaataatgtaaagaaagaaaagaaaggaaagaaagaaggaaggaaagaaagaaagaagagagggagaggaaggaaggaagaaaggaaagaaagaaagaaagacagaca

SEQ ID NO: 41571 - DNA, 1226 bp, Homo sapiens
tctttccccaaccccgttacccctgagcgagtttgggggcaagcataggtttgtaggcactgcaaagaagaactctcacgctgtggtgcaggaccgtggccttggcctctggatatctgggccaggtgggtgcatttgggcctcttccctacagtgcctggtcagactgcaagagacataggaagcagccagggcaggctatcttaagaggagggagcatatttgataaagttagaaaatgattctcagctgtccataggaagagcagagtaaggggctatgtgagaagtttggaagatggcccagttccaaaaatgaagaaagaaagtaagaaagaaagagagaaagagagaaagaaaggaaggaaggaaggaaggaaggaaagaaagaggaaagaaagaaagaggaaagaaagaaggaaagaaagaaggaaggaaagaaagaaagaagagagggagaggaaggaaggaagaaaggaaagaaagaaagaaaaaggaaggaaggaaagaaggaaggaggggaagaaggaagaaagaaggaaagaaagattcattattctgtcctctgaacctgagtgaagaaaaataccctgtcctttgtacctgcgtgaagagagaaaagaaaagaaaagaaaagaaagaaagaaagaaagaaaagaaagacaggaaggaagaaaggaaagaaagaaagaaagaaagaaagaaaaaaagacagacaggaaggaagaaaggaaagaaagaaagaaaagggaaggaaggaaggaaagaaggaaggaaggaagaaagaaggaaagaaagaagattcattattctgtcctctgaacctgagtgaagaaatatactctgtcctttgtacctgcgtgaagaaagaaaagaaaagaaagaaaagggaaggaaggaaggaaagaaggaaggaaggaagaaagaaggaaagaaagaagattcattattctgtcctctgaacctgagtgaagaaatatactctgtcctttgtacctgcgtgaagaaagaagagaaaagaaagaaaagaaagaaagaaagaaagaaacgaaggaaggaagaaagaaagagtgtaaagaaataaaaggctgtaaagaaataaaataatgtaaagaaagaaaataatgtaaagaaagaaaagaaaggaaagaaagaaggaaggaaagaaagaaagaagagagggagaggaaggaaggaagaaaggaaagaaagaaagaaagacagaca
